United States Patent Application Publication US 2018/0305689 A1 - sequence listing, part 2

SEQ ID NO: 604 - DNA, 4001 bp, Homo sapiens
atgaaggtaacacttcaactgatcttcataacccaaacccaggattgcccttaacagccttagctgacaaagctcattagaaatcaaactcttcctttaacaaaacaagacattttaaaccaaccaaccactcaatgtcagcaccccgaccttctgcctagccattgtttctacatcctcagcagaatcctcttttcttttagtgtgctctgagagagtcaaaggacgtttttgaagttccctttagtcctttcccatcctgagccccaatcccaatgtcctcaaatcttactacttgatttgcctagtggtctctccacctatgaatggctagggaaaatgatgcctcttcttttgccccccgaccccacctactctcaaggctcatacttcctacagtatatctctcaccatatttccccaccaccaatattcagactcatcaagagtgcaaaaacgaaataatctgcagtcttaaagtctctgcttctcctttgttctacactgttttaaaaagtctagtccccaaagcttctctgctcctctgtctccattctttgcttctttaggactccctgggctcttggcacattctccaagtccacatttccacctcagatttggagcttttctttctacacctaaagacagatctctaacttattcttcattcaggatctgaacttaccttctccctaaaaccgtttttccctctttgacttccaaggcctacacccttttttcttcctaaggacttcctttctccttcctgtcaatgtggccccttggtagtgcaaggagatgccttcttcccattccacctttcaccactactcacttggcaaagcgagagcgatttccaaccacaccgaattcctcttcctcttcggagctggactcagagtctgagtcgggaggctcagtgcgaagcaggcggtgactgcttgggcctttcttgggcttctttctccggctgtccccagccaaaccaatcaatgcattgagctctttgcgctttttcatctttttgtgtggggtgagtggagccccgactcctgagctgccaggttcgtacccgatgcccaattctcttcctgccttggagctgccttccagggttgggaatcctgggccagagccccctggtcactcccacctaggggtgggactgaccagatccgccagggactggagattggagcccagaggaaactggaactcagatgggtgggggaaatcacatagaaatggccaaggagctggtgaccccaaaggataaggccttgggtgcagagtgttagtagagggtggagagggacctttatctcccaaagggcgaaaaaaaagccaggtcaaaaatgaaggattctcagcccggataagtaggcaatacttctaagggtgctccaggaggtgaggaagggcacgcttaaaatacgtgtttcggacctccggagcaagatttccaatggagagggaagagaaactcgttcttgaatgggaagagagtggggaggtgcagagtaagaaagtgggaacgcgtcagtcccttccttgcaggagaggtggcggcaggagggggctcccagcagctacaatcccaacactgcttggccgcagagaaaatgccctggccaggaagccggctggggtgtgtgatgatcaccgttctccggcctccgtcctgaacgtgaagggggcccgaggccgaggaagatccggagcccggctagaagggtcggcctgagagaagccagtcccgcgcctgatagacccccgccccgctgtctgggccttggggacacggtgccgcgggcgacggcggctcggccgaccgaaagcgctcccgcccggagtttgaggtctccggcacgggcaactctcggccactcacacgcgcaggccccactccagccgcgactccggcccctgctccggcttcggccgcggctgctcccgacacgttgttgttggcgttggtggcggcggctgcggcggcggcggccgcgagctccagccccgggccatcgctccagccccagatcacttcccctttggcagcggccgcctgcgccgcctgccagtaagccgcactcccattggtcgcccgctggggtgacgtcacgccggggcgaaagtcgtggcggagaggtggggcgttaaaggggccctgccccggctggggctgggtcccacctgccgattagggtggccccgcccccaggagggcttccgggacctgctgcgaacctgagccgggtggagtcctgcatcctgcggagcgcgggcggggcaggcaaagcgcccggctgctcgacctacttcgaaagttcatcagccgcccacgccccctggactaaccaagtctgaaggctccgcctctctgactctcacacaggctgttaaaagtttaggcgcgtttcagattaattaacacattcattcagtcaataaatatttattgagagcttacttactacgtgtcaggagctgttctagcgctggggatacagccatgaacaaaataaccagggtccttgtcttcctgtatagtgttgccagatttagcaaataaaaatgtaggacacccagtaaagtttgaatttcagagaaacagcaaacaattttttagcattaagacatcccatgcaacatctgggacatcctcacactaaaaaattattcattgtgtatgtgaaatgcaagtttaactgagcatcgtgtatcttatctgccaatctattcctgcagtttatttatactctagagggaggagagcaacaataggcaaacatattaaatgtcaggaggtgataagtgttatgatgaaaattgaaacacggtcaggtgatggggagtgcctctgtgaaaagggaacatttagtcagcttatcggaggagaggtgagggaatgagctgtgcagtggctgcaggaaggagtgaccaggaagacctgttgtggctggaccagaagagcaaggagcagagtgataggaaatgaggtcagagaagcatcagaggccagggctttagggccttatggatcactgaaaggactttgggaaagcactgggggctttaagctgagaggtagcatactctggcttttccgtaaaaaaaaaaaaaaaaaaaaaaattcactctgggccagcgcgatggctcacgcctgtaatcccagcattttgggaggctgaggtgggcggatcacaaggtcaggagatggagaccatcctggccaatatggtgaaaccttgtctctattaaaaatacaaaaattacctgggcgtggtggtgcgcgcttgtaatcccagctacttgggaggctgaggcaagagaatggcttgaaaccgggaggcggaggttgcaacaagccgagattgcaccactgcacttcagtctggcaacagagcgagactccgtctcaaaaataaataaataaataaataaataaataaataaataaataaataaataaataaaataaaataaaataaaggaaaaaattactctggctactttgtagaaaaaagtggggggagagtgaggaacacaggagagcagtttgttacagtccagctagagatgatgctgatagattagagaggcagtagcagagatggagagcattctggatgtttcttgaagacagagctgacaatttttgctgatagattagatgaaaggtgtgaagagaagagagggtttggcggtggaaacactggaagcaaggaattgttatttattgagatggggtagagcaagtttgggacaagtttgacaagccaattcaatattcaaatggaggctgtttggtatacccattgagagttctctgggcacaggttggggcctgaaatatcaattgggaagtcatcagatataaatggaatttaaagcaaagtgctttgagctacttggaagaaagtcacttaaagtaatttttatgcccatattcttactgtggcaattacgctgcttttgtccaaggattctcgcaaagc

SEQ ID NO: 605 - DNA, 4001 bp, Homo sapiens
atacctacaaaataatcctggcttctcagattaatattacataaaaatcacggtatccttgttatcaatagagagatcgttggcagtttcatgtgtttcttcgccgattttctgtgatcaccggaacaagtgactaaatatctcagggttcgtttcttcccttgtaaatattagctgttaacctgaccacacttggttctatgctgagaaaaatggtttgagagggtgttttgagcactccagaaagaaaacaaaggacgaatattattttcacttcctacttgtttacctttactgtttcatggctttttggatatttttgggtgactgccaactatcaaacacaattattttttagtacctaagggcatggtaacaaaggatcgggttttaatcataccatgaactgaaaacaacatgaacggtcttgcaaataaacgtaatcactttttggcttctccgcacagacaacacatcgatgcctccgaactggcgaccttaagcctcgaagcgcagtcccgcctctgcaggcggccaccgcgcggggctgggtggtcccctgggagaggcccggccggcgcacagcggttccaagatctcaaccaggttttggtttttcgtcgttattaaaattgctgtttgggtgtgtgtctttttttttttttaagacaagacactaggccaattgcgcggcgctagccggcggcggggcaggcatttcggaggaccgggaagctcggaggcagcggctgtgacctccagaccgtcctcctgcgtcctcattaaggaggcaaaatggtggccgcgaacgccatcaggctgcgccagcgcggggtttcggcgcaaacagaggatcccgtcagattcaggcggccagaactcctcctcacccaggccaccccccggggcccacagcctggacagctacgggcgtggcgcctgcggcaccgagaccccaggcgagagtgtggaggcggcggcggcttccccgcgaccgtgaacaacgacgccattatcagcaccccctgccggcgcctccggcgcagcccgcgcaggatgcaaggcccggcctccgagggagggggaaggaggacggggcgggaggaggggaagagggtgaagagggcgggaggagaaagaagaaggcgggaggaggggagagagaagagggagggaagaggggagagaggcggggcggggcgggggagagaggcggggcggggcggggcggagcggcgggccgggcgggctacggggacgggggcagggcgactgctgctgccgggtggccccctcctcaggccgccctttccctgcgggtgggaactccagatggacgagggcccaccccacccggcgcttccccgtgcagcccggggtcgcggcgggcggcgagggcagcggctccccggctcccctaccttaccttccctgtccttctcgtccgccatcttgctgcggagccggtcgcctgggagatgcctaacgataacctcggccgcggtgtcccggcctgctcagcgccccgcggcgagcctggcctggaggaggggccgctctgaatcccgggggaggaagacccttgggcggggcggggcggggaggaggctccgagcgcgcgccctgtccccgtttcgcgccacgaccctcgcgctgggggaagaccagaggccccgtctgccacccggcccccggccttgtccctccagacccgaggccggagccggacttgtcccgggcctagcatgttgcttcatcacacggtccccaacccctcctttcccttatttctcatccatttggggacagcacgcgcgcgcacacacccctcgccccctcctgtcctgtttgtgcgacgtggcgttgctcgatttttgttgttaactgcagattttgaaaagcgccggagagctaggtgaagagctgggctcccaagggggtgatagaaccagcccgcggcccggcctcctcctcccgcttcccattcgcagcccgcctcccgccgggaagcggcccggctgctgcagaacggccgcgcctgccctcccggtttctcccgtccagtcttcaccgtcctttcccagagaaagcgacagcacagcctatgacaaccgaagctaaaacggaaaaactgggccgggcgcaagaggaaaccagagccattcgactattgctagaggagaggaatagctgcaggaaaacatgcgcaaaatagcacaaacattgcgtcgtcaaggctgcaatgtctaatacaaaatagaaggttctcatagcaacaaaaacgtgcccatgttgtgctcagtattacatgcgttaaaatgttcttagttgtgaaatttgacatgaccgctagttaaagttacaatggaagttttaaatcccgctttccgaaaactttgcagctatagcatgaagttaaatttttgtcttattttctggataagtttactatactggaacatagtaaagctctttttataaagagctttgaataaaatacctaatgatgtggttgaaacgaacacctattttcaaaactaatcttaagtggtatttcagtgcatatgttatgtaaaagcaatttataaactaaattttaagagccttcaaaatacaaggtactcgtatttaatgacttaacagttttaatgcttttattgtttctataatctctcaggaaatcctaaaactgactatatttttctttattaaaataactttttctgtagaagatacccatttggcgctgtgatcagcattctacttgaaattgaatataaacaactgaatcattacaaaatggctcatgttagaagatacttaaaacgaatacaatcttgtacagtaaatgtttaacaccccaaaataacgaaaagtaattattagcattcatttatatctaaatctcagtcaatatgatctaaatatttgtgtttaaagactccccctttccatatagataatgaagggctttgaaataagtgtaggaaaccctaagtttggtctcaggcttcctattcattcactatgctttttcgtgtgctgtttacagtttcctttttctggaatgcctttccctgcttttttcccccgccaacatttcagcttcccacagacacacatttgtgccctcctggttgtcctgcaggatgacctttgtttttgtttttgtcttttgtttttcgagacagggtctcgctctgtcgtccaggatggagtgcagtggtgtgatctctgctcactgcaacttccgcctcccggtctcaagtgaccctcccaccgcaacctcccaagtagctgggaggagcggcgcgcgccaccatgtctggctagtttttgtattttttgtagagacagagtttccccatgttgcccaggctgctctcaaactcctgagctcaagcgatctgccgcctgcctggccctcccaaagttctgggattacaggtgtgagccactgtgcctggccaggatgacctttttgaagtcacctagtcattgaagctttccctctcagccttttcctctgtggccccatgcttatagagcctcccacattgatttgcagtgccttcgttcgttcactttatttccacctaccaaacagtaagatcttgaagacagaaacggcattattcgtttatatatccccggtatctagtacaatttttctgtttgcaataataaatgtcttaaaacttaagaaaggagtaagtcttctcaatgactttttttaaaaaagacccagattcagcacttattgtatgtaagacagaccttccttttacattacatttttcatcagtaaaagtactgggccaggcgcggtggctcacgcataatctcagcactttgggaggctgaagcgggtggatcacttcaggtcatgagttaaagacccacctggccaacatggtaaaaccccatctctactaaaaatagaaaaattagccgaatgtggtggctcacgcctgtaatcccagctactcgggaggctgaga

SEQ ID NO: 606 - DNA, 4001 bp, Homo sapiens
caccttccttggaagcaaagacaatgtctttcattttcgtatctttcaaagttctaagtagaatgccttatctacataatggcattgaatatatgtattctgaatgaatggcatccagcttttaacagtcattacttctatgagttatcgacaaaattgtttctctgaatttactttaaatggaaaaaaattgttcaaaagctgaaaaatcaggaaagctctcagtttttaaaaaacgagaaatactgtatttgtaccatactccagtgcgttttttctcatgctgacctaaccaagtcttttttaagaaaataaatatccataattaccttgctagtttatctcctaatggcttttttttttttttttttggtaaagaacaaaaataagccatccatttttctgggaaagttttaaaattatccttttctttgtatgtaagggcatcttcgtaaagctaatacctacaaaataatcctggcttctcagattaatattacataaaaatcacggtatccttgttatcaatagagagatcgttggcagtttcatgtgtttcttcgccgattttctgtgatcaccggaacaagtgactaaatatctcagggttcgtttcttcccttgtaaatattagctgttaacctgaccacacttggttctatgctgagaaaaatggtttgagagggtgttttgagcactccagaaagaaaacaaaggacgaatattattttcacttcctacttgtttacctttactgtttcatggctttttggatatttttgggtgactgccaactatcaaacacaattattttttagtacctaagggcatggtaacaaaggatcgggttttaatcataccatgaactgaaaacaacatgaacggtcttgcaaataaacgtaatcactttttggcttctccgcacagacaacacatcgatgcctccgaactggcgaccttaagcctcgaagcgcagtcccgcctctgcaggcggccaccgcgcggggctgggtggtcccctgggagaggcccggccggcgcacagcggttccaagatctcaaccaggttttggtttttcgtcgttattaaaattgctgtttgggtgtgtgtctttttttttttttaagacaagacactaggccaattgcgcggcgctagccggcggcggggcaggcatttcggaggaccgggaagctcggaggcagcggctgtgacctccagaccgtcctcctgcgtcctcattaaggaggcaaaatggtggccgcgaacgccatcaggctgcgccagcgcggggtttcggcgcaaacagaggatcccgtcagattcaggcggccagaactcctcctcacccaggccaccccccggggcccacagcctggacagctacgggcgtggcgcctgcggcaccgagaccccaggcgagagtgtggaggcggcggcggcttccccgcgaccgtgaacaacgacgccattatcagcaccccctgccggcgcctccggcgcagcccgcgcaggatgcaaggcccggcctccgagggagggggaaggaggacggggcgggaggaggggaagagggtgaagagggcgggaggagaaagaagaaggcgggaggaggggagagagaagagggagggaagaggggagagaggcggggcggggcgggggagagaggcggggcggggcggggcggagcggcgggccgggcgggctacggggacgggggcagggcgactgctgctgccgggtggccccctcctcaggccgccctttccctgcgggtgggaactccagatggacgagggcccaccccacccggcgcttccccgtgcagcccggggtcgcggcgggcggcgagggcagcggctccccggctcccctaccttaccttccctgtccttctcgtccgccatcttgctgcggagccggtcgcctgggagatgcctaacgataacctcggccgcggtgtcccggcctgctcagcgccccgcggcgagcctggcctggaggaggggccgctctgaatcccgggggaggaagacccttgggcggggcggggcggggaggaggctccgagcgcgcgccctgtccccgtttcgcgccacgaccctcgcgctgggggaagaccagaggccccgtctgccacccggcccccggccttgtccctccagacccgaggccggagccggacttgtcccgggcctagcatgttgcttcatcacacggtccccaacccctcctttcccttatttctcatccatttggggacagcacgcgcgcgcacacacccctcgccccctcctgtcctgtttgtgcgacgtggcgttgctcgatttttgttgttaactgcagattttgaaaagcgccggagagctaggtgaagagctgggctcccaagggggtgatagaaccagcccgcggcccggcctcctcctcccgcttcccattcgcagcccgcctcccgccgggaagcggcccggctgctgcagaacggccgcgcctgccctcccggtttctcccgtccagtcttcaccgtcctttcccagagaaagcgacagcacagcctatgacaaccgaagctaaaacggaaaaactgggccgggcgcaagaggaaaccagagccattcgactattgctagaggagaggaatagctgcaggaaaacatgcgcaaaatagcacaaacattgcgtcgtcaaggctgcaatgtctaatacaaaatagaaggttctcatagcaacaaaaacgtgcccatgttgtgctcagtattacatgcgttaaaatgttcttagttgtgaaatttgacatgaccgctagttaaagttacaatggaagttttaaatcccgctttccgaaaactttgcagctatagcatgaagttaaatttttgtcttattttctggataagtttactatactggaacatagtaaagctctttttataaagagctttgaataaaatacctaatgatgtggttgaaacgaacacctattttcaaaactaatcttaagtggtatttcagtgcatatgttatgtaaaagcaatttataaactaaattttaagagccttcaaaatacaaggtactcgtatttaatgacttaacagttttaatgcttttattgtttctataatctctcaggaaatcctaaaactgactatatttttctttattaaaataactttttctgtagaagatacccatttggcgctgtgatcagcattctacttgaaattgaatataaacaactgaatcattacaaaatggctcatgttagaagatacttaaaacgaatacaatcttgtacagtaaatgtttaacaccccaaaataacgaaaagtaattattagcattcatttatatctaaatctcagtcaatatgatctaaatatttgtgtttaaagactccccctttccatatagataatgaagggctttgaaataagtgtaggaaaccctaagtttggtctcaggcttcctattcattcactatgctttttcgtgtgctgtttacagtttcctttttctggaatgcctttccctgcttttttcccccgccaacatttcagcttcccacagacacacatttgtgccctcctggttgtcctgcaggatgacctttgtttttgtttttgtcttttgtttttcgagacagggtctcgctctgtcgtccaggatggagtgcagtggtgtgatctctgctcactgcaacttccgcctcccggtctcaagtgaccctcccaccgcaacctcccaagtagctgggaggagcggcgcgcgccaccatgtctggctagtttttgtattttttgtagagacagagtttccccatgttgcccaggctgctctcaaactcctgagctcaagcgatctgccgcctgcctggccctcccaaagttctgggattacaggtgtgagccactgtgcctggccaggatgacctttttgaagtcacctagtcattgaagctttccctctcagccttttcctctgtggccccatgct

SEQ ID NO: 607 - DNA, 4001 bp, Homo sapiens
gttaatttctaattttagatatatacatatgtatatatataattgttcaaatatgtgataatagccaaaagaacaaagatatacacaagagaagaatcactgaacaaaggaagagcacacatctattctctcaaaatacgaaagtcagatgacagtcttcatcaggtttttaagaggagcaaatcagttaatacatgtgaagcatatacaatattgcttgacacgtagtaagtgctaaataaactgcagataatgagaaactccagaataatgagaatcgggatatgagtggtagttgacacccatcttccacagcaggatcaacaagatcatttcattaacatctcaataatgcagccccacatttcaaatagctatattttaaaagtcttatttatagcattatcatagttttactgtgttcctttattaataacaatatttggggtttgtatagcacctctgtacataagagcttaaagaactgtcatacatcttgtcttatccctattacagcggtcaggtatttttttgtccgttttacagatgaggaaattgaggggtagcaatgtcacccagctagcagtaagtggcaaaaagccgtaaatttcacgaacagtttcttctttgttaatgtggatatagtactgaacaatggttactatggggtattagattctactggtggtctaacagcttccaatattactctacccagctttgacttctaaaaatagatctccaacctaataaattgaatatttcaagttcaataataagataacacaggtagggtccccttcaggactcattgcattcctactcaggaggcctaaatcacttgcaccttttcgaattatatagatcatttacacttgggaaagaaagataataattgcttatcatggatgaagtaccctatttataatacgcaggccgcctgcctgacactttcatattacaccagatttagaaggaccccacagggatgtggtgtcacagtctggttactgcaaattggtaatactataattaagcatcagagttctaaacacatatgtgtgcatgcatctcctcacaaatgtgaaagaaaactgtttcaagaagtaagggagaatgaatttcactttgcaataagcaattttaaaatataagtatattttaggatcgtcctcaaatattctttccaaacaaggcaactccctcacatggaaatcccaaggcagaaatgtgccagaattttattcttttcctttctgtgacgagaaaccaaactaaagcttaaataaacatataattgcaccccccgcaggcttggaaacctcccttacttaaaactccggcccgagactgagacaggggcctagagagtacattgcagcaaacggctccataaataaccagccacacaatagcaagaaaaataaactgttaacaagcgcctaaggcttctacagggccaagtgaaaacagaaagccgtccagtcaccgtccctacacagtgaaataccgtcacaggtaatctcgggcaccatctctctatttttgtattcctctggaaataaaaccgcatttacatgtacattttaggtacatacatggaccaaatgtttatgacagagaagtagacaaagcagaggaaggagaagcagctgcacagagagggacagagggagcgaagagacagagacagcgagctgtttgctacctaattctagctcacaaacaaggaagcgcagccaattctcttcggcgattcagcgttcctctcaccgcagctggacagatctcggcctttctctaatcaccatggcaactgcacctcaccgccaccggaaataagatgcagagcccttctccaaacgatccggctagaaatctaggaagcgctgatccggagcgcacagagacagctgtgttgctcctctatcgcgggggtggtatggccagagtagtgagagaaggtgctctgttacaccagcaggaaataggtgctgtcctgggcctagaactccccgctcgctcctttgctcgcgcacacccggatccttcgtcgcggggaggatgtttccgcccggccgcggtgggcttgacgcaacgtccagcgcgcgcttttcatgccttggcgtttcctttggcggattttctgttttcggaagttgctgggttcgttttattcagcggcagtggtgctttcccgaatctcagaatgccgtaggtatctcctccccaggtattgctgttttgggggccctctgcaagaagagaagatattatgtggcccagtagcctttctcgttttcctattttttcggagtatgaacttgtctcctctgtccacaggcaattcccttcgcttggtaccctcaactctacgtctcctccagcggtactcatacgatagtcctccttcgctttctgtttctacgatgcttttgacagatttcgtaaactgtgggctgtatttaggtgatgtctaacttgaaataacataaataaggttgacacacaggatgggacagagtagatgaaaacacgccttcgtagtttgtcagtcccttgccttcattaatgtggcgcgttcgtgtaaacccgtgggagaactcatggactgagtgggtctagatacctggattccagataagactctttcactgttgggcaagtcacttatcgaccctgagcttcgtttttttttacttacacaaataagtttgtactgcatgatctctaaattcccatctatgaccaataatctgattattgagaatgaccatagtgggaataggcattgtgctagataagattcatctgtttttcatatccttcatccatcctatattgagatgcataaaatagttgctaccctatagaaacttaaaaaagccattaaaggttgggggagtggggtggatatcaaacacctgtaatttctccttggccgtccttgtcctcaggttgatttaggtaccccctctagtgtaacctgttccttagtttatttcaggattaagtaaaatgcaaagtaacacagctggggaaatttttgtatcaaataggaattgacatgaaaggggaaagctgtacagaaatgataacctatatttattgaatcttgaattacaatgtgggtgctgtattaatcaatttatctacgttttttcattgaatcctaaaatactttaggggatgggggctgctattatctttacagataaagaaacccatcacctaatagggtgttcaacacagctgccaataaatgcatgttttactgatgcccttaaaagttatggattattgaggaggttttcctttccccagaattaagcaaagagacttgtttccctactcttgcattagaaaaatcatccagttctcaaataaacaaagctgcaaagataatgtcacacaatcacacacacaaaatccctaagaatacagtgaaaacagaggtgtatttgccaaacaagtggtaatacctcctgaactgtgtgtatctgtgtataggagtggggaaccaaaaaactatgaaaagtggaactttttttttctttttttgaggcagagtctggctctgttgcccaggctggagtgcagtgctgtgatcacagctcactgcagcctctacctcctgggctcccacatgccaccatgcctaatttttttattttgtaaagacagtgtctccctgtgttgcccagcctggtcttgaagtcctgggcttaagtgatccttccacctcagcctcccaatgtgctgggactataggagttagccactgtgtcaggcctaaaagtggacctttttgacaactgtcttcctaacatatgcacacaagatgttatattaggcttttagataagtatattctggtaataaatacacaaccttaaagttgaggttaacatctcacatatatagctaatatatatgtgaaactagcaattactttgctaattttctaagttttagcaaagtgatttaagactaaatcaaca

SEQ ID NO: 608 - DNA, 4001 bp, Homo sapiens
tcagagcctttctcaaacagtgcagttgcaaaacgccccttcctgggcttccggcttgatgttggggcactgacagctgcatgtggctgaggctgacacccctggtctgcccccacctcctgcccagccaagcgggagccggccttgccgcatccctccctcagccctgggctgcctgtgccaggtggggctagacctcctggctcacccccaagactcagcctcaggccagttctatccccttccagaaccactccagaccagcacccagatcgtggaacgaggctgttccctctccaggagccaggggcagggggacagggaacaggaggtggggaaagctaccaaagggaggggcactggcaccttccccatcccctgggcacacacatggctgggagagagtggctgtgcatcttagacccaacagagtgggacccagggatgggccggagggagctgggccctctctccctagcccctccacagagacattaagattgtttttgtggggggacagggggatgagcccacacgcctgggggtgcccatccaccctggtgagggcacacagtgtggatctgatggaataaagggtaggggtgggggtaacagggcaagtcacataggaaggggccccttttgaccagggtgggtgtgggacatggggggtccctgtggggagggaaggggatatacggagtggggaggagagatggggggccttgcgacagaagcaggggagcggtgactgcaagctgctgggtgcacgggggtggggcgggcaggagcgggagggaggccttccaaacccggaggggactcggcccacagggacgactggagtgaggtttacaccagaggggcaacaggggccgaggggtcccttcctaaggagaccacttgtgagtgaaggatttgggtcctggctaatgagtgggtggggatggaaagggcaagtctttgcccccagtttgctggtagacgctaagtaactggagaggaagttggggggatccctgcccagaacccaccttgagggagacctgagatcgcagaggaaacgaaaagaccttaagggagggaatgtggttggcatgtggtgtcgaggggcactggggtgggtatctttggccagcgtgtgttggggtgggggtggggaacgcgagtagctgggatcggggaaggaaggccgctgggtcctcagcctcggtgtgtgcggtgtggggtggtggagaagccccactaacagcgcggagggcccgggacccacacgtgtggtggtgggggtggggctcgcggggcctggcgattatctggaaggaagcctggggtcccccactctgtggacgcgtctatggtgtaccggaggcagcacaaatacgagtctccgccgcgtgccaggggccgggggtcccccagactaacgtgcgcggtgagatgccgggtctcgatctggaaggggccgccgggtccccaaccccggtgcgtctgggttcggggaagcttggctgacggcaggctcccggggcggagcgggatccggggatcggggggttcggggcccgagaccgggtcgcggggcgggcggggggccgggtcgcgcgggcacttactgcttgaacatcttctccatgtccttgatctgcttcctggagaactccttgaactcggtgtaggggttgaagacgcggcggctgggcgactggggctcgccgatgccctggttgaggtctgcgcgccgcagcagcttggcgctcagctcgcagtccgcgctgcccagcgcctcggccgcctcgtcgggtgcccccgccgccgccgccgctgccccgttcagcccgggctgctccggggtctcgccgccgccctcgccctccatctgcagccgccggctcagcttggtggccagctcgtccgtggccatggtggcccgcgcggcactcgccttggccgggcccctgctctcagcgcagcgccgccggccgcgctcttcctcttcctgacactccccgggccaggcaccgcccccgaaggtgggacttgggccctggcggggaccgcgcgccccgcccccgcccccgggcccgcgcggcgtgcgcgtgatcgctcccggccgccgggggtcgagtgtactctgcgcgccccgcccgccgtcgtctgccccccgcgaggctggggagcgcggccgaaagccatgcccctcttcgtgcccactgtagcagctgagcgggaggggtcctgctgggggccggggccgggcgggaaagaagagggctcctcccccgcggcttgggtgaggagcggggcttgccggggggcggggaagcgagggggggcgccgccccacccccttctccggaatccccacgccgtgaagtcataatcctgtgtctgtgacaccctgtcggttgctatggaaacgactcgctgttaaacactggcgttctcaatgagggttgcaggggttccgaggcggacctggggagcagaaacccctgtttagggtgaaccgtggcgggcgccgatggcctcttggaagaggacagactagcagctgcgagggagatgggactgggtttcacccctgaaagggcccctggagacagcgggtgagggacaggggaaggggctggtggtcctctctcccgaggccccgcaccatcacacggatgacttggcacaatagctgctgggccagtgttgtcgcctgtgactgtactttagggaaactgacagggagatcatgatgtcgccattttgatggggtccccagaggagagatgtcctccccaacggctcctggacaggactggggaaagagttcagataagtatctctgtggtctgggctgtcaccttacaactgcacaactctggacctccagcatcagaaccactggggcctaggttaataatacagattttcaggctccaatttggacagacgaaactgatctctggggtgggacccaggaatctacgtgtaaacaagcacccaggggagttctgctcactgaaatttgagaatccctgatttagaaggaggactatgctctgtgcatgttctctgaaatgttgggtcaatcaggacctgtctactgaaactgctccaaccagccaaggtgcagagaaaagatgcgtgcagggccgaaaaccagggtgctctggaggcagggagccctcgagaatgtaaagccagcaagctgttacagagtgatttgcacagaacagacactcagttgatatttgtcaatttgctgtgtttaagaaccttgctgaattaatttaaaaggtatttttaaaagaatgaaattgaggaaaaaaccttcaaggttcagaaaatgtgaagttctcatttacttgtttatgaaattgtttttgagtccaataaagatgctcagctaaaatggtttttttgttttaaatctcagaattaagtttctcttagttttgggcagttcggtccagctacttgcaaaagacaggcttccatatctcctgtatgcagccctgaaggacccaacagaagtaaaatagttatttaaggaatgcaaaggactagggacaggatgcagattaaaatgtttaagatgatgtctgcagatgatgtttgtagatgcttaagtttgttgaattcttagtcttcctcacaaagcagctaattactttcaagactctagtgagcctcaatttactccaatttatgatttccaatggttctgcataaaactgggttgccgttttatgaaattgtttgcatctgcttgacgtgggcgcaaacttcacagtgaggagataatgtgagggttttgccttcttgcaaaacaacttacatatatatgtgaaaaaactggggttggggtttgaattatgtggactgcctgtgcgtagtaagctctctggtcagttacctatttggctttgtgtggacacagctcttaggagggagggtggtggaattcctgctcattacctatagtatcttgcaggagggctgctgaa

SEQ ID NO: 609 - DNA, 4001 bp, Homo sapiens
caaatgtgcacagcccccaggaccccaggagggcacagcgcccactcacccccaacagtgtcctccaaacaaagggagctggcaggtcagaatgaggggcctgccctccagcatgagggaggctggcgcccttctcagcatgctgcccccgcctgaggcctggagatcccagggctgctgcccactggcctgagtcacccatgccagcctcacctaccccgttcattgtagcctcatatttgcccccacgctgggcccagcttggctgcctacggactctactctggactggcgtctctttagtcctgggtatgatagggtgtgcgtgtgtgtgtgtgtgtgtgtgtgtgtgtgtgtgtggccagagggtcacccatcagccccctctcctgggggtacagtctgctgtacttagccttcatttgactcttgctccccatctgggaaaggggggcagcggcgtcagggaaggcggggaggtgggtaaggaagaggctccttcctgaaagagaggaaacctgggagcttgggaacggaaaaggccagggtccccccctccctactcatggcttcctgtcccctcctcctcctccagtcaacacctggcatgggcataaacagggactttgctctctcccatactagggcgagatgcatcaggtcaaggaggcaaagcacagggagcgggtggcggagggctggctgagcctccccagcgtccatgggcaggagggcattgccctctggggttggcagctggctgttctctcccccaccctaacaagccacagacaacagactgcctcaccagacgatgacacggggtcagaggaagctggcacaacatatttctcaaggggagtggggggcaagcttgctagggccgagagtggctaagccggtgagatggctttcgtgataccaagctgcccacttctctccctgctcctccctaccaccctctcctgtattccctcaaatattgttcccataacttcagaaaactcaagggcaagaacaaaggggccgacagagtcttcctcccagtaccatttgcctcacagccctaaacctgcccaggagaaattaactccttcctgcccagaaccttctgtaacccctttaacctcttctgttcattctgaagctttcccatgatctccctctcccagctcttcgcttttactacttgagagccccataaacaggtgattccctcagcctacccatgcacagcatgtgcctcactcatgccaccccaaaagacccctagtgagggactttccaggtttgctttaaatacagggtgaatgcataatgaatgcctacagcccagctctctcctgagaggtccttccagggttaccttgagcattctgtgcactcttgatgtcacaccaggtatctgtcagtgtggtcagatacccaaaggacacacaaggagaggcgtggaggctttcacagtgggggggtggggggcctggaacaagggccctggctgccaggggcgaagtctatgctgaaggcaggaactgcccagcatgagtccctcactttagagtaataggggtgccagagagaaggaagggaagggcagatataagcccatgcaagtagacacaagcatgccccggggtggggtgctcccagatatgacggagaagtgaggggaggaaaatctacagccgccctcctacctcggtcatctactctaggctcagctcagggtttggccgggacagttatcccggtggggtagtgccagccgggagcccaggctgccagcgggagtctcgaggcttacttgggatttgaactgttccagaagacggtgtggcgatcagcagcggccagactgcagcacagacccaagagaggggcccagaggaactccatagcgcggggcctggccaggccgagcggggacgcgggtctcctatgggtctgggttcccactggctttctccgcggcgcagtcagcgctgggctcacagatctggccccttcgcctagcgactccgccttttgggccggcgccgcccgacaccccgccccgccctcgccccgcccggcgcgcggctgcctgggggcttgggggctggggaggtggaggaggggcggggtggggaggcgaggaggctgggggtgcaggaaagagcgaagcgcgctcctctgcccccgcagatctgctcagagatgtgtgttcgctcacttgtgggtctgcgtggagctttgtgagcctgtcccggtggtgggcttgcgtccctgggcgcagtcgcgtgcgggagaagggaagaactcgcaagtgcgagtctgcgaacgcgggggtgcgggacacggctttgctgctccgcgcgcggaccttgcagggtgcgaggttgttgacatgccccgcacctttctgagcctcgcatgcccaggctcgggcgcccgcgttcccacactctcctcctcccccatccccttcccggactctgcgcttgactgcccctccccacacacacgcggctgtttgtttttgttgggtttgtcaatgttgtctttgttctggagattgtgtcatcgcctagatgccgggaataaagtgcaacgctttgtgtgatcgagtgtgtaacgtgtgcggccggggctaaggacgcctctgtccatcacatcagtgcctgcccgcaggagcgacacgcgggaccctgggctcgagagggggccgttcttattttagataagtcaaagagcgctaataacctgagtatatgtaacaacacacgcgtacaccgtgcgaacaggctcttgaatatggactgtgagaatctgggcatgaagggtgacaaactgtaaccacacatgaaatacgtgtgatggcgcgctagcatgaaagcatttgtgagtagtatcacagccgcgtgtgtggaagcgtgtgaaactctttgacagacgtatgctaatgtttgtgaacagcgtgtgaagaggaggggagacgcgtaccggcgtgcagcgggggtggggtggaacggaggggcgtttgtgcgcagtcctcaggctgcacagctggagctggcccagtctgagctggggctcccagtcagtcgggccccagtacccggctcaggccccctcccccgcgctgtgtaaacaaacccactggaatttgcctctcggggctcttctccccgcctggatctgctgccgtctggagagggcttggcgggcgggtgtcagctcctggggtggagagggcgggcaggtgtttgattaggctcacgagtgagcctggagtgggagagccgaatgctgtgtgtctgcgtgcgtttggtggtttacgtgtgtggttgtgtggctgtgtgcgcgccaggttggtgttgtgagtgtgtgtgcgcatcctcagccggcccttccctgcggctgcgcatcgcgggaagccacggacccggggcccctggccagctccggcccagcttctccagttcccaggccgtttcatcctcctattttacggccaggcctggctacagcccctgtaattacgcggggcccggacgccgcagcaagtctggcgctgaccccgccggggaggagcctggagctggggagggcccagccggctccccactgcaccaccacgtgcgctgaggccgctggaggccgtattcgctgcgtttacaataaacatagagtaccaacggcctctaaccccgtggccgggtcagggccgggttttgcgcacggccagcgccacccccctctccctcgggcacctgccccaggcgacgtgcccagccaagcgtttgtccgaggtgcggcccgctcctctcgcccaggacgaagtccacccgccgactgctcccagggcggcacctcacgcgccttttgctcacctaggaggacacctgggtgtcgacctcccacgtggccccggcgagagtactgcctcccagttcgggcattccatagagtcaaagctccaggaggacatgggtttttgttttgttcattatcttactgcc

SEQ ID NO: 610 - DNA, 4001 bp, Homo sapiens
gcccgggaagcgaggcgggggcggcggcagcctcctggcccggtgtgcgccccctcctacctctgccggcccaggcccgcacggagtagagaggacagaaaggaggctcccggaacccgggctcccccacccgctccctgagctttcacctgcgcccaggtgtatgcgggggaggggaacctgatcaacacctccccccaccaaacctattcccgcatcctccccggctctggcttcccctaagaacgctgaggtgctccaagggtggcggggaacccggggcccctcacctgcgagctctccgttccccgccagactctagcggggtggggggcggacgtgtgagtctgggggagggggctgagctagatagagctggaaagtcagcccccagcgccccccggagttcttggagtcccgctccgggggggaggggccacgtccccacccccgaggtttccatgggaagcgagaggggggcgtcgttggctcatccccacccccagtctgacactccgggcgcgaggagggagagagggggaggcgcggagccccaaacaacaaagagcggagcggcgagcggcagcccctcctccgagaggttgggggtcgcggccgcccggccctcccggtcccctcccctggggtctggccatttgctccctggtcggtcggtccctggggtgggcagccagaggcagtgctgccgccaccgcccgggcaggtgtgacagtgacccccgcgtccccagggatctccccctactaacacacagacacacactgatgtggccagggagatacacacggcggcttggcggggaggagaagacaagggcagcaaggactgagcagaatgaggacccggccccgcagccagcacccggccaccgcgccacacaccccgggaaaccacacggccgccctgacacccgcccagaccgcggcggcgccaacagccaccccagcccagacgcagctggccgcgcggacagcgaccgcagccccttccccgacccgcagcccgctcccacccccagacgatcgccgacgcagacacacaaatcacacactcagacacacacgcacactgacagccgcgcacgcccgctcacacttggagccattcgccgtccccagcccgggcgtgtgtgtgcgtgtgtgacacaccgacatctctctgccgccttccgtctcgccggtaccccacgttcccatcctaaccaagcagcattcccagggccccccaactcagcgacccagccctagctcaccctagccgggcttatccacacaaccaagacaacccattcgccttccttctagggaggtgctcggtcggactccctgcctcagctctggaccccacttttaaaagcaggagtcctagacagaacccctggaagccctcatggccaaaaacaggtcatccctgggccccaaaatgcagcggcctatccccagcacagcgctacccccaaaccccagcccaactggtgggactatgggacaggggcatgctattccagcggcgggtgcggagagaagccaagatggggtggggggcccctccagcagcctcctccacacggcccgagcgctccttactatagcccaacagcctcttcagacacccccgagtttcctagacgcccacagagtgcgtccccctctccgtcccctcccagcccccagctctggtctcccaggactcccaccccgggatcccccaggacttctcgggcccaccggctccccctctcactgagacgggacgcgcggactcccagggtccccgactcactgctggttggagctgttccagtacaccgcatgccggtttcccagcgcccctccgggcccttgggccagcagcggcagcagcggcacgggcacgagcagcagcagcagcagcagcggagccgccgccatccccggagccgccgccgccgccgccccccgactgagccccgcgctcccggcttctccgcttcccagctccctgctgccgccgccgtcggcccccagccttaggccacgcccccagcccttccctccgccctcctgggcgcgcccccgaagccccgcccctggcgcgcccccgacaggccccgtcccgctccggtcgggagcgcgcgacgcgtgggaggtggggaccgtactgccccctcgggaaagaccagcgcgtgcctcgtctctccttcttgagttcagtttgctacaactggtcctgggtcttttgctccccaggctgaatttcccagaaggatttgggaacccaagataaggatctcgatctcagggaagcccaatcatctctgggaatgaggggaaggagaagacttgagaagaagttggggatccaggacctcttagtaagtagggctggaccccttcccttctgaaaactgtggccctctgctgcgtccatgcccccttttcccgtgtgcatgaggactcaggtgggcacagaagggtggtggagaagtcctcagctggcaccaaggctttgacagctggtgacctgaagcccccagctgagcatgaggcttgtttatcttggaggcagagtaaaagagctcagcccctgagaatgtcaatactgggagctgtaagagtcttcagtggtccagaacccaaggcgcaggagggggtcaaggagagagtcagctggggcaaagcagggttccctggacacctacaaaggattcctcactggcacttaggcagggcccctcccggggcagccagggttgtccccagggattctcactcctactctcagagacgctgatcctgagtcagagggcagagcaccttgtgttccagctctcaccacagtcattgtcctcacagtgacacccaagcacacacatcacacacacacattcaggaaaaaaggcacagtcacccaaaggcagagaacatagagacacaggtgcctgacacagacatatggacacacaggtacaccttccagacacacataggaaagggtactatcagactgctagagatcaggcacagagacacccaagcacacacctatatccatccacacacaacacacacacaaacccacatgcatcctgacacacacagttccttgctctcctcttctctctttctaggaagtagaagttcaggaaaagggttcagaaaccagacctagggctatctgtcccttatctcttctcttttggagaggcccagaccaggcggaaccaggcctgactgggttctcagaacgcaagccaaccacctgtgtccagggagacaggcatgctgctactttgcttctatccttcaggagagggaacatgcaggcacctccctatctgcttatctgtggcaggacagagtcttgaccacaagtcagcctcaggtgctaggctgggggcaggggcggtgctatccagaataggttcagtgtctgactgctgccaggtgagagtagtctctgttttctctgggctcctctccaccccaggagatctcttcttccttctcaggagccagcaaataaattaggccccttgggatgggagtgggggactctgcaaacagctctccctccctgcaggctcctcatccccagagagatttgtttcacccaaatgatgctaacctgcttactccaggtgccacaaatcccagccccctccactcaaatcatattccctgctccacaagggcagcttctctctgtaggggcccacagttggcagagacgctgctcatattgatagtgaacaggaacttgctggtttggtctaggactttaaattccattttagaaaagatatatccctgtttatcgaatctaggttctgcttaagaatttgggcctttttctatagggcctgggtactctttagaatctggcacccccacacccaccctccaataataactgagcccttctcttagaatccggagccctctctacaggatttaagcagctctctctatggagtcgaagcctctggttttgaagttgag

SEQ ID NO: 611 - DNA, 4001 bp, Homo sapiens
ataaataaataaataaataaataaataaataaataaaggccatgagtggtggtgcactcctgtagtcccagctacttgggaggctgaggcgggaggatccttagagtccgcaagttcctgtagtgagctattatgccaccgcactacagcctgggtgacagagcaagaccctgtctctaaattctaaaaattaaaaaaaaaaaaaaaaaaagaatgagggagtgggtgctaggtgcctcccttttttggccaggaggagcaagtgccaggcatggggggagtccacatactacccagtcttcagtcttctcaggactcccttccccacctcttgggagctgcctggggaagccagcacaggtgggaagggctggaaggggctgctccccacagtactgaatgctgcatgaaccaccccccataccacaaacacagcgaagcatgacttaggaaaagcctccagtgggtggtccaaggacgacctgtatcagttctgattagaaatgaagattcctgggctcagccagcccagacttactagaacgcaagctgagcaaggacagggccttggtaagttttgttctactgcatcccccgtgcctggaaaagtgcccagcacaggacagtgttcaataaatatttgtggattgaatgaatgagccagaaaccttaagattggggggtgagaaacctgaatttttaacaggtcctccaagtgattcagaagctttggtctgtgacagagatagagaattcagagtccaaggacaacaaaagctcttatcacttgttattggtattgtaatgacctgtctttatgcaggctctcctgcctgcgcctgttctccagagagtctgtggaatcccagagggcagggtcttgatcttctcatctatatagttaatcccctgcaacctagcacagggccgggcacacacagtatgtgtttaataaataaatgttagtgagtgaagaaatgaatagtcacagattgtctcaagtagaaaatcagaaagaaaaacagataggaaataggagaggcagggagacttggggagggggatggaaacagtaaaatatactaaggttcaaaggcaggcagctcaggagagagaaagaaataatagtttatatctgtacagcctgagcctctttcacatacatgacctcacttaccctgccagacttcccagggtactaggtattattagcccattatacaggtgagataaatgaggttaggaaggtcacgagacttgcccagaggtgattcggctagaagggcagggctgacactggaaagaaacagaaggaccaataaagacagagatgaaagcagagatagcaaatgagatcaggagacagagtgagagccagaggtgagacccagcgggcaggagagtaacccacgctctttcataagagtaaagccccctccctcgctctcaagttcgtcagccacagctccagcctgcgggaggctggggatcgccaggagagcagcgaggggggcggagcccggagtgcgggcaaaggcccccccagctccatgctccaagaccccctagacaacccttggggctggggtcttctgcctgccccccaacacatgcgggctgtggggagacccagggcgcgcctcgcccctcgcccctcccccctcccccgccggctcaaacaaaggagccccggcgcgcggccaggctcaggcggcgccgcgcaaagagcgggtggcgggcgcgcgcaaagcccgggagcgcgcagacttggctgtgcgctcgcccggttcggcccggctacctggggttactggagttccagtagactacgtggcggaggctggagcccccgcgcagaggggagccgaggaacgcggcccagaggacagtccgcagcaggggcagcagccgcatcgcccccgaggtccggtttggtctggcctggcaggtcccggcccgcttcacagtcgaggagagaaaggtacaaagtgaagagggaagttgcggaaaggggagtggggtacggagattcactgaccccgcccctgaataactttccgccaatgggagcgcgtctcctcctctccacccagcgccaactccagttaaccctctgtgcaccgcagcgcgcgccaggttcgccaaagcttccactgaggctgcaccgcactgcgagggggcgggaaggaaggacgtattccaacagcagtatttttagggaggtcatctctttcgtgtctgctttagtgcagggtagactgccttattagaagtttggaagattttaaataagggtacataacctttgcccagataggggaaagtgaggcgcgggcgaggatccatgaagcctgtccaaccaccttcatgcactgccccgttttctttgcacatctagggacagtgcaagcggaagggacaacacagctctgggaccaccttccctaaagagccttaggtggcgcgctagatgctcactttaggattggcgtctgtcccttgccgctccacaccttcgttccgggctgggggcccacgcggccccagtccctaagacgaagtaatgaggtggttgcggcctgtacaaagcacctttgttcccgatccctcaggtggcggcggcggagggggaggaggcaggtgcgcggccttgggatcgtgggagcagccgccgccccgctccgccctggctcctgggctctgggagcatcagccagatccacttttcccagccaatggtcagagtggggacggcaggtccaacagcttgacagattgcgccgaaagccaccccagtctgggcagagggaagctgcgagcatcccggggacacacgccgaccctttctggtactcccgccccacacagcccgccctcgtctgaggcggcagcgtcttctggcggccaaacctggaaccgcagcaggagcgacccgggttctagaagcagacaaactctggggaacgctcccaagatgtcacgtttattgcaactgagcagagacaggctgtgcggaccttcctcaatcccgtccaacccccagcccctccccaagcccccgctgcaactacgccggcaggtccgcagagtgttgcttgacagcgcgtggcggtgcccggagtcttaagacaccgccagtctctggcgccttcagtcatggtaggggactccagagggcacgcccgcctcttgaagccctaagtccggcttggaggcagcggaacctccggagaggtcagaggtagagcgaggacactgtcggaggcggtggcgctggtctggattgcgggaagccaagaaaaaagagtcagaggcccctttcccccaggtcactcgccccgcccacccatgcccagggctcctcctacctggagggtaccactaggggcgggattccagcccctgggccgggcaggtcacccgatgggcaccggccctgggggtcggcaggcagtggcttccttgggggtgggggcttggctggcccctgagactgagggagagaaggcaggaggccggcttaggtgggggggtgtcatgttgcccacccccaacgcactggtgctggggaacaccagcttgggggcagcaccagcggtcacccttgtctgcaaacaaacctgtcaccattaaaggcaccaccgggatatgtgccctcatgcactgagggggcatctcgccacggccaccaccgtcatggctaccagcaccacagccctaggtggggggagaggccgtgcccttctctccccccaccgttaccttcgggcttctcaccaccgggtcagcgggcagagggcgggtagggggattgggtcggtcagccagctcagcctgaacagagagaggggcagtggctgtgagagcataaccaggggctgtggacatgcacagagattccccagaggggttcaagtcaacatgcaaagtcagccagggggcaggagagaatgagggcatgcgcagagggcttggaggcatgccagctgatgtctcagggg

SEQ ID NO: 612 - DNA, 4001 bp, Homo sapiens
gaagaaattttgggctaccaagttaaatgtaatcaatgctcattccaatatccaatttaaactgatgggattattcctgaaaagtgaattttgatggtaaatgagcagtactacattaacgactctcacatttatttttaatagaatctgtgctgcgcggatgaatacaattctttgttttacagagcataaaaaccttaccagaaataagccaaagatgtttctttctgctgctatttgtcttaagaattaaaaggtctgtgatttcgagtttatcaatctttatcgaacactatgtggaaagtggggtgctaggcttgtgtatcacttgagtatactgtaacttcagtccttgaaatatagccttccaaacttaaaaagttgtaatatgtatttcaaaagcaggatataaggaattattgtaaaccatattgtagaagtttaaaaagaggcttgaatccaaaaatataaaacctcttcatcaaatatacagaatttaaaactgttataaaatcctgctgcatgcgtaaatggcattctggggatccaatcaagtgaaagaggatgataattccaattagcttgtcctttgggaaactgagataaatatactcacatcttcaaatttcaaaccgaactaaaaatccaagtttctgtaaagaatttagacctagacctgtcttatgtgtatcctactttcccagagctttattaaatacagtaaaatgtcattgttgcagacattactaattaggctgttcaacaaatgcattgagagtccttgacaaacaaatgaattagtcatactacactcagagacacatagtccaatgcaggaggcaggtatgtaaacaaggacaatccagagttcagagtttcctaaaagagggatgaataggatggaatgggaacacagaaaaaggaattgctagctctgccatttgcactaataaaatccaagcaaattaattcagaaattcttaaaatataaaggagctatctcatggcttacgaaaataagcatttaaaacatttttcatacacataaattatgtaaaatgtaatttaaatacaagtagagtctaatacttcttaggcttccttttgctatagtaattatacatgaggcttaattattcacaagagcaggaactttactaggaggactcattccacaaacacttgattcttccaacaatttcttttaaatttgctatttcagtctgtggtgtgtccacaaattatttacatctctatatgctctactcatatattttcattgaagtttacttaaaagaatagatgtccatatcaaaacctttattagctttcttgttccaattaagtatacaaaatcacaaattgaacatgtatatcctaaatatacttaatccatcaaatagaacacttgcaacactttaatgaatacaacaggaaaatataaaatactgatttcaaatagttccaaagatccttgatttcaggattttcacctattcaggcttaataatctgaactaattccaaattagtgagttttcaccacaccatatgctggtgaacaatcttgtcaccaacacgattctggaactccagtagcattgtcgcagccgccacttactcagatgttatagagagacttcaaaatgtcatgcaagtatttatttatttatttacttatttaaactttaacggaaggcaacacaaaggaatttatcttataaacacatgtggtgcttgctgttatgtgcccaatctgtgttctaagcattttaaaaatattaaccaatttaatcatcatacaatgctatgaagtgggtactattattctaccaattttacagaaggtgaaacaaatagagagtgaggcaatgaatgtccctcccaatccttaatattgtatgattaggagcactaggtgggttaactaatactctggggcaaacaaagccttgtgtctctcaaagccattaattattacaaatgtttttctgcccctaacctaatcaaaagcaactgttctagaaactgaagaatgaattaaagtaacagtgctttcctctccatatcataccaacttagacaaagctaattgaccacctatttggcttccctttgctcttctggcagtatttagttaagctataaagaagtagccactgtgaactgacaagaactaaaagaggcaaagcttatgttaactacaagaacagaattgaaggaggaaatgaatttagaaacgactgtgttgactcttgaggaaagcccactgaacaacaatctgccttccaaggagtagccctatttctcctttaaaaatgtttttaaaaacacaacagagtatcttttctgctcaagaaatcgaacatctgattgttaactaatgacctcttgtttccccatctgtgacaatcttgttttaataggttacagagaacagaaaaatcacaagtatagcataggcattccaccaagataaacaggaagacaatctttgagttctgggaaaagcaactcaaaaatctgagccattttctaactatagtattaggacacacacaagtaggtgtcattggaaaacagcacctgcttgtctctgtactgggggttctgccagatgcacacgtgagctatgtgcttctccttgtacatggagacagctgtactttccaccaaggttgttcccttatgaaaacaaaataattgaatagatttgctatatattggggcgatttatcagtcatcaaactttatcagtttatgattgaaaaattaccaccaatcctgttaaaattgatcatctcagaaatataacaaaaatttataatcatctctcattatagcgaattttttaaataaatgctcaaaaacctgggatactaaataacgtgtcgatctaattttttttcctaacaaacattaccttaatgttgaaccaacttttgggatagtcacaatcagtgacttataccaacccaggttggagaaagctaaataatttttcctgtaacattttcttgtgggaaaagttaaacatatgcaaaaagagagataatagtataatcaacctcagccctaatgagttcaacagttatcagcttcaacaattatcaacatttgttgatagacaattcttccctaccctcctccctactatgtcccccactttttttgctaaagtattataaagcatatcccaacttcaatatgcacatctgataagaactttcaaaaatcatatccaccatgccattatcacacaaaattaagaaaaatctcaatactatccatcatcctccaagtattaaatttttttcgattatatcaaagattctgtttacagttgctttattcaattcaagatctaaacaagtccatacattgcacttagttgtttcttcctccaccccgccccacctaataccatcacaaattgtcatatttcttaagtcccttttactcaattttaccagcatctcacccttcatactatagatttactgtagaaactaggccatttgtactacggaatgtcccatattctagatttagctgattacttccttgtgatattactcctatttctgcaaataggtagatttaggatttttattagattgaggttctatattttaggtaagcatactttgtggtagttgccgtgtatttcctattacatcacatcatgaggcacatatgtctgatacttgcattttaatgacgaaatattgctcatgggttgaggtggtgtcagcctgattcctacattacgtttttcatcaaacatcacctgattattttagcatccattaattgtgactcaatccagtatttcattagacgttgcaaaataatgaatttctaattctaacattcctcctaaatttattagctggaattctaccataacatttttcattaactctttggttatcctgaaatatagtttgtagatgaaagatagggtccacgtttcttttcatttatcaattttcaaaataa

SEQ ID NO: 613 - DNA, 4001 bp, Homo sapiens
atagtttcacttcacagagttgttgttaagattaaatttgttattctacgtaaagcagacaaaataatgtccatcttttttttttttttttttttgagacggagtctcgctctgtcgcccaggccggactgcggactgcagtggcgcaatctcggctcactgcaagctccgcttcccgggttcacgccattctcctgcctcagcctcccgagtagctgggactacaggcacccgccaccgcgcccggctaattttttgtatttttagtagagacggggtttcaccttgttagccaggatggtctcgatctcctgacctcatgatccacccgcctcggcctcccaaagtgctgggattacaggcgtgagccaccgcgcccggccaataatgtccatcttatgagaagcactatatttgtatttgctttactagacagagactagattatggaaaaccttcgtactaattgagccatgctgcttcataattctggtctctgcactgctactgttgcttcctagtctgcctttctcttgtgtctagtaatcacctattaaactttgaagacagctcaagaatcctcttgcctacaaagccattcctaaccgttcccacccctccagaagtgactccttttcccgaagtgcttccattctgccatgtgcagattctcttagcctttacgggtttcattgcacgtatgtgtttaaatgtctacttaagtgtaacattaatgtctcttaaatgtctacataagagtgtaagagtgactttcttggactgtgtgtgcatcatcactgtattcccagtcagatgccagaaatcaaagtggaatgaggacctgtgaacttcacaactgtataagagtcaaactcaaacatgtgcataagggcattagaacccaggtcactaggaactgaggttccagctctcaaggaggccctgggtgaagaaaggcaacctaggaagcatgaatagtaatcatgaacataactaatcatgctaccaggcagactgtcaaatgctcatgtcactgccacgactatggctgacgggaatcatggcaacgagtctcgctgcctcccaagctttggagagggtgttcaccgcatctcagacttgcctgcatcatagcactcatgccttttccagttgtaaatagataagaaaactgtatcagaattggtctgtcattccacgtgtgctgcctgaaggcagagacctcactgctcctccctatatttcactgccctgcatccaaacaactaaaggcaggctgaacaaatgaatgaagggctgaggctgaaagagtgcaggcacagtgctaaaggcgtctggtaccggtctggtgctcgctcactcgctgtgactttaagcagaaccctccccgaaacttcgtttctttcttttcttttctttttttttttttttttgaaacggagagtctcactatgttgcccaggctggagtgcagtggcgcgaattaggctcactgcaacctccacctcctgggttcaaacgattctcctgcctcagactctcgagtagctgagattagaaacttagttcctccatctgttgcataaggtggttggctcggattctcatccccaacctcccttctacttcggacacagctacaccgggtcgagcagggagtcgagctgacaacttcggggctcagcaccctctcctaccccttcgggtccacctcggcccagttcgacatgcccgcctccctcagatgagtggccccaccgcactgctcacccgggtcagccagcttgtgtgcggcctggcagggcagaagtcacagctataactcagctcccggcacgccgcaaccgctcccagcgatctccacgccgcctctgactgacagcccaatggcgcaggcgcgcgatggccgagaaactcgatggaacgcgcagagcagacccatggagaagagaagaccgccgagcgatggatgacggaggggaagcacactcagcggagaggagggaaggcgggccggagggggcggggccaccgaggagcattcgacacgtgtgtccctctgtccattaacacattaccaacgccttttgagtattcctcccagtgcagggtgccgggaacccagacggaacaactcagcctctttcctcagggagtaagtctaagacctggcttcgagtacattcggtgaaagaaagctcattgggagccgcaattttggctagctagtgaaaaaaatcaccgaatgcccctgcaggggttgccaggacttcctatttgtttttgttgttgttgttgttgttgtttgttttttgttttttttgagacggagtctcgctctgcgtcgcccaggctggagtgcagtggcgcgatctcggctcactgcaagctcggcctcccgggttcacgccattttcctccctcagcctcccgaggagctgggactacaggcgcctgccaccatgcccggctaatttttttgtatttttagtagagacgggggtttcactgtgttagccaggatggtctcgatctcctgacctcgtgatccgcccgcctcggcctcccaaagtgctgggattacaggcgtgagccaccgcgcccggcccgggacttcctatttgtaacagggccactcacgttaactttagccatcaaaactgggggcggctgggcatggtggctcatgcctgtaatctccgcaatttgggaagccgaggtgggaggattgcttgaaaccgggcgttcaagaccagcctgtgcgagagagcctccagtctctacaaaagtaaaaattagctgggcatggtagtgtgtgcctgtagtcccagctgctcaggaggctgaaacgggaggatcgcttgagcccaggagttcgaggctgcagtgagctatgatcgggccactgcactcctcctgcctagacgacagagtgagaccctgttttttttttttaatttagtttttatttcataatcataaacttaactcagcaatccagttaggcatggaaaggaacaaggaaaacatggaacccaaagggaactgcagcaagagcacaaagataagatactgcgagcaggccgggcgtggtggctcacgtctgtaatcctagcactttgggaggccgaggcaggcagattgcctgagctcaggagttcaagatcagcctgggcaacatggtgaaaccccgtctctactaaaatacaaaaaaaaaaaaaaaaagaaagaaagaaagaaagaaaaaattagccaggcatggcggcgtgcgcctgtagtcccagctactcgggaggctgaggaaagagaattgcttgaacccgggaagtggaggttgcagtgagccgagatcgtgccactgcacttcagcctgggagagggcgacagggtgagacagcgtctcaaaaaaaaaaaaaaaaaaaaatactgcaagcaaatggggtgaaggggtgctcttctgagctacaaaaggaatggtctggtggttaagataaaacaaaagccaaacttgttagagttgtccacagtcagcaatggtgatcttcttgctggtcttgccattctcggacccaaagtgccccatggcctccacaatattcatgccttctttcaccttgccaaagaccacaggattgccatccagccactcagtcttggcagtgcagatgaaacactgggaaccatttgtgttgggtccagcatttgccatggacaagatgccaggatgtgtatgctttaggacgaagctctcgtcatcaaatttctccccgcaggtgtacttgccaccagtgccattatggcatgtgaagtcaccaccctgacacataaaccctggaataattctgtgaaagcaggaacctttataaccaaatcctttctctacattgctcagagcacgaaagttttctgctgcctttggaaccttgtctgcaaacggctcgaaggacacgcggcccaagggcttgccgtcgacagcgatgtcgaacacggtggggttaacc

SEQ ID NO: 614 - DNA, 4001 bp, Homo sapiens
ggctcacgtctgtaattccagcactttgggaggccgaggcgggcggatcatgaggtcaggagatcaagatcatcctggctaacatggtgaaatcccgtctctactaaaaaatgcaaaaaattagcaaggtgtggtggcgggtgcctgtagttcctgctactcgggaggctgaggcaagagaatggtgtgaacccaggaggcggagcttgcagtgagctgagattgcgccactgcactccagcctgggcaacagagcaagactctgtctcatgaagacatgccctgaaattccatccttttcaagacctctgctctattcctagtcaacccactgtaaacttctcagccactgttccttcatctcagaacttccctttgcaaccacccttacttactatgtcagccctttttttaatccctcctatagtggttttgcataagagaaaaccttttgcatcctagaattgaaagacccaattctaggaacaccaggtccataaagatccttggggatggtattgggagatttcgtgcttgcttattttatgggagacaatggaagaaacagagagaagcagatgttaggcaagaactacctaatggtaatggccatcttcgtcctgttgtcatacctgttggatacagatttttctccagttcaaagaggatggggttaccaccactcacgtacacagtcactgcatcccctttgtgagcatacaacttcacaatgttgagctcctcctttccaggtactaactcagagacttgatcagttccaagggtggggaaagcagttgtcacatcagctcgaagctttctcctgtggaaagcacaccagcactgtgaatgctgcctggacagacttttaataaatatcaagaacgaactcaaaagtgctcactataaaatcacaagggccaaagaaagattgcctggtttatgatgtcctagtctcacacacactcttctgaaacatcctaaactctttttcatccattgtcatctattttcactcattcctggggtatgccttcccattttatgggtgggaaaacaggcccagtgaacaatccaagttagcctgacacaggaaacagccctgccttcctgacttcatgcctagcccttgggcccactcctttctcatacatgcttcgcaaatatgccagtttatgattaaataactatgccatgagacctatagacaactataaagcactggttacaaaattccaaacacaatctccatttgtgaccctgtctgaacagatacagttcttcttaccacatgtgccttattccctcccacctcagtttccagctgtctctcctgccagaattaatcactagtcatttttttctcttatacttttaattcttggtatcccatccgatctctcccaaggggcattaagctctttggagggcaagaattctgtattccttcacttctgcattctccacaacaccttaaatagtctgcagtcagtaaactctgacttaactacgttttcttttaaactcactagactatccaaaagagagccaggtccccctccatcctcacctcaaaatgtgtctaacccacccttgcctcctggggtcccttccctggcatacccctcggcctccacccgaggatgtcggccaagaatagcgagggctatgggccagcggggcccaagaggtgtctggttgttccgtggcagagcaggcccctttcctccctcacctgtccgaccccttgatggccgtgttggacttgacccgaaaggccttggcaaacatgtctgctggggtggcctggggaagagagcacagaagccagggaatgtcaagaaagcgagggcgcagcagctgccaggccctcagccgtgggggcagccatgctggggcccggccgcgaaaagggcccggctggaaaccagggccgcgcagcttcgtggccgttgccgctggggaggccgcggccgcccccagtggcggtacctggaactaaagcagggcagggaggggcagggcccagggaacgcccctcccccccaccttcccatcccctcgcgggcctggctctgcgcctgcgcgagcggctcgggttccccgtccgtagcgactcggccacgccaatagctgttctgtttatttccttccaccccatcaaccttaggaactgctttgagtagaagctctctgcaagctcccattccattcggttcggttcaattccgcaaaaataattgaactgataaacagttcaggcttcggccgggcgcggtggcccaagcctgttatcccagactttgggaggccgaggcgggcggaccgcttaagcccagaagttcgagaccagcctgggcaacatggcgaaaccccatctccataaaaaatacaaaataaaaaaaaaaaaaaaaaaaaaaaaaaagaaagaaagaaagaaagaaaaagaattgggaggccgaggtgggcggatcacctgaggtcgggagttcgagaccagcctgatcaacatggagaaaccctgtctgtactaaaaatacaaaattagccgggcatggtggagcatgcctgtaatcccagctactcgggaggctgaggcaggagaattgcttgaacccgggaggcagaggttgtggtgagccgagattgcacaattgcactccagcctgggcaacaagagtgaaagtccgtctcaaaaaaaaaaaaaaaagaaaagaaaaaagaaaaattcagccgggtgtggtggcgcatgcctggggaggctaaggcggtaggatcgcttgagcccaggaggcagaggttgccgtgagccgagattgtgccactgcaccccaccttggacaacagagtaagactccgtatcaaaaaaatcaaacaaacaaacaaaaaaacctcgagggctttttgaatatttttctttattttattttattttgtttacttggagacagggtctcgctgtgtcacccaggctggagtgcagtggcgcaatctcagctcaatgcagcctccacctcccgggctcaagcgatccatccgcttcagcctcccgagtagctgggactacaggcgggcaccaccacaccaggctaatttttgtattttttgtagagacaggatctcaccttgttgcccaggctggtctcaaactcctgaggtcaagagatctgtccgcctcggcctcccaaagtggtgggattacaggacaggtgtgaaccaccaagtcgggcctaaatgtttttcttaaaggcattctatgattaaggtctattcattgtactataagctagaagcctcagctagaattttctgtaagatttttctcatcccggatttttagtttacttgggtggtaataacagtaatagagaattcactgttgtcccagatttgtcccaaagtcacacaggcagggaagagaaattaggttttcctcaaagggacagctgtgttccctggagacaaggatttaaacacccggaatcctggctcttcgtaaattaagtcttgcatattaaaattacattaagcaatttaagtaataaaagtaaattatgttttgcatattaaaacttccaagtgtccattcaccaataaaaaatcccaattgattcagtgacgcagttgcacaaaggagaattccacactggctttctaaacattaggccttctacaatgtttgcccaccacctatagtggcctagggaccagccccaactcctcctaaacctgtgacccactaggcctttattctgaagtatcccagccaccaggccaatgtcaaaggagcccagaggaggacagtgcctacaacagacccctgtacccacccttcacctcccacttagccactcttcggatgtgcaatacatttggggtcttttgcagcacagctgctgaggaagcctctttcttagggaacagaggaaagctattcagagaatactaaacattttaagctaggggaacttttgtataccagatgtccttggataagaaaa

SEQ ID NO: 615 - DNA, 4001 bp, Homo sapiens
cccttgtcctcttgggatgccaagtgaatcatctccctgttcagccccaaagagcctttctacccctcttacctccttatccagaactggaatttgtcctgaatgtttcctcagtcagtgaagagaccagggagtaggaggtatcgttctctaggccctcaacagcacccccaactcccaactcccaactcagcctctccatcgctgacagaccctagcaacacggactcagacccaaaataaggatacagtcagcgtccacacaccacacagctccggtatggcccatgtaggtgcccagcctctcaccattcacagagtaccatacattgacgatctggaaaagtcaaaccacaggatagtacacatcccagtaagagcaatggcttcctattttgccccaggaaccctcagcagcctgtagcaaggctgattctgccctcttctgtttatttcttgggaaacagcagggagctggtaaaaagaccaactcctggattctcctcccttcctgaagggaagcaacagaggagtcaggcggcttgtaaaggcatcctcatttgttagctccagctctcctgggactcccaacggctccaaagaataaaaggccaagttgagctccagtccagaaaaacagtatctctgatgtcttatccaagtgggagcagctggtagtaaggaagtctgggttctggtgcctgctctgccactgtctcactatatgatctcaaatacagtgcttctctcctctgaacttcagttttctcatcttgaaaatggccaggccgggtgtggtgactcatgcctgtaatcctagcactttgggaggccgaggcaggcggatcacctgaggtcaggagttcaagacaagcctgtccaacatggtgaaaccccatctctactaaagatacaaaaaattagctgggcatggtggcacgagcctgtagtcccagctactagggaggttgaggcaggagaatcgcttgaacctgggaggcagaggttgcagtgagtcgagatcgcgccactgcactccagcctaggcgacagagcgagactccgtctcaagaaaaaataaaataaaatggccaggtgcctcaaaaggcagtatcatgagggattgtttggcattgagtagcaggatgggattgacttaaaatgagactagagacaccctcattaagttccctgtgtctgaataacacagcctgcacctatcctggtagaaagattagattatccctaaaggtcgcatcccgttctctgggcaagctgaccctcatctttatcccctttccacagtggtctcttgcttttcttggagtgcagtggcacgatctcagctcaccgcgctcaagcgatcctctcgtttcagactccgaagtagctgagaccacaggcgcgaggccaccatgtcaggctaatttttttgtgtgtagagatgggtcttactacgttgctcaggctggtctccaactcctgggctcaagcgaccctcccacctcggcctctcaaagtgctgggattacaggcgtgagccaccgcactcggccaatagagttcttccccacctttcccggtagaatactttcgccaacctacccccggcatggcctctccctacttctcacaatgggctgctctttggttccccgctaacggcaaaactggcgtgtccacccatcgtcctggcagaaggatcccgcccctcccggaccccctccagccaacactcacagggtccttggccacagtaaagaggaggtctccttcgcggttatacttaatctgcgtaatggaccgctcatggccctgcagtaggatcggcttctgtggggacaagacagtaacgtcagtgctcggaattgggccccagcctcagcccaggacccccactgcaatacccctaactctgaaactcaccatcccggctgtgacgcgaggaaggccgcaacgtgagtaagaccggaaaaggtttcgaggtcacttccggattatgggtctccgccccttcgttcccggaagtagaagacagcggcgttgccatggcggcgtctctgggtaggtagccggccccgcccttccatggatttcccgaccctcgcctcgaattcatttcctgctccacatccaccctctaaccccgacccctgctacaaccccagaggccggactcctggattcatctccctagcttccctgggcctgccttagccgccagtcgcagccgaggcgaagagagcgaaggagggaagtgggggcggctagctggggctagaaggccaggagagggcggggtgggcggccgtttggggtgggggtcagggtgactcactcgtctgcattcagggcaggtgttggctctggtgctggtggccgctctgtggggtggcacgcagccgctgctgaagcgggcctccgccggcctgcagcgggttcatgagccgacctgggcccagcagttgctacaggagatgaagaccctcttcttgaatactgaggtgcgtctctgtgaaaggcccctctctcggtggagttgccgccaagaatttggtctttggagtcaaacaggtctgggtcagccccaccacttactcactagaaattctcggaaaagtcagttgtccttgagcctcagtttcatcatctgtaaatggcgattataataataaccatctgataggtcagttgcaggaattaggtgagatacgtagagcacttagcattaggcctagaacatagtaagtgctcaatctatggctgccattattcacattttattgtgattccttcagttacataaggcaacatttgtgagcctttccagagggagggcttggggctcaaattggccctgcaggggaggagttcagaggaggaaggctggagctggaggacttggggaaggcttcctggaggggctgacattggcttcaaggccttgcaggatgggaactagcagaggtgagggagagggtagtttgagcaaaggcacagacttcagtctgtttccctctttgccctggaaggatcctccttagagggattagtgttctctgggtccttataaccctgcctccctccaaggaaagacattcgctaggagctcaaagaaggcagtgctgctcagtcaggccatcacactgactgcaggtttctcctctttccagtacctgatgccctttctcctcaaccagtgtggatcccttctctattacctcaccttggcatcgacaggtgggtcctggcttggaactgttctgcttagtgtttgaggccacctggaagagtgattggggggggcggggtggagcttgaaacacctcattcccatcagtgagagagggctgactagctctagttccctcttactatcctcttctctgaacaagaggggcacagtgtgctggttatgagtatgttgctaggcactggagttggtttgaagcctggcagtcatgtgtgaccagcggaggaagaaggaaggttcattttgctgtgccaagtgctggctttcacattcttgcttccactgtgtgctacctacctgaccatgagcaagtcacccatttgagccttggttttatatagttggcttcatagcattgtgaggattaaatttaatgaatgggaaacatctaggagagtgcctggcacacagtcagagctccatatacataaatttcctttctcttgacatttgtgactgccctctactacgtcagatactgcactagtcttacacattatttaattccaatcatgactctgtaaagcagatatgattatcttagaaaatgaagttgcaaaactttgtgcaatttcacctctcaagtcccacaggatgtcagtgcagaaggatttgaagccatatattaaaagtttatgctcgactgggcatggtgactcacgcctgtaatcccagcactttgggaggccaaggagggcagatcatttgaggtcaggagttcgagaccagtctggccaacatgctgaaa

SEQ ID NO: 616 - DNA, 4001 bp, Homo sapiens
aaagaacagagaaaatgacacttggcagaaaacaaacaatgacctgaaatgactctagaagggagattgctttcccttctcaaagtaatctatacagacaagaatcaaactacagactgtgaaataatctggggacctcacagcagttagcttcttacttgctcaaacatcctacaatctctaaaagtcaaacgcacgatgacacaaacataaaaacacaacacatctaacatccaatcattatttattgatttacacaaatacagtgggtgtagggaggaggtgatgcatgatgaaatgttattctcaggtacgcaatacctttctaaatctccgtggaatacatgaattcaacgttttaccttcaccggctagtttttgactaaaataccccatcaccaagtcttttcaatcaaagctctccaaaattctacaatcgagcaaataacatgaaattagaaacattcaatactagactttcctccagaagccctggtaactctctagacatcaggcctatgaggagtaaattaaagcccattaaaaatattcagcctaacacaaatcttccaagaagtgagacttttgtgggtgatgggtaatgtcggtgaacttcctcttcctttaaaaaggtcaaagacagggaagcgtccggcgtcacatttcctcctcagatctctaccacaaaccacatcacaactctcccattactaaaaaaaattatccagaggaactgctttctgtacattttcaccttagactgaaaatccaacatacctcggaaacgagctgattggtttcaaacaagaaatttaccgataaagtttattatgtactaataataattatggaagcccactgtgtcccgctgtagggggagccgaggggaggtgaagagcaggagggtgtaatcctcacaacaaccagagaaaagccttccctgcagggttggtcccaggcaccaagcaaattctgcccaataaagggggggagggtaccttaggggaggaggggagaagggaccccaagctctaaaaggaaggggctgcagaagcatggccaagtggggctagctttcacagtattgcagagggtctgggggtccccccgcagtgctgctgccggggcaccccaaaagctccgcccaagcccgatgcaggggcttgagccgctgtccctttcctggctgggctgtggcggccggcaggagggtcccctgggctgcggggtccccctggactgcgacgacgagaaccgaagggccgacaggaaggtgaaaaggatactgttggggcgcctgagtctggagggccctgatgttcgggtgaggaggggggaccgctgccgccgccgccgccgccgccgccgccgccgccgctgctgccgccgccgggtgaggaggcggtaccgctgctgccgccgccgccgccgctccggtgccgggtccggttcctgctgcagtcgctgtgcctgatttcagagccggtttctgcggtaaactcatggcaaagcgaagccaccaacccccccagagcgggaccgggcgcgccggggtgcaggggccgggggcagcgggggggcgggatgggggcagacccggggaggcggcgggagcggggggctggggggagcctggggggaggaggaggagggggccggggccggtcacacacgcccgacgccgccgccgccgccgccgccgcctccgccgccgccgccgccggcagcagcagccgccccgcgggccagcaccaccggctgccggtctccgtgacaacgcgaccccagggggggggccggacccggcgggggcaggaggcggagagaccggacctttcacggcaatatcctcatgggccggcggcgggggatctttatccccctccccggaggaagcggcgcccttctcggtagcggggctcaggcgatgccggtggattttcttcactcaacgagcagagcatccaacatggcgctgtggccgcctccagcagtccggcaggacggctgctcggaaaacttcggactttttcggaatggctcgggaaaccgagggtgggaagcctcttcggctctttccggagactgctaggggtcgggattcttcggagacgctcgggtgcgtcctcggccgccgttcgggagggctcaggggctaactcgcttcctcggcaaagatcggcgagggaggcttcgctggcttacagcggcgcgggtgcggggcggagggaaagaccaaaggcgaggtctggcttgcgagagtcctcccctgcggcccagcctcgaagaacaatggtaatggccccggagtcggctgttcgctgagccccgctcgcaggggcggagaggcagcggcgaggcgaaaaacccctggagaaggaaccgcttaaccggaatggaacccgttggatagggaccccccgcggggacttcgcgtaaccaatgccacccgccggcctgtaacccacgcatttcacacccattgtgtcgacacttcctcagacgctctgagaggtgaatgaggagccccatttccagaggacacagaggaaaagtgactagcccaaggtcaccctatcgggaaaggacagagcctaaatctaaatgccaccttcatctggatgaaccttgccgcctcccatattggctggggacatgacctgagccgccatatctaatcagcagccttaactgagctctgtggatggattcaaacctaggccttccccaggactggagcgccctttgaccagcagccagtgatcagctccccaatgtcctatgctgggtgacatttgttgataaggattttcttcccagctagacctgccaagatcactcccacccccaaccccgcacaccccactccttagcaggtgccttgtcctaagcacagtggcattgagtgggaaagaatggcaggcatcggccgggcgcggtggctcacgcctgtaatcccagcactttgggaggccaaggccggtggatcacttgaggtcaggagttcaagaccagccttgccaacatgatgaaacctcgtctctactaaaaatacaaaaattagccaggcgtggtggcaggcaccagctactcgggaggctgaggcgggagaatcacttgaacccaggaggcggaggttgcagtgagctgagagagtgccattgcacactagcctgggcgcgacagagtgaggcttcgtctcaaaaaaaaaaaaaaaatggcaggcgtcatggagcaatcaagttttaatataatatttaccagacatggcactaagcgctgtacccttcattatctcaagcagtcctgtgaaataggtagtatccattttacaaatgaataaactgagactggggaggctcaataccatcaaaccacagaaaagctgagaaaattgaggctcaaaacgcacaaaagacttccccgaggtcgcaccgacagtgtggctggcagagctaagattagagtctagttctgactcctgctatcctgcttcacacactgccttactattttgttgttgctgttttttgagacggagtttcgctcttgttgcccaggctggagtgcaatggcacgatctcggctcacggaaacctccgcctcccatgttcaagcgattctcttgcctcagcctcccgagtagctgggattagaggcatgcgctaccacgcctggctaattttgtacttttagtagagacggtgattctccatgttggtcagtctggtctcaaactcccaacctcaggtgatctgcctgcctcggcctcccaaagtgctgggattacaggcgtgagccaccgcgcctggcctattgttgtttttaattcatataaagctctacacatagtggatgcttaattcgtgacaatccctgggagccccaaatgctccttctaggataaaagagcatctgaaagagagtgataccacaacccccctacggcgtctttctagctagagctccacagtttctgacattgaaaaggatgcctcatc

SEQ ID NO: 617 - DNA, 4001 bp, Homo sapiens
aggatggtctcgatctcctgatctcatgatctgcccacctcggcctcccaaagtgctgggattacaggaatcctctccattgacttaagatgtggttctcggccgggtgcagtggctcacgcctgtaatcccagcactttgggaggtagaagcaggcggatcacaaggtcaggagatcaagaccatcctggccaacacagtgaaaccccgtctctactaaaatacaaaaaattagccaggcatggtggcgcacacctgtagtcccaactactcaggaggctgaggtaggggaatcgtttgaacccaagaggcggaggttgcagtgagccaagatcatgccactatactccagcctggcaacagagcgagactcaatctcaaaaaaaaaaaaaaaaaaaaaaaaaaaagacgtgggttccaaacattttctagaagacctttgattttgttttttttgaggtggagtctcactctgtaacccaggctggagcgcagtggtgcagtctcggctcattgcaacttctgcctcgtgggttcaagcgattctcctgccttggcctcctgagtagctgaaattacaggcaggcgccaccacgcccggctaatttttgtacttttagtagagaccaggtttcaccagatcagggccaggtgcggtggctcaatgcctgtaatcccagcactttgggaggctgaggcaggcggatcacctgaagccaggagttcgagaccagcctggtcaacatggtgaaacccagtctgatcacgccttacaaaaaattacctggacctggtggcacacgcctgtaatcccagctactcaggaggctgaggcatgagaatggctggaatccagccggcgtaggttgcagtgagccgagattacaccactgcactccagcctgggcgacaaagcaagactctgtctcaaaaataaataaataaaactgtctgaacttattaattcaatgcaaacacaactatacccacatactttgagggtctggagatctattcaagccatgaacagtgctaactccagctatgcactcctgccaagatgcttaaatgttatccacttattgaacaatgaccacttgcgtcaaatacaaattcccatactccctcagggtagaaaagtagaactgctctatttcaatccttttttaatcaataccccattaccagttgataacacttcaccactggtatgtctgatgaaatctacaacctatacttcctttactgtttatataataaaattttctattttagcaattgtaacctttcagtgtgtaaaagcaaagagaaaacaataagagctgtgaaacacatcaagaggaagattaattttagcttcaatggcatgaggcaaagtaaaaacttaaagccacacaaaagtaagtgttccatatgactaaaattggtttaaaattatctacactggaacttacacttaaatttatctctttaacaagtgctttttattcaaaagaaaattaagtttcagcttttgtaactacttgaatgttgcaaccaactcagagcttttataagtccttctatgaaatgcactgagaaaaagcatacttgaaacacagctgtatcccaaaaagccacccaattcaccaaacagtgtcacattcagcactgtggtccttactactctgtacatcaaggacacctactacaggtttccttttatttctgttcaattgccaaaacagctcaaagatgcaggtaatgagtaatttacgtggtagcacaattcagaaacttaaaagtcctaaccgagtataggcaatcaaggtaaaaaatgaaattagaaaggaatttaaactcacaaagtagtaagcaaagacaggtttaaaagattcaacactgaactctgcctttaagtaggcaaaccagccaatcttcccccaccccagagacactgaacaaaaccaaccaggttttccataagcaacgctaagttatcaccacactttctcatcggtgaacaattcctaattgaacagaatcatgcaggataaaaacattatgaaatcagtacacacgtcacactggaatggaatttatctttacactgcaccgcggtgcctggattgaaaatcacgaactaggtttaaagaacagagaaaatgacacttggcagaaaacaaacaatgacctgaaatgactctagaagggagattgctttcccttctcaaagtaatctatacagacaagaatcaaactacagactgtgaaataatctggggacctcacagcagttagcttcttacttgctcaaacatcctacaatctctaaaagtcaaacgcacgatgacacaaacataaaaacacaacacatctaacatccaatcattatttattgatttacacaaatacagtgggtgtagggaggaggtgatgcatgatgaaatgttattctcaggtacgcaatacctttctaaatctccgtggaatacatgaattcaacgttttaccttcaccggctagtttttgactaaaataccccatcaccaagtcttttcaatcaaagctctccaaaattctacaatcgagcaaataacatgaaattagaaacattcaatactagactttcctccagaagccctggtaactctctagacatcaggcctatgaggagtaaattaaagcccattaaaaatattcagcctaacacaaatcttccaagaagtgagacttttgtgggtgatgggtaatgtcggtgaacttcctcttcctttaaaaaggtcaaagacagggaagcgtccggcgtcacatttcctcctcagatctctaccacaaaccacatcacaactctcccattactaaaaaaaattatccagaggaactgctttctgtacattttcaccttagactgaaaatccaacatacctcggaaacgagctgattggtttcaaacaagaaatttaccgataaagtttattatgtactaataataattatggaagcccactgtgtcccgctgtagggggagccgaggggaggtgaagagcaggagggtgtaatcctcacaacaaccagagaaaagccttccctgcagggttggtcccaggcaccaagcaaattctgcccaataaagggggggagggtaccttaggggaggaggggagaagggaccccaagctctaaaaggaaggggctgcagaagcatggccaagtggggctagctttcacagtattgcagagggtctgggggtccccccgcagtgctgctgccggggcaccccaaaagctccgcccaagcccgatgcaggggcttgagccgctgtccctttcctggctgggctgtggcggccggcaggagggtcccctgggctgcggggtccccctggactgcgacgacgagaaccgaagggccgacaggaaggtgaaaaggatactgttggggcgcctgagtctggagggccctgatgttcgggtgaggaggggggaccgctgccgccgccgccgccgccgccgccgccgccgccgctgctgccgccgccgggtgaggaggcggtaccgctgctgccgccgccgccgccgctccggtgccgggtccggttcctgctgcagtcgctgtgcctgatttcagagccggtttctgcggtaaactcatggcaaagcgaagccaccaacccccccagagcgggaccgggcgcgccggggtgcaggggccgggggcagcgggggggcgggatgggggcagacccggggaggcggcgggagcggggggctggggggagcctggggggaggaggaggagggggccggggccggtcacacacgcccgacgccgccgccgccgccgccgccgcctccgccgccgccgccgccggcagcagcagccgccccgcgggccagcaccaccggctgccggtctccgtgacaacgcgaccccagggggggggccggacccggcgggggcaggaggcggagagaccggacctttcacggcaatatcctcatgggccggcggcggggga

SEQ ID NO: 618 - DNA, 4001 bp, Homo sapiens
cctgtaatcctaacactttgggaggctgaagcaggaggatcgcttgagcccaggagttccagacgagcacaggcaacctagcaagactttgtctctgtaaaattaaaataagtataaaagaaacaacaacaagaagaaaaagaatatttaaatgaaagtaaataagtaaataagacaaagactagcagtctataaattcctacaatattgcaaaaacttgggccattaatttgttccagagtttcctggtggccacagtataatttatgtatttcccaatttttaatgtaaggaacagaggaagcatctgaatgtagcagttcctctaggaattattgctaatttttgaggactaacacaacactgaaatgaagtgtatggcccatttcaacagagactgtaacaaattttttatttttgggatagaatctcactccgacacccaggctgcagtgcagtggtatgatcttggctcactgcaacctcccccgtctaggttcaagcgattctcccgcctcagccacccaagtagctgggattacaggtgcatgccaccatacccagctaatttttgtattttgggtagagatggaaacgtttcgctatgttgaccaggctggtctcaaactcttgacctcaagtgatccacctgcctcagcctcccaaagtgctaggattacaggcatgagccgccacacccggccaacaaattgtaaagtagaaactttaaagtaaagtgaaatataaatgtgcacaatcataaggataacttctatatttttttaatttcttaaaaggataatttgatgacaaggcaggtaaattcatattcaaatctaaccaacattctacagggagctcttatttcagcatctaaatgctataattcagcacaggtttcagagtaacgttttctctttttttttttttaagacggagtctcgctctgttgcctaggctggagtgcagtgacgcaatcgcggctcactgcaacctccacctcccaggttgaagtaattctcctgtctcagcctctgagtagctgggattacaggagcacatcgccacgcccagctaattttttgtattttagtagagacgggatttcaccatgttacccagcctgatcttgaactcctgagctcaggcaattcgcccacctcggccttccaaagtgctaggattacaggtgtgagccaccacgcctggcctaatttttgtatttttagtagagatggagtttcaccatattggtcagactggtctcgaactcctgacctcaggtgatccacccacctcagcctcccaaagtgcttgggattacaggtgtgaggcaccacgcccagcctttttttgtatttttagtagagacagggtttcaccatgttggccaggctggtctcaaactcctgacctcaggtcatccacccacctcagcgtcccaaagtgctaggattataggcgtgagccactgcgcccagacccagagtaactttttgaaaatactgtattattcaaccattgcaactaataaacacttttgtttcttccttaatgtctgcatccaatctatgccaaaacacttgactttctctgttaaactatgaagaacataaaacactaatacaagtagttcatctaagactgtactttgaactaatcttagataatttatctttcaggaaaatatgtacagaaaaggaactttcaggctcttattaaatgagacaatgaaaatttaattacatgggctataaacttaatctgtcactgaatgtaaacacaggatacatttcaggacaaaatgaacaatttctgttgcttttagaatgtgttgcacattcctgagtactaacaagtggcactctacgaaggcatagactttgaagctggaaaagacaaaaatttgaatcctagattcgtttgccagctagattaccttgggaaaatgatgtgatcgctccaaacttcagtttcctcatcaatactctgtgggattgctggaaagaattagcaaaataaggcttatgatgggcttagcacatactaagcagtatttcattattatacatagctcttccataaagatcatgagttttcctttccgtggactatccaggtgacacagcctttaagacatctctcccagattcctaattaagagcaccaacggatctcctaacttcattctttagagcttagaaaagctacaataaaatattattacaaggaaaagtaggtccgtgggagcatgtgagatagatatatacatatcatgacatacaaaaaagaaactaaaaagaatgcaatctgctacacatttgacaaaattctgaaagatactgattgacttttgctactttgcatggtgaacttttacatgcatttattcacttcctgaaagaatgtctctctgccatgaaagctgttaattctgatttaacagctattcccaaggtgagcagcttatcaactacagaataataacagttctctgctcaaagtatttttcacagaagggtcagagagaaaactgcttttcttacatctagatgactagtgtcattagccaaattaattcacccaattgtcacaggccaaagatctagtttattaaatatacttgttctcaccatgccagctatgaaggaaaattatggaaaaaatcattaccccctttattagcaagactcttctccaaaggcctccacttacactttttaattaagtctatttttccccttaaagaagaatgatctgatggttatcaacagtaacataaaatattagctaccaccactcagaaaatataattctcttccttcatcctgtagtcatcattctcaataatatcagagtacactggaaaaacttttcctcactacctgtatttgtaaattcacaaccagtaagagttgaaaaccattctacaagtcaatctcaccccactcagagccacccaagacagcaggtcttccagtgaacagcaatgaataaacaaaataaaatttttgatcactaagcaaaacagtgaactacattatcttttagcttttggttataacattaacaggaagaatacaaacttttacatcatttataatttacttcctaaattcaattaaaatgcccttactgagaaaaaaaaatcctacaaactatcaaaactctaaacataatttcttaagatggatacccatgtgaagtcaatgttactttatttggtttttctgaggtataaaaattctacaggcaatattttactttctcattctagatatacccaattcccacaaagatgttttctttcttatagcattcagcagcatttcatttcaaaataaaacgcctaaaggaaagcatgttataataaaaatattctcaaatagaaagcttttcagcacattctatgttcttatgtagaaggggcatactcaaagtgactttcttccataaatttcagcacaatctaatcactacttatccagtatcgtaagtccaaatttaaaactctaccaaaaaaagttttgaaaaatcaaatgccatttctcaaagatagccaacttataaagactttaaaataaatgtgagtggtaaaaatcagaaacatataaatatttagaaaaagggctgagtgcagtggctcatgcctgtaatcccagcactttgggaggctgagaatggcttgagcccaggagtcgaagctgcagtgagctatgattgcaccactgtactccggcctggctgatagaggccctatctcaaaaaaaaaaaaaaaaaaaaaaaaaaaagagctatgtaatgttttttaatgcagggagaagagtagcactgtacattttttgcaaatcactttcatgtctggtttaatggtagaccagctgaattcttgttttctttttttaataagctttcttaggctgaatgattttttttttaaattctatcaaatggattcagacagaagaatgaattcttacatgtgcttctgcatttaatct

SEQ ID NO: 619 - DNA, 4001 bp, Homo sapiens
acacaaatgctaaggagttttctgtcaacccaaagcacacagtaagtagaggaattagtaaggccaccagctctaactcacaactccacctctattacaacccacacccaagtaccttatcttagcaagcaagtaaaggtttcagaggctaatactaatgataactaaagaggattactttagttcttcaactaaaaacctgcatgtaaatccctcatgtatttctagagtagttagtagaggaggaaaatcctctgtataggtgggtgggtcacaaccccatcggccccaaggattttgttagtgctttaaaaaatgaatggaaggaatccagccatccacttgctcatggttgaccccataagccacagtgccacagtctaccctacctaaaaactgaaaggagaggtgccgcgcagcattgtactgtcactttattaaggaagcaagtggtgtcatgcagcattgtactgtcactttattgaagaagcaaggaggcaaacatctggattgaaccttttgattccttgttacgttaattttattcagtgttttaaactcaacccactcacatttacaaaacacttcacacagactacttccctcatgaatggagttccattcacatctcacttaaaacatcaaacttattctgaaatgatggaggttaaagcttgttcagtgtcaatttgcaagtattataaaatattaaaagctaggcgcacaaatgcaggaggataatgtgaggcagcttctcaaggagctctactaaattaaagcatttaggtaaggggcatggataggcttaaaggcaccagagagctctcaacaaactgtgttgtggagccctgtatttaagtccccagtgggaagattttatgaaaattattacccttgagtggtattggctaacagcttgggaatcaatatgactcattttcccccaaacctggaattgttttctagaagtccctcccttcggtttccctgtggtctcctcaagtcccttaacatatgttgggggaggggaggttctctccttgtagaaacaaatgagtctcctgcaggttcaagacttcaagacctgtgtttactaaatcctacatgtataacagcccccagcccaaagagagacaacaattacaacatacacaggtacaccctacgaacacttgaggctccttcttcctcagctaaacatgagcactgcttagtgtaacacacgcgccttcccaatctcgtctagaaatacccaagtcccaggtccacagcggggtgtaatagaggaaagataggggagggtgctgccctccctgtgagacaattagcgaaagtcacacagaggggccccctgaggatccaagtccgcgcgcccagcgcctcgggaccctgatcgcccgaagctgcctggactttttggcgccaccaggacgttcaacaaagccacctcgaggacaactacggaaaggcgcagagaggagtggcgcggggctgctgcggggtcgcctgtcgctggggagggggcgcgcgtcaacccaagtttcagctctctcccctggggccgggaagtctcaggaggccggcaggggtgtgaccctgacctgcggggccagagccgccagatgggctgcgggtggggtcgccaggagccctcaggtctgggcagcgcgggggcaggatcctcttgcaagggccctctccccctccctgggagtcggggtggccaggctggccgctgggagaagccagtcgcgaccacgtggcccagcgggtgtccgtaacagagggcgggcagagtcgggggtgcggggcctgcgccgaggcgcttctacctggttcttgaggcgcatcttccccgccgggcgatccggcccgaggctgcggaggctgggtggggcggagcgcggcgggcgggaagacgtccgcagagtctcaccgctctcgctctctagctcgctctgcggctccgccaccgtcgccgccgccaccccctgcccacctcgagggggcgcttcgcgtagagacggaggacgactcctgcgagtcaggttcctgtggtggccctggcacctacctagggggttggcattccagtatgctcaaaatgttgaaggagaaaatctcctctctttcctccaatgctactccctgtggtctgcttaaattttaaatgaggtagtttctttgcagctaaagttcactgacaccgtttggaccaatgttaattgctgtgccggacccacggggtttataaatgtgacgaattcagaacccttagaataaatcttaccctttggggagaggagcatggagaaggtggcttgtctttggcagggaatgtagacaccttaagtagatccttcaagtcatgtttggctgtttggtgtctaagatatgtccaaagtaaagtgagaaatggaaacaattgacccaaacaaaatgccgaagtcctttgtgagctatgatttcacgtaaaaatagttactggcccttccattactctgtggccttttaaaccacgctagatgtttgaataacacaacattagttcagtggtaggtaatgggatgatcattaaaaatgggaaagtggcttgtttggccctccttgaccttcataaaattctactcctagggctcagaaactaacagttgaattgttgagaatggccactattgcctaaagaaaatctaccttgattcaaaatacaggaaatacaggtatcagtaaaaattattgggctaaggtaagcttagtatcaagagttagaatggaaatattaaagaggtcatcttatccagtgtctctttataggtgaaggctctgaggtccagggaagacctgccccagattacaaaagaatcaggaggaaaaattataaaagttctcccgacccctagcctattgctttacctcacaattgtcagcattctcaagttttccctgtttttaagacttgggcaagattcagaacttcaaataggcccaaataaactaaagaggaatcctaggtagtaaaaagatttgggatgacaaatggaacaaatttgatgatggtttcattataataatagctatgttattgacactatgccaagcgctatgtactttccatggaccatctcatgcaattcaagtttcttagtgcagccttaaaattgaacaatcactgatggctataaaagcttttttcctacaatcttctttggttatataatacaaaggaattttgctgctgagcagttggggatataccaactcaaaattctgctaattcaaatccattgatccagtagttccacttttataaatttattttaagtaaataatcattaacatgttcaaagatttgggtctatgatttttgctggggcattctttgaaatatggaaaaattatcaatattatttataacttttctatcagtcaacttgatattgtgaacatctttgttgactgatttttcagatcagtcaataaagaagactgatcatacaatggaatattctggagacattaggaatgatacagttgatgaatatcaacatgaaaagttgttcacaatatatttcaaagtgagaaaagcagttcataaaattgtatcttcagaatgatcctgttttttgaaagggtaactggttattttggaaggtgggatgatgcatgattcatatttcccttttgcctgtgttttttttaaaaatcagtagtaaatgtttattattttagaattaaaataaaacattagttttagtgtatcactatctctaattattatcaaaataactacaatgagcaaagcattgtggcaaaggccagcaggcaaaaattcagtgcagtttagcatagtaaagaatatagtcttaaccactgtagttagggtattgatgaaacctaagttcaaatcttagctctttcctcttcaagatatgtcatcttgaacaagttgcttgatccttctaaagcctaaaaacagtaatgatattaatagctgacatttt

SEQ ID NO: 620 - DNA, 4001 bp, Homo sapiens
actatttcctaataaacaaaaagaaaaaaaatggtgggggtaagggaggggcagctgtcagcctctacctttctgccttctgtctgagcttttcaaaactgaggatgatgaatgatttacttaaatgaatttatttttcaagttggataggaacatgatctgaatttttaaaaatccactaaaacacattctcctacccctttagagaaaggtaaaacatgcttttgacaacagcctcatttcaaaacctgtgcagagtgttcattttgcttaactaaataagtgattttgcttctctccttcaaagggatgtctttttttctttggcctcttaagagatttgcaaagagacatttagcaagtgtatggtgaggtatacagtttgtctgcctatttacacatttaacaacctctacactaccaagccttcagtagtgtattttttgttctggtttgggttttttaagtggcttacctgagaagttcatgcttcacacctatgcaaaagactaatgtgtcactatttatttaactcataatttaatcaatttgttcttcaataaatacacagtggtaacacatattaccaaatacaaaattcaatgtaatctttaatctttgactagagttgacagtgagacagaactaggcagagtagacatacagaccaaaaaataagctatatttctgggtttcaaagtccaagaataaatgggtttgtgaaaaattattaggaaagaaaataaccttacatttttcaagattaaaactattctgtccaagatgctgtttcatgaacacacacatataaacatacatatatattcacacttcagaaaatacagatacatcataaaacaatatgtgttgggtacactgcataatccattagacttgagtatgaatacgttcagctattagaaatgaaaatacatgaaatagaaaagtacaaatgttaaaactataattccttaaggtggaacaatactcagttaagtaaacttttaaagtaatttctttagcaaatgtataaaatgtcctgtgagtcacaatagtactacagtatctgttgaactgtgtactgagggtgaattcacaggttaaagtgttctaaatggttcagcatatatacacagagtaggtatgtgtgccccaaatcaacaacataaactctgagtgcaatttcaccaatattaaaatattgtgaaaagtaaacattaagacaatgctgacaaacacaaataaaaacagctcacttggaacaaaatatttacttagatttctctggaggttataaaagataaaaattttaaaaacccttttctcccatccatactaacctcagtacacttattgaaccataaattaacattaggtatattaaaaggtattctggccacttttccaaaatagtagctgtatatacagtataaataactagctggttttgctaggctaaaaattcatgcattttgtatattgatcacttttccacaaacctccactttaaagtctttcaacagaatcctcaaacaaatgcacaaatgtcctcagaggccttttctctaaagacaaaggcagaatcctattgttgggaaaagtcaaccttattatcgcatttccaatagtacaattcatctttcagagtgaggggctgaccgctacatcagtgatgtgacatttgtaaagcaacagattctcaatatattatctcaagaatcaggcaggcgagtctcccagtcatgcatgattttttttttctgccacaatccaccaccacagaaagaaacttgtctcactcaagcagctaaggcaacctaaaaatgatatcccagcactgtggggctgccagcgccgctgtattcctcttaccataaatgagcagtttcttgactcattaatgacaatttcccttaaaagaagtaatctcatatcagtcagccccttgccaccatgcacacatcccaaaggttgcagatatctcagcatcagtcgccggcagccagctttcccacacagagtccagatggactgtaccagaagccaattcagcgttaataactacctactccgcgcagtggagaagccttacgtggcacaatgggctaggaaacagcagccggctgaaactgcaaataaaaaaagacaaccaaattctccaaaagcaccaaaaggaaggaacagaaatggaagcgtgaattgtatttccttgacttccatgaggcggaaaaaaaggaatccttcataaatatagggaaaaaaaagaagaggggggaaaaacagatgctgcccagaaaaaagtgacaaaatattacctcattatttaacaaagcagcattaagcgtcctgctgatttcaaacatcttgccacagattttgttttaagagaaacagatagaatcctttgcaaagcactccgtctgcaaagggttcttcaattttcttgcgcaccacggaacagtcaatatattatttccctagagttcgtacattaaaacctctagtcagtgagctgaattttccccttatctcacacacagtagactcctgttatatgtactgctctctttgcaagagcagcctgccccaaacatggctggtgtttaaactactctttaaagtaacagttcactatataaccaccaggtgggtagagtgcacagattcaaatgaaccatcttaaaagatttcttttttttttccccttggaatagcttttgggtgtaaaatgtgacatgagaaacactagcatcttaacaggcaagattgtctctcactatatcttgtcaaaataaataaataaaattccttctcttgacttaaagcaaggaaatgaaacaaaacaaaacaaaacactgccacaaattctaataagaactgcgaagaatgaaacacaaacaagctttgtttcattcagcaaaggatgaacaaggaaaatacaatcaacacagagcaatggggaaggccaaaaacctcatgaaaatatttctctttagcaaaaacagaaaaatattcacacacagtgatgaaaactcaaaagtgtgcatgtggatgaagcacatacaagatggaggcaagagtttaagggtgcaacttttcttctgggtagaaattaggtttatttaatgtgggtctttcctgataagaaataactgaaagcttaaaagtaaagacaccgaaaaaaaatacaaaatattaagcctctcttttaaaaatacaattatatgaatagtgataaacaaccacaagagcaagccaatcacatgtctctacccattgctgttctttttcccgaagatctgcctcgaagtggaacatttctgtcgtatactattttggatgtatagctaacttggcatctcctttgtatcactctattccaattaatctgctcctctgccaagaataaacagaatgtcccaagttgaaagctccaagtgattgggggtatgttaaaaggatatagaaccacctgaacaaaaataaattacatcacttatattgttatatggcctgattttaaggaggatcttattacttataaagcatgcaacaccattctatgttccacatgtgtctaaaacagaaaccaacacacacagatacctgggattttcttttcttggctggacaaaattaaaggtctggaacctccacattttcttgcaaacacaggtgttgacagtaatattttcccagcccatccaggccgtatttagccatacacaatagtgactatgtccttcatctttaagtcaagacggcatcacttaataccatttaacctccttgcatatattaagtttcaagtgacaatttttaactggggagtgagaaggaggagttgctctcatcaaattctggttgtatgaaataagctaatttgtacactcaccatatgtcttaaacactaattaaaaaatgtcactttcttcaaacattaaaatgtaatcagcctagtaaataaaatattctcaagttttcttgccttggtgctaatt

SEQ ID NO: 621 - DNA, 4001 bp, Homo sapiens
cggcttctcctctgttcgtttccccggcaacctttcattgggttttcctcccagctatcgctttcagttgggctgctcggtctaatcttatttgttttacacccatcaaaacaagcagccagacaaaggcaatcctctaagaatgggaaaaagaccacagctttgttataacatctatgcagagcaaaaagtcctccccaggcttttctagggaaaaataagtaagatggttatgaatttacagcctgcccccatacccagctctgaaaccttgtgaaacctattgctggtgaaaattcaaagtcaaagtgggcactcgtggcatctaatcatgccattttgtgccatatcttcagggtcaacatcaggcgacagaagcggcactcaaggagtttccctgcttcttttttcagaaaaagatgatgctaaaaatagatttactacttcggcagaaaggttttccacttccccttccacatccgaaagtcctgtttcacaattgcatcggctggtactgaatctcacctcctccacccctcattcccatccttccccatcactcctagcatgagactgaaaaagaaatgtgcctttaactttagcagtcgtgtaattccgttgaaggctcacagaggcggtggacacgccagccaacagtgacggtgacattgattgtcaaaaaagacaccaaccttccttggctaaaatgtgtgtttgctggaagaggcagtgtgtgtgccttgtgtgcatgcagtgccattacacttggagatggattctggttttcagaaaagagaaatactaataaacacacacatacatacacacacaaacgatcagcacagtgatttacgatgcacagtccagcatccttacacatacacacatacaagcacacacacacacacacacacacagggctgggacctccaggctgccttcctcttttcacttaccatcttcaagccattccactccatctgtgatcagaagaagatggaccctcacacagtgtgtcaaaagcggaaaggaacgttatgtaaaagctgacattccttcttacagagctgctgcccagagaaggaagcaacaactcaacacgccaggcactgctacacatacaagccgcctcctcttttttatgaggtcatgacaggaaactctttgaaatacaagatgcagcatttactgaagcccaaataaatcactctctttgccgttttgactgcgcagtcccccgaaacacaactgcccatctcagtgttcagtatccaggagctgcctctcgaggtttaaatttccagcacggaaattgagagattcctaaccccgctgcatccacccccagccccacaaaacccaggcacgtagacaaaccccctctcccttacaaaaaagaaaacccttcttttgccattatgtctcaagtaatataacctctttcaataaaccagcaattatttcagccctccccctccaccccttgcctttatgttgaagggaaaactgacaacgacttgctaaaaatgacaatcttatatccccattgcttttcaataaaaggacctacccgcactctctacacaaaagagatagtaaatgtaggaaccaaacagcagcacagaactaaactcttgtgcaagcataagactggtcaaggtgtagatgcttttcttccctccagcaacacaaacaacagattataaatctagtcatacctaccataaccattcttattggcaaatattgggtctcgcagagcttcgactcttctgttaaaatttgcaaagatttcagaatatatatttaaaatgactactattgttatatataattaaagatccacaaaacacagtgtggatgattgtaaagcaaatcaattatttttgggggggtgggcgggggagagaaagaaaaaaaagaaaaggagcagtgagctgaaacccccgattctaggatgtagataagaacaactgaacagagccttgctgaaattggctcgaagcttcccctttttacatccatttatgggaccatctgtcagccgaagcctggatctgattggctggggaaacgaagggaggcgttgcaacatcaggtgctatttaaattagctactgccagattgacgatgttaatgatttggtgacctctacaacaacagagaccagatttctgaactgcttcttgtgtctggtaattaaggcccggctgaagcaacaacagccatacttgtatttttaccttttccctcctcccagctcaaaagtactgtaacaactgcaggtcactggaggcttgcaaacctaaactaacagtgggagggtccttcttttcccatcctgagggccgaaccgtgccacctctctgatggagggcttttccaccgtagaatattttcaaccaccttatctttctagacagttgctttctagcgaaatgcatatttaatgatctgcctgtaggcttaaaggtacaacaaaagcactttaatgtgctaattcatctacaatttaactttattatttccagatattgctgatttttagtaagtaatgctccttctccagctaacatggccaacatttcaaaagcaagcaagttggggattaagcttgctccgtgaactaggttcatacaagtttgtctcagaaaactatttcctaataaacaaaaagaaaaaaaatggtgggggtaagggaggggcagctgtcagcctctacctttctgccttctgtctgagcttttcaaaactgaggatgatgaatgatttacttaaatgaatttatttttcaagttggataggaacatgatctgaatttttaaaaatccactaaaacacattctcctacccctttagagaaaggtaaaacatgcttttgacaacagcctcatttcaaaacctgtgcagagtgttcattttgcttaactaaataagtgattttgcttctctccttcaaagggatgtctttttttctttggcctcttaagagatttgcaaagagacatttagcaagtgtatggtgaggtatacagtttgtctgcctatttacacatttaacaacctctacactaccaagccttcagtagtgtattttttgttctggtttgggttttttaagtggcttacctgagaagttcatgcttcacacctatgcaaaagactaatgtgtcactatttatttaactcataatttaatcaatttgttcttcaataaatacacagtggtaacacatattaccaaatacaaaattcaatgtaatctttaatctttgactagagttgacagtgagacagaactaggcagagtagacatacagaccaaaaaataagctatatttctgggtttcaaagtccaagaataaatgggtttgtgaaaaattattaggaaagaaaataaccttacatttttcaagattaaaactattctgtccaagatgctgtttcatgaacacacacatataaacatacatatatattcacacttcagaaaatacagatacatcataaaacaatatgtgttgggtacactgcataatccattagacttgagtatgaatacgttcagctattagaaatgaaaatacatgaaatagaaaagtacaaatgttaaaactataattccttaaggtggaacaatactcagttaagtaaacttttaaagtaatttctttagcaaatgtataaaatgtcctgtgagtcacaatagtactacagtatctgttgaactgtgtactgagggtgaattcacaggttaaagtgttctaaatggttcagcatatatacacagagtaggtatgtgtgccccaaatcaacaacataaactctgagtgcaatttcaccaatattaaaatattgtgaaaagtaaacattaagacaatgctgacaaacacaaataaaaacagctcacttggaacaaaatatttacttagatttctctggaggttataaaagataaaaattttaaaaacccttttctcccatccatactaacctcagt

SEQ ID NO: 622 - DNA, 4001 bp, Homo sapiens
gggaaagaaggaaagcaaaaagctcttcatttattattttgtaaagtaatttctactgaggaaaaaaatgagaggtacaatgaattcccctgaaactatagtatcaacatccgatttagtaaaaataccaaaatcacctaaccccaaatcattgcttagggtagatctattctacctatatttttcctatgaatatttgctggaaatttctaagaaatcatttgcagaacctatcagctgtgggagttcactattatgcttccgtcaacttcattcaatataatttacattttttcaaatggtctcacaggattccttgcgatttttcgcatgtacaatttcacaccagggaaaagggggaaaaaggaaaaaaaaaaaagcaagattccctaccctcccttccccctcacctcctctctgggttttttaaacaacaacaacaacaacaaaaaccacacgcgcacacacacacgcacacacacacaaaaacaggggagacagaacagatgcttaaaaatagatttctaaaaatcactgtaaaccagagttagaaatgtaattaacacctattaataacgaataattaaagttgggctggccacaaagaacagcaaagataatcgaggtcctgtccccctcccctttttttttacactgtttgcagtgtgttctcatgatagccacctgctccctactcggcttctcctctgttcgtttccccggcaacctttcattgggttttcctcccagctatcgctttcagttgggctgctcggtctaatcttatttgttttacacccatcaaaacaagcagccagacaaaggcaatcctctaagaatgggaaaaagaccacagctttgttataacatctatgcagagcaaaaagtcctccccaggcttttctagggaaaaataagtaagatggttatgaatttacagcctgcccccatacccagctctgaaaccttgtgaaacctattgctggtgaaaattcaaagtcaaagtgggcactcgtggcatctaatcatgccattttgtgccatatcttcagggtcaacatcaggcgacagaagcggcactcaaggagtttccctgcttcttttttcagaaaaagatgatgctaaaaatagatttactacttcggcagaaaggttttccacttccccttccacatccgaaagtcctgtttcacaattgcatcggctggtactgaatctcacctcctccacccctcattcccatccttccccatcactcctagcatgagactgaaaaagaaatgtgcctttaactttagcagtcgtgtaattccgttgaaggctcacagaggcggtggacacgccagccaacagtgacggtgacattgattgtcaaaaaagacaccaaccttccttggctaaaatgtgtgtttgctggaagaggcagtgtgtgtgccttgtgtgcatgcagtgccattacacttggagatggattctggttttcagaaaagagaaatactaataaacacacacatacatacacacacaaacgatcagcacagtgatttacgatgcacagtccagcatccttacacatacacacatacaagcacacacacacacacacacacacagggctgggacctccaggctgccttcctcttttcacttaccatcttcaagccattccactccatctgtgatcagaagaagatggaccctcacacagtgtgtcaaaagcggaaaggaacgttatgtaaaagctgacattccttcttacagagctgctgcccagagaaggaagcaacaactcaacacgccaggcactgctacacatacaagccgcctcctcttttttatgaggtcatgacaggaaactctttgaaatacaagatgcagcatttactgaagcccaaataaatcactctctttgccgttttgactgcgcagtcccccgaaacacaactgcccatctcagtgttcagtatccaggagctgcctctcgaggtttaaatttccagcacggaaattgagagattcctaaccccgctgcatccacccccagccccacaaaacccaggcacgtagacaaaccccctctcccttacaaaaaagaaaacccttcttttgccattatgtctcaagtaatataacctctttcaataaaccagcaattatttcagccctccccctccaccccttgcctttatgttgaagggaaaactgacaacgacttgctaaaaatgacaatcttatatccccattgcttttcaataaaaggacctacccgcactctctacacaaaagagatagtaaatgtaggaaccaaacagcagcacagaactaaactcttgtgcaagcataagactggtcaaggtgtagatgcttttcttccctccagcaacacaaacaacagattataaatctagtcatacctaccataaccattcttattggcaaatattgggtctcgcagagcttcgactcttctgttaaaatttgcaaagatttcagaatatatatttaaaatgactactattgttatatataattaaagatccacaaaacacagtgtggatgattgtaaagcaaatcaattatttttgggggggtgggcgggggagagaaagaaaaaaaagaaaaggagcagtgagctgaaacccccgattctaggatgtagataagaacaactgaacagagccttgctgaaattggctcgaagcttcccctttttacatccatttatgggaccatctgtcagccgaagcctggatctgattggctggggaaacgaagggaggcgttgcaacatcaggtgctatttaaattagctactgccagattgacgatgttaatgatttggtgacctctacaacaacagagaccagatttctgaactgcttcttgtgtctggtaattaaggcccggctgaagcaacaacagccatacttgtatttttaccttttccctcctcccagctcaaaagtactgtaacaactgcaggtcactggaggcttgcaaacctaaactaacagtgggagggtccttcttttcccatcctgagggccgaaccgtgccacctctctgatggagggcttttccaccgtagaatattttcaaccaccttatctttctagacagttgctttctagcgaaatgcatatttaatgatctgcctgtaggcttaaaggtacaacaaaagcactttaatgtgctaattcatctacaatttaactttattatttccagatattgctgatttttagtaagtaatgctccttctccagctaacatggccaacatttcaaaagcaagcaagttggggattaagcttgctccgtgaactaggttcatacaagtttgtctcagaaaactatttcctaataaacaaaaagaaaaaaaatggtgggggtaagggaggggcagctgtcagcctctacctttctgccttctgtctgagcttttcaaaactgaggatgatgaatgatttacttaaatgaatttatttttcaagttggataggaacatgatctgaatttttaaaaatccactaaaacacattctcctacccctttagagaaaggtaaaacatgcttttgacaacagcctcatttcaaaacctgtgcagagtgttcattttgcttaactaaataagtgattttgcttctctccttcaaagggatgtctttttttctttggcctcttaagagatttgcaaagagacatttagcaagtgtatggtgaggtatacagtttgtctgcctatttacacatttaacaacctctacactaccaagccttcagtagtgtattttttgttctggtttgggttttttaagtggcttacctgagaagttcatgcttcacacctatgcaaaagactaatgtgtcactatttatttaactcataatttaatcaatttgttcttcaataaatacacagtggtaacacatattaccaaatacaaaattcaatgtaatctttaatctttgactagagttgacagtgagacagaactagg

SEQ ID NO: 623 - DNA, 4001 bp, Homo sapiens
tcaaacatcttgccacagattttgttttaagagaaacagatagaatcctttgcaaagcactccgtctgcaaagggttcttcaattttcttgcgcaccacggaacagtcaatatattatttccctagagttcgtacattaaaacctctagtcagtgagctgaattttccccttatctcacacacagtagactcctgttatatgtactgctctctttgcaagagcagcctgccccaaacatggctggtgtttaaactactctttaaagtaacagttcactatataaccaccaggtgggtagagtgcacagattcaaatgaaccatcttaaaagatttcttttttttttccccttggaatagcttttgggtgtaaaatgtgacatgagaaacactagcatcttaacaggcaagattgtctctcactatatcttgtcaaaataaataaataaaattccttctcttgacttaaagcaaggaaatgaaacaaaacaaaacaaaacactgccacaaattctaataagaactgcgaagaatgaaacacaaacaagctttgtttcattcagcaaaggatgaacaaggaaaatacaatcaacacagagcaatggggaaggccaaaaacctcatgaaaatatttctctttagcaaaaacagaaaaatattcacacacagtgatgaaaactcaaaagtgtgcatgtggatgaagcacatacaagatggaggcaagagtttaagggtgcaacttttcttctgggtagaaattaggtttatttaatgtgggtctttcctgataagaaataactgaaagcttaaaagtaaagacaccgaaaaaaaatacaaaatattaagcctctcttttaaaaatacaattatatgaatagtgataaacaaccacaagagcaagccaatcacatgtctctacccattgctgttctttttcccgaagatctgcctcgaagtggaacatttctgtcgtatactattttggatgtatagctaacttggcatctcctttgtatcactctattccaattaatctgctcctctgccaagaataaacagaatgtcccaagttgaaagctccaagtgattgggggtatgttaaaaggatatagaaccacctgaacaaaaataaattacatcacttatattgttatatggcctgattttaaggaggatcttattacttataaagcatgcaacaccattctatgttccacatgtgtctaaaacagaaaccaacacacacagatacctgggattttcttttcttggctggacaaaattaaaggtctggaacctccacattttcttgcaaacacaggtgttgacagtaatattttcccagcccatccaggccgtatttagccatacacaatagtgactatgtccttcatctttaagtcaagacggcatcacttaataccatttaacctccttgcatatattaagtttcaagtgacaatttttaactggggagtgagaaggaggagttgctctcatcaaattctggttgtatgaaataagctaatttgtacactcaccatatgtcttaaacactaattaaaaaatgtcactttcttcaaacattaaaatgtaatcagcctagtaaataaaatattctcaagttttcttgccttggtgctaatttaaagagtgtttatctcaaggtaacctctctattttgattaccaaggaagacttttaatttgaaaagggtaaaaggggatactggggactggggggagagagaagagaaaaccactactgtatgaagctgcacaaaggaaaataagatgaagcgggtttttaaggacccatagtcttgttaccctaaggcaaatccagccaatcaataccacccattgacggtctaccatctgccaggctatccagtgatgtggctaaacagacctgttccatatgactgtagccggctcattttcagtcgattagggcagttccagagcattcacgtgcaacagcacaaaactccaagtcagactgagcctctctcttcacaccagtccctccgaacacagctgcagaccttttcctcctgttccggctgtctggattacctcttcttgcccctcaattgaattagcaaaatggggtgggaaggtagagtgaacagacactcacatatccacacacacacatatagataattgctggcccttcttcactgtcatgcagaaatcaggaattccatgtgctctgccctaatatgattatagcacaccatttaaatagcgtcatcagtgactatgacctgacattttcctgtggttcaatttattttcatcctttacctcttcccttgaaaaataaacctagactgctggcatttccttctttaggaaaaatacaatcagtctgcccagaaaatggtatactatatgtaaaagcttttgagaaaatttaaagcttaattttcctttgttgaattgtggtgttggtttctgtcttttttttttctttatcatgtagaaacattaaatcaatttttataggaaaatgcaaacatactacagaggcaagaaagatgcaccagactgatgtgaaggagtctatcagaaattcactgtcgaatgttctctgtgagatatatgacctgatagtcaataatgcctttctccttcctaagtagttttgtctactacagattgtgggaaagctagaagaatgctactgtggggggaaatgtgacaaatggatgtctaacctgtctaaatcgccaagagttcacctgtgcaggtaaatggacctaagagtagattcatacttcatcttcctgctttctcttcatattcctaagccttatgcaagaacagtagctgaaagtaaaagtttcctttccagagtcagtgtatgcttactttttcaaatgtgcctttgaccatactcttaaagcactaggatgtctttctgggaaagaaaatttgaagtacaggaaaactatcttacttacaaaattctgaaaaaaaaaggtaaatacacatttatccaagcatctgatttaggtggaatggctgtctggacttttccctgatatattcttcatcataacccccaaaaaactcagcagggtcaatgtgaaaacacacagagatttctgaagatccctgcattaagggatttggggcctcttcatatcagttcagatgagctttactaaaaataaaaaaccaaaacaaagaaacaaacaaacaaccctggtatatgtataaatttttataaatctaagtgcacgagcaggtaaagtatggagtagctattcataccattaaaggatatagtgtttggtcagtttaataaatttttgaaaatgacttgatatggaatttaaaaaaattctggactcatttataattctgtaactaataataaaggaatagatgtaaaaggcaaagaaggtacatccatggaaaaagaagggaggaggaggagaaagaaggaagaaaaggtcaaagggagaggaggggaggggagaaagggaggagaagaagaaataacgaaattaacaggaattctttgacttgccagttagggcagagtttttattttattttattttattttattttattttattttattttattttattttattattttatttttgagatggagtctcgctttgacgcccaggctggagtgcagtggcgccatctcggctcaccgcaagctccgcctcccaggttcagccattctcctgcctcagcctcctgagtagctgggactactggtgcccgccaccacacccggctaattttttgtatttttagtagaggcagggtttcaccgtgttagccaggatggtctcaatctcctgacctcgtgatctgcccgccacggcctccccaagtgctgggattacaggcgtgagccaccgcacctggatgaaattaacaggaattctaaagcacaaatgaaaacgctatattttaccgggagtctactgtataccaaacactgtattaggcacttgacatacaca

SEQ ID NO: 624 - DNA, 4001 bp, Homo sapiens
gacctgctgcaatttttctaattgagggaggaagaagtctggggagggggtcatctctagcactctgtggaggggcagggatgggacaagacaggctggggaaggaaggagaaaacgggttctcaccaaagggccctgggtctagggcctcctggaaggccatgccatccttctccagcagctcaatgatccaactgagctcatcagaagagctggaagctgacaaggaaggaaggaagggtcacactcccctaatccctccctcaagggctctctctggctgtgcagctggcccagagctccagggcctgcctacggccacactgaactcgactcagctcaacatgtggagctgctccccagcctccaggggcctggactcactgaggtctcgcagctgggcatggagttggtcccccagaggcccaaagaccagacgcagctcctcaagggcacaattgcagagggtggcgccatccatgtcacatcgtgagaagtcaatggcgcttgcgtcgtacttgttcttctccacttggtagctgatccagtccagaacctgcgtcttcgaccagaactggggctgttcccccaaccagctggccttctctgcaagggccaggcagggaaacaggctcagctcaggccacccagcagaccttacagccccatttttttttttttttttgagatggagtctcactcctgtcacctaggctggggtgcaatggcacaatctcggctcacagcaacctccacctcccaggttcaagcgatactcctgcgtcagcctccccagtagctgggattataggtgcccaccaccacgctgggataaatttttttttgtatttttagtagagacggggtttcaccatgttggctaggctggtctcgaactcttgacctcaggtgatccgctcagctcagcctcccaaagtgctgggattacaggcgtgagccaccactcccagcccacacagccccattcctggagcacactggggattcacacctcagcccttggagccatcccaagagtaggggcaggaggtagcattcacaacacccttgtcctggtatctgacacctccctctgcctgtcacagccccacaacccccagcacctcagtcactaagtctcagcctctagccctggaatttgcctagagaccctcctccctgcctattcccccatttgtctaacaggcccttagatggatctgtctcccactccgtgccccatcccaccccgctgagacccacctgtaccctccaatgacatctgggggttgctcagggtcagtaccaagtcatcggccccaaaggtggcagcagggggaacagaggccagggtggagtcctccgagctgtacatcgcactgaagtagttgctaaaaatgttgctaatctcacaggttgcagccatgaggctacctgtgggtagggggagagaggatgaggttggtgaggggacgagggtcctctccttacactcccagctactctgctttgcccaaccctgggcaagagtagcccccaggggcaggaagatcagcaactctgcggacaccgtctcttcaagaagggctccaagatctcagaccagggcaggaccacaggagcctccagctgggcttccctcctcagatctctggggccctggagccagactagcggcgtcatggccattctgccttcccagagacaatctctctctgttctttgaccctcaggacacctacgctcttgctcggagatcctagactggagtgtgcaggttcagaactgcaaatcctctggacccctctgcagtttcccaagagctgggctagggaatgacaggcggggaatcctaccggagtggcggagtccggctgtggcaggcaggccggcaggcgggagagaaatccagttccgccaggtagcgctgaggtatctggccgctgcgctcccctacccggctctaaatagagcctggagggagctcctccctgagctcagggctttatagtgtgtcccctgcagtaacctgagctggtgtctcattggatggaggggatttcctggcctttagactgggctcctggccccaggtgatttgcatattcagtgccacttggcccggatcttagcaggcagtgctgggaaatcaggcccggctggtttaatgattgtcagagtctgtcatcccgcaccctctggggttgggcacggggcactggcctgggcaggtggcgggaacgttgctggggtgggcatctgtgctttcggctgccctctggcccaggaaattcctcccaggggccaggccagagatgggccaggcagggggagggcaagtgagggaacatgaacccctggctgacctgagtcagaaagctgctggcccctaaattccagagattcagcaacaaagaggcctagtagggagaggagttactaggtttaggggtttttcccagaacacccaggactctggccaggggctggaaggtgctccaggctcaatgctgggcaatactcatggattaattggtgctggctgggcctgccagcctagtcgtggccccagggtccccactaaagggctccttctccagcgcccactctgttggcaaggtcttcactaccatcacctgcctggactccatccaagcatcagggttgctgcagtcgctcctgaagagacccggctctgcttgaaagttcttccctcagcgcctgctggagccctccctgccggagttgccagaatccacacgggtaagttcatccctgctctctggaccccatctaatctctggttcactcggcccagttttccagtaccttctgctgccctctagtggtcagaagcctgactacctgggtcacgtcattcaaagaagagggaatgcatagtattaatatatttaccaagcacttttcaacatattctctcatttaatcctcacaccaaaaaagtcctgtaaggaatgcatggttattcccattttatagacatgaaagttgcagtgtggagggttcccttagaatggcttgcccaggccacacagagttggtgaaggggtggagctgagattcacatccaggtatgcaggtgtgttgtacacaaaaccctcgctctttccctgcacaggattcaatgtcttcgggcttcagagtcttcccatccagctccatggccagagcccttgccttccctgtgggcagagtcccccatgtctgtggttgtctctatggactcagcccgaaacacaatggatagtgtcttatagacccttcttgagaccctgaatggggtaatacaggtggttgaggcaggagacttgtagccagcatctgcaactgtgtgatcttggatgagacccttggagtctgtgcttgtttccccatctataaaaaatgaggttgtctgaatttaataatccctaagatctcttccagatctagtattttgtttattttgttttgaggtggagtctcgctctgtcgcccaggttggagtgcagtggcgtgatctctgctcactgcaacctctgactcctgggttcaagcgattctcctgcctcagctttccgagtagctgggattacaggcgcccgctgccatgcccggctttctgtatttttagtagagacggggtttcaccatgttagccaggatggactcgatctcctgacctcatgatctgcctgcctcagcctcccaaagtgctgggattacaggcatgagctactgcgcccagcccatatctagatttttatgcatttgaaatgtaggatccggtggctcacacctgtaatcactgcgtctcaaaaaaaaaaaaacaaaaacaaaaaaatgtaggatctgtgtgacccccctccattaatgcacaacttggggagttcctggccaccctcagccagggtgggtgaaacggttactcaaacaaaaggtgactccaccttctacagatacttctttctttaactctatagcctgaggactaagaaagt

SEQ ID NO: 625 - DNA, 4001 bp, Homo sapiens
gatctatcaaccaaagagatggacaaaccattctgatgaggcatagaactccagaatctttatttaaattccccaaatttcaaatagcaatagctggagaaaaagtgaagtgtgtacttttgactacttcagtcaacaacatccctatttccttccaaggccagttactatcccgccccgaaagatgtttccaattgatcttcccaggaatgaagttaccagcctcgatgcagctgtgcacaaggcggaaagtaaagaggggcggggggccgctggagcgaaagagaaaaagaaatgaaactcgacaccggatgactagcgagctaggggagaggaagaaacgcggacggccgcgtgtgccctacaggagatcaaagtctgggggaagaggtgcaacctcaccgggccttggtaagcactgaattactgtactttcattttccaacttcctgtcactacagaaaatgagaattgctcccctcctccccatccacgccgaaaaaatcgccgccacctttcgcccacgagacttcgggggaccaagaggcgacgagagctgagcggtgcgctgcggcgtccacctgtgcgccgcggtgcccggcgggccgggggcggacccaaggggagcgcgcgcgcccggccccggcccccgcccccacttcctgttgtgccgcgcgcccctcggcccccgcccccgctcccggccggtggggctgtggccgcgagatcccgagggggcgcgcggggctgaccgctcaccgacgccgcgcgcggggctccccctcggtctccgcctcgaacacgatgcgcctctccgccctcagcctcctcctcacgctggaaactcgaggacggcgcggcagccgctgcgacccccgcggcggagccgtagaaggcggcggcggccaagccgagcccgccgggtgcccgcagccgcccgcatctcccgccgccgcggctcctggcgccccgccctccccgcccccgcacgcggcagcggcggcgcgggtcttggggccgctacacgccgggcgcgcgcgttcggggcgttccttgcagcggcggggcctgccaggccctccgcggccgccgccactctcaaaccccccgactgctcctgggtccctcccagacgccgtagtcgctacacgtcacttccgggggaggggctgcgaccctaaggggtgtcgtgagccgcgtctgccagcaaacccgggtttggtgtggccgggggatgtagctcgggcgcctcctggagtcgtctcgccgctctccgtcgcgttcggtgcggttgcttccaggtccctgaggcgcccgtccggaacccgccaggacccaagctgccgcctgggccgggacctcggactcctcaaaggcgcgccactttctcctcggttggagggaagaggtggcgctcgcagagcaacctgcgggggaccacttctgttggtgctaagctttggggagagtctcctccctcctgtgtccctcgtcctccttaccactcgctgttagaagttggggccgtcacagctttctcatcgaagtgccagatcccaggacactacaaacgcttgataaatactaaattagcactgtggctttctagcctggggactgacaaatggaagcgctggagtcgtgggaaaagcttgccctgacgatggaggcagcgaccagaaatccattcgtggctctacccctcactaactcaccaattttaagcaaccttaacctctctaaaacagtcatcatttataaggtggagagaacccaatcttagagttgttgtaatgattaaagaaaataaggtgcatgaaacacctagcaagagtttctagcttagaggttctcattaagtaaaattcttaaggaatcaggtcacacttgatacaagaggctacttgagcagtttagcaccagaaggaatgtaaagtcataaattaggacagctgaacaaaacctccaagaaataaattaggtgtttgtttaacaagaaaccaaagagaggtcagtgtctgagttactggttattcgaggccatttactagctgtgtgacctgtagtgagttgcttaacctttctggacctcagtttcctcatgtaaaatgacgataatgagcagcattgctgagaggattaaatgaagtatagagcataatgtacttagtgcattacctagcacatagtagatacccagtaaatcgtggtgtcatttatttttgcccccacaattgaatgtatagttaattgaactcactgagtgaaatgtgattctgtcatccttttgtaggcttttggaagagaatcatcacttccttgatttccagcctcctcttccataatacagagtaattataatccacaaaggtagctattcctgtaaaaacaactctaccaaaagatgttacctttccaaaattagttttaccaaagcatgcaaacatattaagacatgttttataaggaacatgcagtatctgaaaagcactagcagtcttggcccctaacataaaattttccttgcaacaagttccatcttggaaaccaagaaaaaaaaaagtattaaggtaggctgtttaggatacacctattggaaacatttgtttataaaaagatttcattttaaagccccctaccaagaacagttaagggttgtggagatctgcacactacgctgctctgttcaaactggcagtaaacatctgattcggccttagggccagtagttgtgtcatatcccttttagactgagcttacggcattgtcaattgcagtgtatttttggaaaacagcctgctttgggagttcttaaattagtcatagcaaatctgtctgcttttaaattgacttttttttaaggcggtacatattgacagaagagaaaggaagaaaagtggatttctaattagagaacttgaggggaaaagttaattaatgtgcctggttttcccactcaagattctataaatacacaatctctctccatggttcctcacacaacagatggttctgtttgtgcaaactccatggtagttacgttggtcaaccaaaaagactgctttttcgttatcttgtttggtcactttcccaccagatagatggattcctgatcttagccttagttactcagagccatcccaaagaaaatttgtagattttattacaatgtttatttatttttttgagacagagtttcgctcttcttgcccaggctggagtgcaatggcgcaatctcggctcaccgcaacctccgcctcccgggttcaagcgagcctccttcctcagcctcccaagtaggtgggattacaggcatgcgccaccatgcccggctaaatttttttgtatttttagtagaaatggagtttctccgtgttggtcaggctggtctcgaactcctgacctcaggtgatccgcccgcctcggcctcccaaagtgctgggattacaggcgtgacccatcacgcctggcttaaaatgtttaaatatgtattttctacctggcctgccctagattttgttttttgttttttgttttttgtttttttttttgagacagaatctcacacagtcacccatgctagagttacagtggcacaatctcggctcactgcaacctccgcttcccgggttcaagcgattcttctgcctcagcctcctgagtagctgggactataagtgtgcaccaccacgcccagctaattttggtatttttagtagagacggggtttcaccgtgttggccaggctggtctcaaactcctaacctcgtgatccgcctgccttggcctcccaaagtgttgggattacagatgtgagccaccgggcctggcctagattttttttcttaatcactgcagttaactcagctctgcaaccccttgcccctaatttaattacatttcctatcccaataacacctagttatgatcattacttctcaaggcaacttcctcttccctctctttatttcactgcttcatcattactcccagtcactatc

SEQ ID NO: 626 - DNA, 4001 bp, Homo sapiens
aacagtgaaaggaaggaattactgggaactagggggaggaggcagtttggttgaggcatctgctccccacacatcctgcttgcctgggaagagctgttccacccttcctctccacaccttactctcctctcctctccacagttttacttcctggcctcccttcccctcttcctccacaagataactctcaattccaggtctcttactggagaatcttaccttctcaccaacagggagctcttgaactccgtctcccttcctcacccgagtccctcacctccccagctctgggtctttcttctctccagggattctccccttcaatctctcctctcctgccctctcctcttcccatccctctggacccttcctgaactctcttctccccagggtccctcctgtccctgccaggactctcacctctctgggcccttctgtccctccagaaccttatcctcggattcctccttgcctgtgctgggacacttatgtccctacgattctcctctgcctttcctgggactctcacctccagcctctcctctccagcgctctcctctctcctctcgcagagcccttcctctcctggagcctggctctttgagactcctgccccggcggctccacctgtctgactagatctggcagcagccccgccctctgcccgcccctgctgtactgtgcagggggtggagggtgggtccgggccacaggtcagtgcctgggggagcaggacccaccaggattgggaaagccaagtaaagccccagactcgccacccacccacccacgtgggaccagcctgatgagctaaggtcctagattctgagccagaaacctcctctgaccccagccccagccccagccctggcccaaagcactgctgaaaatccacacccagcatcctctcctaagccggccataactgctcagtttgtcctacttcagaatgggtacaatcactcttcccttcctgggaagggcagggaagccagtggcatgtgaaggggttggggagtgggggaggtcgcaggaatcttcccctccctcagggaggggccccgttgggctaggccccctccccctcagggcctgaaggaatgtcgggggaaggctcccagggacacaaaagcctctggccagacccaggagagcatggtactgacagtccctgagggacaaggcattcttggaacagagcagggcccagggcagcaggtgccccagactccctgcttccagagaagcacctctgcagatgccaagtgaagaggcgcacctctgacacctccctgccccgcacacccctcacctccaggaggcccggcttctttaggcccaccgtggtcaggccccaagcctgcggtccacacccacctctcacctagctctccacccccaacagcgaaggtgccacgccgagggctggcacacacgtctcctgcctgacacaccacgcaacacctccgtgggctgacacgcatggctcccggccctcacgcagctcggccaccgcccaggcacacgcacgggctcacccgcggggccactcacacacgtgtgcgcgctgcctggccacgctcggatcccctccttacttgctcccccaccatcgggcttgctggccgcccatcgccggcagggcccaggccggggcgagggcgccaacacaggttcctccctgacacatgggagccagccagcctgttatctctcaaccaccagcccccaatatcaacccacacacccggcaggccaggagggaccaaggctcctgggaggacctctccccaagctgcaggaaaatctgggtgtgtctctcgtcggggaactcagcccgtcccttccttcctttaagatggatggaagggaaaaggtgcctggcaaagttagggtagcggggggagggaggggagaggaggagggagagaggtaaatgcaggggtggtggaggaaggcccgggtgtaggcaaatgggggccagagacgggggtgtgggggagggagggtgctggcgaggcccggccccagggagctgggacctcccacccactggccccgggaacaccctcgcccacagcctgggcagggcagggcagggctgggccgggctgggccgggctggccaggcagggggcgccggcacgtggagagtccgtggaaggtccagactcacccgtaggggccaggcgggcaacggcggagcgctcggagggagcagggccagagagaagtccccggggccagcctgcctgcctgccacttcctcatctgctgggccgactttctgtcaccagagggggaggggcgggccgcgcggggggcgcccgctgattgggcggccggcagggccggaggccggcagcgcaggctcggccggggcgggggcaggggcgtgccgccgggtcccagcaggaagcgccgcggcccgggcttcccaccccttccctcgccgcccgggcccgccctggccagttgcagcggcctggccacctcaggagcacgctgtctcttcccgacgtgcagcccggggcccggccctgtccccgggtgactgctccccggcaggactgcacatctgtggcggcaggcccagctcagggctcgggggaggttcggccttgccttcaaagagctccctctcctgcagggcgagcgcagagcggcgggcgagaccacactgcgtgtgctgagggcgcactggtcttagcgggagggaagcctcacgagcctgtacacttggaggagccctaagcgttaggatctgctgcgagggctgcctggaacggaggtgagaggatacaagtggcccggggcaagcatagtgaatcactggctaatctggccttcgaggtagtgaaaggaaaaaagggaaatgaagctgactgtggctgaatgtagtaggtcttgaaggccaaatggggcgatctgatttttattctagaagcagaggagaaactaaagatttttttaggagactatattcaagcttgtatcattagttcatcagacgtttatggaccacccaccgtccgtgcactcacggggcttgcagtctatctggctgaatcactttggcagccagtgtgaggagggcacagaaaggagaccaggtgagaaagccagcctgaccaaagaagatgtggcaactgatgggattggaggaggcggacaatgtcctccagacagctggactggctctctatatatttatttatctcttctacacctccagcccccacctccacactcactaactggactcaactagtgggggcaaaggacagactagattttagtgaaatggaatttctacctccagcggcccctggaacagtagcacacaacgatctaacaactgcttgtatgattggatggtgtaagtgcggacagaattagggaatttgggctactctgggcacactgcttatggggcagccctgctccgcaaggaaaataaacacatttttttaaaaaaaggccgggcgcggtggctcacgcctgtaatcccagcactttgggaggccaaggcaggcggatcacgaggtcaggagatcgagaccatcctggctaacacggtgaaaccccatctctactaaaaatacaaaaaattagccgggcgtggtggcgggcgtctgtagtcccagctactcgggagactgagacagaatggtgtgaacccgggaggcagagcttgcagtgagccgagatcgcaccactgcactccagcctgagcaatagagcaagactctgtctcaaaaaaaaaaaaaaaaaaaaaaaaaaggccgggtgcgttggctcacgcctgtaatcccagcactttgggaggctgaggcgggcagatcacctgaggtcaggagtttgagaacagcctggccaacatggtgaaaccccgtctctactgaaaatacaaaaattagccaggcatggtggcgcaagcctgtaatcccagctactcgggaggctgaggcagaagaattgcttgaacctgggaggcggag

SEQ ID NO: 627 - DNA, 4001 bp, Homo sapiens
tgccctctcctcttcccatccctctggacccttcctgaactctcttctccccagggtccctcctgtccctgccaggactctcacctctctgggcccttctgtccctccagaaccttatcctcggattcctccttgcctgtgctgggacacttatgtccctacgattctcctctgcctttcctgggactctcacctccagcctctcctctccagcgctctcctctctcctctcgcagagcccttcctctcctggagcctggctctttgagactcctgccccggcggctccacctgtctgactagatctggcagcagccccgccctctgcccgcccctgctgtactgtgcagggggtggagggtgggtccgggccacaggtcagtgcctgggggagcaggacccaccaggattgggaaagccaagtaaagccccagactcgccacccacccacccacgtgggaccagcctgatgagctaaggtcctagattctgagccagaaacctcctctgaccccagccccagccccagccctggcccaaagcactgctgaaaatccacacccagcatcctctcctaagccggccataactgctcagtttgtcctacttcagaatgggtacaatcactcttcccttcctgggaagggcagggaagccagtggcatgtgaaggggttggggagtgggggaggtcgcaggaatcttcccctccctcagggaggggccccgttgggctaggccccctccccctcagggcctgaaggaatgtcgggggaaggctcccagggacacaaaagcctctggccagacccaggagagcatggtactgacagtccctgagggacaaggcattcttggaacagagcagggcccagggcagcaggtgccccagactccctgcttccagagaagcacctctgcagatgccaagtgaagaggcgcacctctgacacctccctgccccgcacacccctcacctccaggaggcccggcttctttaggcccaccgtggtcaggccccaagcctgcggtccacacccacctctcacctagctctccacccccaacagcgaaggtgccacgccgagggctggcacacacgtctcctgcctgacacaccacgcaacacctccgtgggctgacacgcatggctcccggccctcacgcagctcggccaccgcccaggcacacgcacgggctcacccgcggggccactcacacacgtgtgcgcgctgcctggccacgctcggatcccctccttacttgctcccccaccatcgggcttgctggccgcccatcgccggcagggcccaggccggggcgagggcgccaacacaggttcctccctgacacatgggagccagccagcctgttatctctcaaccaccagcccccaatatcaacccacacacccggcaggccaggagggaccaaggctcctgggaggacctctccccaagctgcaggaaaatctgggtgtgtctctcgtcggggaactcagcccgtcccttccttcctttaagatggatggaagggaaaaggtgcctggcaaagttagggtagcggggggagggaggggagaggaggagggagagaggtaaatgcaggggtggtggaggaaggcccgggtgtaggcaaatgggggccagagacgggggtgtgggggagggagggtgctggcgaggcccggccccagggagctgggacctcccacccactggccccgggaacaccctcgcccacagcctgggcagggcagggcagggctgggccgggctgggccgggctggccaggcagggggcgccggcacgtggagagtccgtggaaggtccagactcacccgtaggggccaggcgggcaacggcggagcgctcggagggagcagggccagagagaagtccccggggccagcctgcctgcctgccacttcctcatctgctgggccgactttctgtcaccagagggggaggggcgggccgcgcggggggcgcccgctgattgggcggccggcagggccggaggccggcagcgcaggctcggccggggcgggggcaggggcgtgccgccgggtcccagcaggaagcgccgcggcccgggcttcccaccccttccctcgccgcccgggcccgccctggccagttgcagcggcctggccacctcaggagcacgctgtctcttcccgacgtgcagcccggggcccggccctgtccccgggtgactgctccccggcaggactgcacatctgtggcggcaggcccagctcagggctcgggggaggttcggccttgccttcaaagagctccctctcctgcagggcgagcgcagagcggcgggcgagaccacactgcgtgtgctgagggcgcactggtcttagcgggagggaagcctcacgagcctgtacacttggaggagccctaagcgttaggatctgctgcgagggctgcctggaacggaggtgagaggatacaagtggcccggggcaagcatagtgaatcactggctaatctggccttcgaggtagtgaaaggaaaaaagggaaatgaagctgactgtggctgaatgtagtaggtcttgaaggccaaatggggcgatctgatttttattctagaagcagaggagaaactaaagatttttttaggagactatattcaagcttgtatcattagttcatcagacgtttatggaccacccaccgtccgtgcactcacggggcttgcagtctatctggctgaatcactttggcagccagtgtgaggagggcacagaaaggagaccaggtgagaaagccagcctgaccaaagaagatgtggcaactgatgggattggaggaggcggacaatgtcctccagacagctggactggctctctatatatttatttatctcttctacacctccagcccccacctccacactcactaactggactcaactagtgggggcaaaggacagactagattttagtgaaatggaatttctacctccagcggcccctggaacagtagcacacaacgatctaacaactgcttgtatgattggatggtgtaagtgcggacagaattagggaatttgggctactctgggcacactgcttatggggcagccctgctccgcaaggaaaataaacacatttttttaaaaaaaggccgggcgcggtggctcacgcctgtaatcccagcactttgggaggccaaggcaggcggatcacgaggtcaggagatcgagaccatcctggctaacacggtgaaaccccatctctactaaaaatacaaaaaattagccgggcgtggtggcgggcgtctgtagtcccagctactcgggagactgagacagaatggtgtgaacccgggaggcagagcttgcagtgagccgagatcgcaccactgcactccagcctgagcaatagagcaagactctgtctcaaaaaaaaaaaaaaaaaaaaaaaaaaggccgggtgcgttggctcacgcctgtaatcccagcactttgggaggctgaggcgggcagatcacctgaggtcaggagtttgagaacagcctggccaacatggtgaaaccccgtctctactgaaaatacaaaaattagccaggcatggtggcgcaagcctgtaatcccagctactcgggaggctgaggcagaagaattgcttgaacctgggaggcggaggttgcagtgagccgagatcaagccactgcactccagcctggagtgcagggcaagactccgtctcaaaaaaaaaaaaaaaagggaattcggagaccagcctgggcaacacagtgaaaccccatctctactaaaatacatttaaaaaaaaattagctgggcatggtggtgtgcgcctgttgtcccagctacttgggaggctgaggcaggagaattgcttgaacctgggaggcagagggtgcagtaagccgagatcatgccactgcactacagcctgggcaacagagcaagactcgtctccagaaaaaaaaaaaaaaaaaaaaaagatgttcataaatg

SEQ ID NO: 628 - DNA, 4001 bp, Homo sapiens
tctccagcatgagctaaaaggaaatctttaatatttgcaccaaaaaataagatatgcatgaagtcttttaaaatcagtaacaagtataaattttgacatggtaagtcaaacttactgtttagctacttacgcgttttttaaatagtatgaaattaaacagtataacacaaaacaagttagtttctggaggacagaaaagcagtcccatcagaatttaatcttacagtataatccaaaagaagtaacaaagcttgtttaccttcacaaattgtgacaccatttcctgaaaatcccatgttgcaatagcaggcttcaattccattgcgtatttcacattttgcatttgggagacaaggtgtcttggtgcaattttgagtataggaacaattcaacaaagtggaaaaaaccactaaataaaatagagaaatacaccttttcaaaaagtaaaacaaacatctctccccattgttgaattagagtataataaacataaattatcctctctttctatttagataaatggattataaatttttcccaagagagcacttagctaagtaacagcacaaaagcaagtaagtaaaacttacttttaagatgaaggctttttttgttccaatttcaacctttatcaagtaaatctcaatgaaactaaaatgtaataaacaactcagctttataataaaaactgtgttcccagatcagtatagcatgttgattaagtgttacccttcattctgaggtgagatactttgaaagggaactgcctgattgtaaagcaatttccctcctctgggagtaatcctgtgtagaaatgaaggtaaattgagtattcaggtttttgcaaattcaaatctgtgttattttaagatgacatcttatctaggagaacagatgcacttgctgtttttttctgtgttctaatgattgttttcaatttcaattgttttcaatttcaatttcaattgttttcaattcaattattcataataaaatttatttcactgtttttattttccattaggggaaatttaaaaacaaaacaaaaacaaaaaaagaaactcaagattatagtcaaagattgatcttccagaaatggaacagcacacaaatgtgaacaaaaaaaaatgaaacaaaacaaggaacaagactatacatcagagttattgaaatacatttggaaattatatgttgtggactgataggaaaaaataaggaaaagtaaagtcggttccttttttattgttttaccaggcctactcaagagtcttgaggaccaacagctatgaagcatgaggtcattgttctgaaaacagtcatctaacattagttgtccttatcaggtaccaagagattcttaagtattctgttctaaatcccagtggcaaataactatgtatactgactaagccggaattagttcaccctcggagatgtcatttactatctttctgcacagtatgttcaaaatgaagctcaaatctggcccggcaatccccttaaaatgccaggaaacctctcatgggtgttaatggtctggatttcccaaatttcttcggggcagaacagaagaaaggtgaaaggggatgctggacacttcctcaagaggaataaaaaggtaacattccctggaccttggaatattcaactttagagttgaaaggtcaaggagaaaaacatcctgagaagtactaaatcaattctcctcggagattttgccaaatacacttgccatgtgagctccacctcttaaaaaatccagtcccctacaagggattggtccctccgacgacctcggcgaccaggggcgctgagcactcacctaggagcgggaggcgtttcattggcggtggccgcagtggtggcggtggcggagagcgcggcggagtgagtgcggctgtggacccgggaccgggcgccgctgggcgggcgcggcagggtcccggatccgtcctccgtgacgcgccggcttcctccggacactttccggcctcttttgtgtgagtgtgtgagtcaagccctgaatccgctggccacgtccggcctccatcccctttccccacgcctcctgggctccattccctgcctagtgaccactgaccctgagcaatgttacagccccactgaggaatcagtttatccccaggcgcagctcccagagtgacaccctaaaagtgagtacttaaaaagcaaaggtctctgagatccacggagagcccctccagagggagcatccaaaactcagtaggtttcaggggttctctctgacacctaaatttcaagacatagccttttttttaatatactcgccaataaattttcctaaagaacaatgggtcaagaagtagtcaggagacctgaatccatgcaaaggggcatgccagtgctcaggccccaccttgctgggactcagggttgcatcgtgtaaaataaggatatagtctattgtgtctaggttagattgtgttttccattatcaactcaatttcaggtaaaattcacctgtagcccttccttacatctgcagaaaaattggtgcatcatatcctttgcatgttaatatacaagtcgattacgtagaaagagatcgtccacattggaacatggaaacaattctagcttaaaaaattaaaaataactggcagacaaaactaatgtatcatgacagaaaatagatcaatggttgcccagggttgggatgcagaagagggactgactgcagaaaggcacaaggagaaattgaggtgatgataatattctatattttgattgaggtgatggttgcatgagtgcatgcatttgtcataacttatccaactgtattcttaaaactggtgcattttattgtatataagttagatgaattgtattatatgtaagtttaaataaagttgatttaaagaaaggaaatgactaatatttttgccatcaacacaagccattttacctttcaatagtcagatcacctttgtcacataccatttctattctgtttaaaaagtgactagtgcaaatttactttatataaagagcagcctcagaaagatgaacagccacagcccccggactccagggggattatgaactactgggaaaacaactaaaactagtcacaatcacacaccacaaagtgacttatatattaacagcagtcacaagtgcttatgtattgacacgtttatctggctctccatagcattttcccagactccttctaggtgaatgtgggcaaaagttcctgagagtggcaccataataggtgaggcaaatgaggaacaaaggtgttgcgtgacttgctcagagtccacagcagctcttagacagctggtctaagtgactggccttgattggaacccggactataaactcacagtccatgttctctatattggactttttttgagacgctttttttgagtggctttttttgagacggaatctcactctgttgccaggctggagtgcagtggcacaatctctgttcactgcaacctccgcctcccaggttcaagcgattctcctgcctcagcctcccgagtagctgggactacaggcacatgtaccatagccagctaatttttgtatttttagtagaaacggggtttcaccatgttgtccaggatggtctcgatctcttgacctcatgatccgcccaccttggtcccccaaagtggtgggcttacaggcttgagccaccgctcctggccacaaatgggcatttttgacgaatttcattatgcactattctagaaactcttaatttatccaatcaatcagcacattttcaaattccatatctatcacactcgggcactgaatgaagtgtcatggagcaaaacaaaacaaaacaaaacaaaaagccaaaaaacaaaactttattcctgaccttcgagttctaggagattaagaaccattaacagacatcacactcaggaggctgttgcaagaatgaggagtcatcagatattgttattcggggagtttgaaaaagtgatttaaaa

SEQ ID NO: 629 - DNA, 4001 bp, Homo sapiens
gagggcatttctcaggatgtattcccatcattaagtgatgcatacctgtatgtcttcatttatttttcaatctgaaaactgtaggccaggtgcagtggctcacacctgtaatcccagcactttgggaggccgaggcagccagattgcttgagcccaggtgttcaagaccagcctgggcaacatggcaaaaccccgtctctacaaaaaatacaaagaaactggagaggtgtgcaccagtagtcccagctactcaggaggctgagctgggagggtcacttgaacctgcaaggtcaaagctgcagtgagccatgatagtactgtactccagcctgggctacagaatgagtccctgtctcaaaaaattttaaaaagtcttggctgggcgcagtggctcccacctgtaattccaacactttgggaggcctaggcgggtggattacctgagatcgggagtttgagaccagcctgaccaacatggagaaaccctgtctctaccaaaaatacaaaaattagctgggtgtggtggcgcatgcctgtaatcccagctactcgggaggctgaggcaggagaatcgcttgaaccccagaggcggaggttgtggtgagccatgagatcgcgccattacactccagcctgggcaacaagagcaaaactgtctcaaaaaaaaaaaaaaaaaaaaaaaaaaaaagtcttaaacagagtccttttcccccctcatcagcctaacctggccctgggctcagagcagagctgcccaagacactaagcagttaggaaatgccattcattcattcattcattcatgaaaataaaattaagaaaattgcatatatcaagtattctgcaaaattagatacacatatcacccgatatatatgtgtaacatacacatatgacattgtgaacagttgtgcacatcattaaaaatgtaacatgttttatttgtcacactgtctggcataacaggtactcaacatatatgcgaatcaacttttccaagacagaaaatacttcagaggaggagaaatctgacctgggccctgaagaataaagtgtaaatagcaataataacagataacgcttaatgactgcattcaatgagccaggcattgtgctaagtaatttaatgggattgtctcattcattctcacaagtactgtaagagataacggactgttagtaaacccattctacagacaaagaaaccaaggcacagagtggttaagtcactttccccaagatcacacaagtcttaactagtaaaattcaaacaaaagcaagctactccagggccttaaggaagacgtgggtgggtgaatgaatgaatgagtgaatggcatattctagctgcttagtgttttgggcaatcctgctgtgagcccagggccagactaggttgatgagaggggaaaaggactcagtttaggacttttaagacgaaagctcctgttcacttgcctacaagacaccaattcgagtaggaattaaagttcactgacagcttggcgacctctgacacctggtagaccagaaacctcacagtcaaaaaaatcgaacctgacgagggaggacgggatcagtgatctctgaccggcaccccaagcattcctggatggcagggccggcttacacgcaaggatcagcttagaatgacccctaacacttggtttaaggctctgcttccaacgactttaaatccttaataattttttaacaaggggccccacgttttcattttgtactgggtcctgcaaattatgcggccaatcctgttaagtgacaacctttagcaggtaggagacaggtactggggaaacagccacttatctctcgaatatgttccacacgtacgcaccaatcaaacttgcccacttggtcttcgtagaccgcggccgcaggaatcagcagcgtagcccaaagccagaaacgagaagcccactcagccgccatgatgcgagcgcatgcaccacccaccgccgtcccggcatgcaccgcgccgcgggctccgcctccgcgggaccacagagctgggatagcgcgcgaggccctcggtcggacgggacgctcgggattcagggactgcctcggcacacgggaagttgccctacaggcgcgggagaaagcgcaggcggcggcttggcagggagaggcaggctgcagtgcacattgggtcaggcacacgcgaggggcagcccccgagggccgtcccagagtcccccgcgccgccggggtcctaacggggtgcaccgtcttccgccgcacgtggattcagcgcgatgcccaaatccaagcgcgacaagaaaggtgggcgaagggggagtcgggaccctggggggagctccgtgggctggctacccagcctgcggtgagggcttcggggcggcgggggcgcagattggaacgccaggacatcctcgaggtgttccgctgcctcgctgcgagctggaatgggggcttcggggctgtaaaaccgccagaggtggctgacgcccggtcgggtctggggagcggagactcgttttgcctagtttcaggtgctcttgcaaggccaactgggtcgggaggcagctcctgaacaccgcccccggctatgcctgctgccgtttcggcccacttttcccaacttcggccctttctcatcttcctgcgctcccgccaccctggctgcctttcccttctttcagcacaggtttgttcccgtgtctggcgttgtgtgtctgcggttgtttctgcctggcatgcttacatcttcgtatggtttgcgccttcttagttgtcagttaataggatccctctgagacagggtctcgctctgttgcccaggctggagtgcagtggcgcgatcgtaacactgcaggccggatgcggtggctcacgcctgtaatcccagcactctgggaggccgaggcgggcgaatcatctgaggtcgggagttcccgaccagcctggccaatatggtgaaaccccttttctactaaaaatactaaaaattagatgggcatggtggcaggtgcctgtaatcccagctacttgggagactgaggcgggagaatcgcttgaatccgggaggcggaggttgcaatgagccgagatcgctccactgtactgcagcctgggcacgacagagcgagactccgtctcaaaaataaataaataaaataagtcactgcagccttgacctccttggcttaagcgatcctcccacctcaacctcccgagtagctgagactacaggcgcacgccaccacacccagctaggttttttttgtttattttttatagagaagactcagtgtgttgccaagctggtctcgaacacctgggctccaaccaccctccctgagtgctgggattacaggcgtgagccactacacccgacttgcgcacctcttaagagaccgtttttgaccacctttgctgtggtggcctctctcttaacccggctccctggaatattcaaaaatatttaggggtctggcactttctaggcgttagaggatacagcagtcacaaggaaagcctatttcttatcgagcctaacgttttaggagaaacatattccgcaaaatgctaaaaatcagattgaaaatggggtgaagagatgttgatattttgtatagtgtggtcgggaaaggtctcactgatgaagtgacaaatgagcagaaaataaagaaaggaagcgagcaacctgtggaattgagcagctgtggaattatctgggagaatgctgttccaagtagagggaacctgaagtgaaaaggctctgaaatgggagcagatatgacgtgtttgggacaagaggccagtgaggctggagcagaaggagccaaatagagtttggggagggagttaggcagagagggcaggacttcctcggccttggcaaggcattggctttcctgcccaggtgaagtgagtagcagaggacccatgtgatttacctttacttatgaagggtcactctggttgccttggtgagaatagttggggaagacagggca

SEQ ID NO: 630 - DNA, 4001 bp, Homo sapiens
ttcgtatgctataattactatttaaactcatcgcttatatttgaaaataacttgtgtgaaatcatcaagggaaaaggggtcagtcgcctagagacaccacattaaactcactctttaaggccatcataaatacaggtaacttggaatcagaaaaaaaaattcaaattcacagtaagcctaagtaaaaattcaacaaagatatatcacaatatatatataaaagcaaaatggaaacacgtttaaccttgatagaaaaaaaaaatgaaaagcaaagtttaaaatggaaactaccgaaattgagaaagaattccaatgacatgacattttcttgccaaagcgaaggaatttgtagattatatcattcaaatctcattgtattacattataaaggtcttagcaacggttggccattaatctttaacacaaaggagattcaaatccaaatgaactgtaagactatctcttccaggagagagaaatggagtaatttactttatccacaattgtttaacccaaaaggaaggcctttaaggatgataacgcagaatggatcagccttcagtctaccaagtcccatttcacacgaagtcttgcaccaatccgaaaagagaaggttatggacacagaacaggtttaggaaaggctggaaaaaaaatctccaatgaatgacacaccacatcacggtttattctcctacacaatttgagaaacaataaagaaaaatatcataccatatgtttcatcgtatcaattaaaaaaatattttacgacagtacattcaattcttcggggccgcaaaaataatttagctcctgttttattgagtacagagcaaagggaaaaagcagctgctgcaatgcaacacaggctgctacagagaaaggggagaaaaggcttttccaaacagatcccttccccgcccccgcttacacacccctaccaacttacttatcccagtcttttactgcccccaccacgtgaacctaatcaattctttcccttcccccaccatcgtgaaatttcacctttcacagctccttcacctacccctaccagaggcactttattacccgcagagatttcagacctttcaaacttttcttccttttttaattaaacacgagagttcggaggcaaaagtgcatgaaatttttacatatatacgaaaaaatacctgtttcccagcaacacgcacgcttcgattctcgaacccctccccatctcccgggtttcgcttgcaaaggcttgggggagggagccaggcgcaaattaaatttaggaagggaaatcctgggtgaaagaagagcatttgaggaaaaatgagagaacgatgaagcgagacccccaaaccacacgggttggggaggtttccaagaaagaaagagaaattggaagggacaaaaggcggaggggggaggaacagaccggagaccaggggagacgcgccgggccgggagagggaaggcggggtccgaggagaacgggggtcgcggctcccgcggcacaatggcccgcccggcccccgccccgcgcgcccctcacctcatggtgccggcggcgcagaggcttccccaccagccgggagacgcagaaggcgccgagccgaggggggggtctctcctccaggggtggggagcagctcggagacgggagacaagtgtccggctcctccttcggcggccagggggctacaccatctcctcgcacaaagccgaggcgccggccgggagtgtgggagaagagggcgagagaaaggctggggagggggcggagaggccgaggcgcggagctggtccccaggcggccgccgcctcccacctcctcgtggtcctgctcctcctcccggagcttcctcggccgccctctgaggggtgcccgccggggccgcgcgcccggccgccgctccacaggcccgcgctcgccgcgccgccgccgaggccgtgtgcaaccggcagctgctgcagccgcgggaggagagtcgggatcgccgcgaggaacccgggaggaggcggggcgcgcggcggaggaacacgcaggcgccgccctcctcccctccttcccccgggggcgagggggcggtgcggggggaggggaggaaaggggaggcggggggccgggcgcactcccccgcgccggcggccgggcccccgccggactgcggagagcgaggctgggagagagcgagcgcgacggcggcggcggcggagagaggctctttgttgcctccctaccccgccccctgcacccctctgggattcgggcgggccaccacccccccctcccgcccaacacctccggccagttgtcggccggggttcctcgcccgtggttgtccttgaccgtcggccccctccccgtcgcctcccgctccccagaggcttggggagctccgaggcctcccccacggccacggtgcggagaccgaggcgccgagacctcctgggcgccagacccgtaggcaccggcgtggggagcttggacgcgtgactgggcacagggccgggccaggagactccgggtcggctcgcggccgggtgccctcgcgcggggcgagtgctcagcccgccctgttgcggtctcaggacggggatgagggaatcggggggcatcccggtcagcccaactgcccgccctcgccgcggctgcgcccagcgattcctgcggagttgaggaggggcatataaatggaaaatatggtcatcattgttcccttcgctccttttcttcccgaggaatcccagcgtgctgcgccgatggaacgagttgatgtgcacactaggtatagggatgacttcatccccaaacgaacgcagccgactctcggggaaacgcagtcgccgggagacgcgcgcggaacagtgtgttgccgcaagagtggaagaagagaaacgcagccagtggagccgctttccagcgtcattagcaaagagggaatcccgggcagggggcggggagagagaggaactaatgataattttaaatttttcgtcattcccaatggtcttgaagtcacctcccttaaaaagtagatataaaatactggcgaggcaatttcatttcaagtcaagtcggggaggagggcatccaggaagccagaattgatcgttgttgaaggttttgttttcggttttttttaaatctaaaaacaaatccaataataaaatttttaactgtacgaattacggcccccttttagtccggaagacagggatgtactttctgtataaaaggtgaggaggatagaaaagggttgttgctacagggatcctattgctgaaggatctcatccaaaatggaggacctaccatgactccaggaatccattcaaaagttttggtgttttgttttaagatgcaggtaccattcaaaagatagttaggaaggttgggataatgtacacttccaaatgaaaagacaggttatagtgatccgtggtcaatgcctgatttgtctataattgaactgtgtagcccatttttaaccataaaaaaagcttcctggtttcagccgggtgcggtggctcacgcctgtcatctcagcacttcgggaggctgaggcaggcgaatcatctgaggtcaggagttccagaccagcctggccaacatggcgaaaccctgtctctactaaaaataaaaaataaaaaaacagccgggcgtggtggtgcacgcctgtaatcccagctgagtcaagagaatcgcttgaacccgggaagaggaggttgtagtgagctcagatcacaccactgcactccagcctaggtgacagagcgagactccatctaaaaaataaataaataaataaataaataaataaataaataaaattcctggtttcagagctcaataccgagttattttctttttggaaccggcagccttagaccaacagccctatagaagcagtgacccggagctatggcagaggatcaaggtggcctcaggtagtagaaagcatgatgcctctgccttaaacatggtgtacttgaagaacgctaatttcca

SEQ ID NO: 631 - DNA, 4001 bp, Homo sapiens
gactacaggcgcccaccaccacacccggctaattttttgtatttttagtagagatggggtttagtagagtaggatggtctcgatctcctgacctcgtgagccacccacctcggcctcccaaagtgctaggattacaggcgtgagccaccgcgcctggtcgatttttgtattttcagtagagacggggtttcaccacgttggtcaggctggtctctaactcccgacctcaggtgatcctgaggaggcccacctcggcatcccaaagtgctcggattacaggcgtgagccaccgcgcccggaccattcacagcttttttagctgcctggatggaaccccgaattagggacacggtaaatgaatggagcagtcagggcccgggtgggcctgaaaggcaagtgaagcaatggaccctaccgcccagagaagcgcacagagcaggggaacattgaacaggaagctttcttaaaatacatccttcttggcctagcgcggtggctcacgcctgtaatcccagcactttgggaggccgaggcgggcggatcacctgaggtcgggagctcaagaccagcctggccaacatggtgaaacaccgcctctactaaaacaacaacaacaacaaaaaaaaaacaaaattagccgggcgtggtggcgcatgcctgtaatcccagctactcgggaggctgaggtaggagaatcgcttgaacccaggaggccgaggttgcggtgaaccgagatccgagatcgcgcaattgcactccagcctgggcaacaatagcaaaactcaaaaaaaaaaaaaaaccaaatcagatcaggcccgatttttggtggccagccggggagccgctcttgcccaacttgggcgaggtcgcctggaggacttgccaatgatctaacggctctgctgtaggttcctcaagaggtgccttctcggagttaaatgagtcaccgcttactaggcagaagcgcgggccgcgagcgcgggcgagaggcgggggctaccggtgggggagggggccgcagcctcgtggccatctccactatcgccgccctcctccattttaggaagggcctggcctgagtggccaccgccgctaagtctgcgtctatcccaaaaaccttacacttggctacgatggaaaagcaacttccactcccaactcccgctgtgctaagcagctcgcgtgtgcagctcccgaccttccctgacagtgactcggccccgcagtcggtaatcacgtgttgatctgcactttcccctccaaagaaatcgggggcccagcacgtgcgcctggcattgcgcccccgccccgggcctcggggtgagcgggggcgccagttcccacccagggaggcggcttgcacgtgcccccgaccccgccacgctgggcctgcgggcgcgccgcctccctcggagggaaaagagccccacaagcccagaaaagccctgcgccgcctgcccgttgctcagcccttccccaatcattacctagccactgggtctcgtcgcctaggagaggaagcggagggtgctgcagacaccgaggtgaacgtaaagccggcgagatctccgtgctccgggtacccacagatactgtccgcgccgcccgcgccgacttcctgcctagctaaggcgagccccacccacttcccgcctccggggcacgccccctcagctccgcctcgccattcgtcgggagagccgtcactcattccctcacctcccggaaaggggtgggactgcgacggctgcagtagcgtggaaaggggggtgacgtcccgcggacttgaggcgggcagatctggggggccccgactccccagcggccctgtagtggtgcgggcgaaactctggccccagataggaccggtgagccgaactggggtgtgcggagccggggctccgggggatggcccggggcggcgtggcgggcatgagagctcggggctccgtcacgtactccgagtcccgcacgcactcagcgtcgctctggggccccacgtccggccctcgaccttgctgacaactttggcggcccgggcctgccgcggccctcctgccccgcccctcctgcctcgcgccgcgatccgagagaccccgttggcgtcgagtcgttgagaggctgcgcgcctcggccccactccggggttggggcgctggccccgccgcagcgctgcgtgtccggggccacgtgcgccgcctgcgcctgcgcgctgccctccagccgcgcccgtctggccgggctccgcctggcacccgccaaggtgaccctgtccctttctccttgctgcggtgagaatcaggccgagacagccaaaggaaggttcactttcctttaattctacctcatactttttgagtgccttctaggtgtccggcgcgcccccacgtgcttccccagtgttaattcattctctctctagtccatgtcatgttgcctctcaaattttacatccctctcattcccatctagggaactagatcaaacctacctggattcttgtgaaccattcatgtgaattatttggaactggaatttcacacagacccggggaatttctcaaagttcaagacgggtcatattccgtggaatacggaaggagttggagtgatttcacttttctgatcaagaactgatagccattaaaactcagctccgcaatatatccccccactccaagggagggctgagatgatcacttcgttttctgttacggctacttttatatttttcaacattactgctggtctgtaagagaactaaaacatctgattttcctcatttccttgtaaagaggtgttcaaatatgtacttgaatttaattatttcttctggtcagctgcaaaacctgcttttcttccttaacccctagcatttttatcctcttagctacagacaggtttccatggcgttggttaaaaattaaggcctattgagaccatagtatttgctttccagtgagtaagaagcaagaactttaggattaaattcagcaaaaagaaaaaaaaaaagagtaaaattttgcaagcagagtttgtgatttcaccagcaacacactaacgtttttggctactgaaaaccactatccccagccccatgactcagcagctaaatcaacagccaacatctcctactggtaaggactctaagaaatcaggcacttggtactctcagagcaattctaaggcgtggccctgaaagggctccaaacaatcttattttacataaaaatggttagagagataaagatactctgctgtggccagaaccagtaaatctagcaggaaatcagaggccgaacatgatcccggactgctgccgttgcaagattcttggaggctgcagcgccacattctgagccagcacttcgacctcacattgtagctaaaatgttaatgattactagagatgtcctgaaatctttttcaaaattcacaggctgccaaatgccctccctgtttccatagctccttaggctttgttagcaggctgtggggttcacatttgcttgtagtcagcacaacggcattgcatttagttattatttctcacttgctgtaagcttgttgagaagttttattggtggtgggcaggtggggaataactgtccaaagctatcagaataccacaccttgaagcactgtaggtaacacatgcatggtgtctgcaggtggccgggatcaagggagagtgaatctgctacgacctgtaactcgcttggattactgattctccctgtgatacgtgtgtaaaaatcactggtcagcttgagaaagggatctttgtgaaagagggtctccagccagatagggaacttcagggttggataaggagctctggggaggtaagataccagatgagtgcagaaggggatgtagctggatggtccctcctcataacagatcatgaggttttggtattcatcactcagtatttcacgtacaccagagactacataaagcgtatataaatctctgtgtacccacatcccgcttaagaaa

SEQ ID NO: 632 - DNA, 4001 bp, Homo sapiens
tgagacagagtctcactctgttgcccaggctggagtgcagtggcacaatctctgctcactgcaacctctgcctcccagcttcaagcgattctcatgtctcagactcccaagtagctgggactacaggcgtgcaccaccatgcccggccaatttttgtacttttagtagagatagggtttcaccatgttggctagactggtctccaactcctgacctcaagtgatccacacacctcagcttcccaaagtgctgggattacaggtgtgagccactgcacctggcccggagtgtttttagacaggggttttcaaaccagtcccatctgatgagcgccacaggaattacggagggacgggccgaagggagggtaaatgagataaaacctgcagagtcgggtgggttgctgggtccccagccctacttcacctccagcagctcttttatgtttgacatactgagatttccagattttacttaacaggaactccactgttaaagtcagtagaattatagtaaataattccaaagttcatgagaaattagtcaccatggacactaccacaaacacccctgagagccactcttaaaatctggatcttaatttcttcaaaggtccagagagttgcaggggggaagaaacctcagggctcgaagtgtctcattcttctgatgcaattccatctgctcccaaaagtggggtgaggcagcgggcaggttagaattatgtcatgcatggattgttctcgtgcgtgacagggaatccaataggcttctacagctctcagaataagctcttccataaacaggaaagcccctgggcctgggagacgctctggtggcattagacacattagttatcaggaggcaggtcctaccttgctaaccagggcaggcgcaatagttttattgatgtgctcaacagcctttgagacacctggaaggaacaatcaaatcaaattactgacattaactttaaaacaggcttgagcagcattgttagagagaaccactgttgaggccgacgcggaagcccaccaagggaccttctgtgggacctcttccccctctcccctttccccccagaatcggaggactttccggcccagtctgagtgctcctacctaggaccccagagggttagagccacacaaaacagcagctggctcagaacgatctgactggaggttagtttgcaagaccatgcactggaaacgccaactgcagactaaaggctgttcaatcagttacctgagtgcacagggctggtgccaggaactcattaatatacttaatgggtctggagacgcctgcccagcagaggatgaagaaggaaaaatgagagagactcagaagagaaccggtgattaaggactgcgagtgagagacagtgagggggcaggaaagcagaggagagcatttcaggggccatgcgttcaatcttccacaaatgcttacttactgagcactcattaccatcaaggcacagcatcatcctgctccggctaagtccccacgtacgccattaaacaacggtcaaatggtaacatgttcgtgtgtgtagagtgcttcttacagcattaaagcgggactgaacacccagcaccaccactgcgacaccagcccagtgtttcacaacctgatttcatcattgtcccctccctgcagcctttttggagttttccgggtgccccactgagaatgcgtgatctagccctatgtgcttttctgtaatttggccacatgttctatctctagaaaggtcaatgttgcacacacactaagtcaatttgaatacagccagaggctagctctgccacagagcagggctcctatgagtcagtcaacaggaaaatcacactaaatgacacacctgcagctcaccattcagggcaggtcattggttagaccttccctggatcctttctagcccgtgaagaggctgatgatctctggagggcccacagaaccctcctgggagatggggaaacttttctttagttaacaggccctgttctcatgcttgggttcctgtcctaaccgtgaaggagtatttcgcagattgggaacaaactgcaatagaagcaagcattggaactctcgacccagagcatgcaggctcgggaaccccggaatccacacaccaactttcctgtccacaaggtggtgcactgcttccatcaacatcatgggtcacagcaggtttacctgccataaacctgcaagtgcaagtgccacccagagaggacaggactgggcaaggccaggaatggggctggaagcagggaggccatgggctgtgggttctaaggcttacccttccccatatagcgagtcttatcattgtcccggagctctagggcctcatagataccagttgaagcaccactgggcacagcagctctgaagagacctggatgagaggaaaaaagatgtagtagcaattcagaaatccagttccagcacaatcccaagtcccctcccgcccacagatgcatttgtcattagggagctgtttcttcctcctaccagctgtgtgaattaaacgctctgggctgttcttcatgcctttcacatgtttatgatcctgtactgcagaacttactgcaaagatgactaattcctctagcagaaagaaagtgttctacagcagagcctacatgccacctggaggtcttgttaaaatgtagattctgacccaggcaaatatgcatccctcacaagctcgcattggtgccctgtggattactccagcagcactgcccaagagaaatccaatgcgagccacacagggcattgaagacgttctggtactttttttttcttttgagacagaatctcgctctatcccccaggctagagtgtatggcgtgatcttggctcactgcaatctccacctcctgggttcaagcgattctcctgcatcaggctccccagcaactgggactacagcagcctgccaccacgcccggctagtttttttatttttagtaaagatggggtttcaccatgttggccaggctggtcttgaactcctgatctcaggtgatctgcccacctcggcctcccaaaatgctgggattacaggcatgagccaccatgcccagacaggtactatattgatgttaagcataaaattagggtaatttaactggctcaggaggagtatctagctcatttgtttcagtttggacaatgctaaatgctattttaggggttctatgcccaactggaaactggcaaacaggatggatgtggggggaaggaataaagataataaaatgcgcagtttaataaatgtaagaactgaaccaagtaatcttgcagatactgaaaccagccatctggtgaaacctatacctgtaacaagggcaatctttggtggaggcaaaagaacagatggtgtcaaggaagatgttgcagagaaaccaacaagatatttctagcaaaggacccagcagtgttccctgctgcactgcagtgtgcgctatcaacaggtcatacttccttcttgaaagctgccctggctccctacatatccaccctacactggatcaggcaaagacaagatgaaaacaagaggcttggagtctacagacttttggtgatgataacgtgttcacgcatgttgaccactctagtggggatgctgacaatgggggggctgcgcatgtgcagaggcagtgggtactcatgggtttatgtacctctgcaccttccgcctgcttctgctgtgaacctaaaactgctctaaaaaagttgatgagacagggagagagagagatgaaaggttctgagcaagtccatcatttcatgttttttgaaaaggattaagacacacaagagaaagttccattcatttcaatttcaaaatgtccaactcccaacaatcttctagcatctggggtcttttgttgcttaaagttcattaatatccaagtagaaagttccacccattgactaagcaaaccactcttactggatgaagggaattcttggcatcc

SEQ ID NO: 633 - DNA, 4001 bp, Homo sapiens
aaagactgagaaacaacagcttctcacatctgataacaactatactatcaacttctcctggaaatccacccacttgtaaatacgctatctctactctgctgttaaagctagacctttgttaaaatccctaaagctcaagatgactattgtgagagaaaaagacaagctgcttctcacacttcacccaaggaaccagccagggacctgtgcgtattgggctaaaggtaatactaaacacaatactttaatcacagagtgggccatatcactcagcacaaatgctaagaaagacaaagagaaaaaagcagggcttctggtgatagaggatgagtagcagggttccctaggctatcctacatgtcacatgagaaattaaaaaaaaaatagtttggggctgggagcagtgactcatgcctgtaatcccagcactttgggaggctgaggcaggtgcatcacttgagctcatgaattcactacccgcctgggcaatatgttgaaaccccgtctctacaacaacaaaaaatagtttgctaaatgtttcctccttatttttttctttcttttttaaaattgctacacgacaaagcagttccttctttattcaaggtctaagccacctgttaggtctccctgtggaggcggctagctatgtggccttctccaaagatctccacctgagtaatggcacagccttgcttcaacatttccacaaatattatggtagcaagctgataaacagagaggaaaatgatactgtttttaacctcaggaaaacaaagatacagtaggctcactagtatttacccaccagttttcatcaaaaaaatcaatacctaccctggtggtgcagggactctcactactgtagtcaatctcttttttttttttttgtggtccctgctgccctttagtgactttttgaaaagatatgaagtcaacgtatgactctttttagtggaattatattcctttctcttggaaattacgcatagatataacaccaagtgtatttaatgagtacctgaacccagtactaaattttaaaagtcaaatacaaaccccaataaggggtttatttggcgttagtgtttccatcacggaatcgcaggtgcactaagtccctgccttggaagtctaggggaagagagaagtgtctttctcacgaccctgtcggcgtcttttccaagtttaattaccatgattctgtttggaactctagccctcttcaatattgctgggtcctcactgaaggtgagcaatagaccatccttagctactaaaataggtctcttgagaaagttgccgccttaaactagccattataataactacacttctcccctcccccaatactggtttttttttaaacgtctttacctcgacccctatctttgcggattgaggctgcgggccccagcccggttgctgggtcacttacctctacaaaccaataacacacatcacacccaagaccaccagccatcccctttccattcaccgtctttccaaccacccgccccacgtccatgctcggccaattatagcacagcgtccaaggtttgagcggtaggcctattggccaatcaggaagagtacagtactgagtgacaaacgacccaactaaccagcgccaaagcagcatgtcgtgttgaagctcacccagcgtgacgcaaaaagtggccaacccctgcggagcctgagaccatggcgaccaatccgcactggtgggagaccgtctcccgccccatcacggtctccccagctcgcccgcccgcaccccttccacttcacctgcttctcctcgccggtctcctccgcagggttctcttcttcttgtttctgggacatggcgggaccgggactgtggagtgtaaggggcccgggaaggcaaccggagaagggaagggggaggggaaacggggacaacctgcgctgctgcttcggctcctgtcactagggttgctcagtcaaaatggcggcccttgcccgtgacgttgcgaccgccccttcctatgagagccagtgggagtgaggtagatagggcaatgacgtaacgatctaccaatagtcgccgtctaaaggtgggctctatagaggcgaccggcaagctggaacaccaacctggaaagagagtgagccacaaggaccaattggaagcctgtgggggatatcgggggcggggctgctggctgtggtacttttgcagctttggtgggctccggcttccttcactccagcccaccgcgtccgagagacttagcagggcgtcaaactggagagcggaaggatggaaccttttattctcaggtggagaggattaagctttgcggtgttagcagaaaatgatcgagctccagaaaatgatttggaggtcagattcgattttaaagtagtactaacaggccgggcgcggtgcctcacgcctgtaatcctagcactttgggaggccgaggtgggcggatcacctgaggttaggagttcgagaccagcctgaccaacatggtgaaaccccgtctctactaaaaatacaaatattagccgggcgtggtggcgggcgtttgtaatcccaattacttgggaggctgaggcaggagaatcgcttgaaccctgcaggcggaggttgcagtgagccgaaatcgcgccactgcactccagcctgggtgacaggacgagactttgtcgcgaaaaataaaataaaacggtaccaatggtattacgatgtgtcacttggcctgtggaagagagagactgagtctcaacccgagctgtcttgcaaaacactaatggcttacgttccgtagtttcactcttatgtgtagtttttatattccatcagggtgatcccttggggactacgctccttgaaacaaggaggacagtgtaagtatgtggtaaacatttggtaaatacggttaatactagttaacctatccagaattacagtttaacatttcctgggcgtctgtctgtatgtggatggtactgtgttagttggggggggtacgtgtatagtaaggcagtctctgcccttagaaagcttacaggcctggctgggcgcggtgactcacgcctgtaatgccagcactctgggaggcgtaggcgggcgaatcacttgaggtcaggagttcgaaaccagcctggccaacatggtgaaaccctgtctctactagaaatacaaaacaaggctgggcacggtggcccacgcatgtaatcccagcaccttgggaggccgatgagggtggatcatgatgtcaggcgatagaaaccatcctggtcaacatggagaaaccccgtctctactaaaaatacaaaaattagccaggcgtggtggcgtgcacctgtagtcccagctactcaggagcctgaggcaggagaatcgcttttacctgggaggcggaggttgcagtgaaccgagatcgcatctcgccactgaactccagcctgggtgacagtgagagtccgtctcaaaaaaaaaaaaaaaaaaagagtggcagataagaagtgctctttatggagataatttggtggtaatgaataaaaagactcagaattccaagcagaaaactaccagagatgaacagtctagccgagtcctctgcaaacgttaggtgggagataattaggatttaacctagaaacgtagtagttaagaatagaaaatagtgaacctaaccaagagagtctgtgacaatggaatccactagactagcagctgactgaatagagaatgagaagactgtgtgcctcaaggtgattatttatagaaacaataaattcaagaagaggagtcaatttgggaatggagctgaaaagcagagagaaaataaggcattcagttttgaaaacatggacttttttttttttttttttttttttttgagacggagtctcgctctgtcacccaggctgtagtgcagtagcacaatctcagttccctacaacctctgcctcgcgggttaaagtgattctcctgcctcagcctcccgactacaggtgtgcgc

SEQ ID NO: 634 - DNA, 4001 bp, Homo sapiens
taaaaagtgcacaatcctaaaacctccaacattcaaacaggcaaatgcctgggggcagtctgcatttcagtttctaacatctttccctcatttccccacacacccaaatgctccaatttaggccttaatttcctacatgggaaatcaggagggaattgataccacatcagggatttacattaatttgacttgctcttttcaaatttcaaattcgcctctacttctgttcaacaacaaaacctccagaaaaggatccagtagaacctctacagacttcattcgaagaacctcctttagctccaaagaaagagggtaagagactatgccccatacccctttctggagtctcttcatgaggaagtcggagcctccaggcttttgtcctaggcttgggtatttggcctttagctttgcctcttcagctctctcaggcagaataccttctttctcctgcgtgtcctggagaaaacaaatgagccaaataaaattaaagactgagaaacaacagcttctcacatctgataacaactatactatcaacttctcctggaaatccacccacttgtaaatacgctatctctactctgctgttaaagctagacctttgttaaaatccctaaagctcaagatgactattgtgagagaaaaagacaagctgcttctcacacttcacccaaggaaccagccagggacctgtgcgtattgggctaaaggtaatactaaacacaatactttaatcacagagtgggccatatcactcagcacaaatgctaagaaagacaaagagaaaaaagcagggcttctggtgatagaggatgagtagcagggttccctaggctatcctacatgtcacatgagaaattaaaaaaaaaatagtttggggctgggagcagtgactcatgcctgtaatcccagcactttgggaggctgaggcaggtgcatcacttgagctcatgaattcactacccgcctgggcaatatgttgaaaccccgtctctacaacaacaaaaaatagtttgctaaatgtttcctccttatttttttctttcttttttaaaattgctacacgacaaagcagttccttctttattcaaggtctaagccacctgttaggtctccctgtggaggcggctagctatgtggccttctccaaagatctccacctgagtaatggcacagccttgcttcaacatttccacaaatattatggtagcaagctgataaacagagaggaaaatgatactgtttttaacctcaggaaaacaaagatacagtaggctcactagtatttacccaccagttttcatcaaaaaaatcaatacctaccctggtggtgcagggactctcactactgtagtcaatctcttttttttttttttgtggtccctgctgccctttagtgactttttgaaaagatatgaagtcaacgtatgactctttttagtggaattatattcctttctcttggaaattacgcatagatataacaccaagtgtatttaatgagtacctgaacccagtactaaattttaaaagtcaaatacaaaccccaataaggggtttatttggcgttagtgtttccatcacggaatcgcaggtgcactaagtccctgccttggaagtctaggggaagagagaagtgtctttctcacgaccctgtcggcgtcttttccaagtttaattaccatgattctgtttggaactctagccctcttcaatattgctgggtcctcactgaaggtgagcaatagaccatccttagctactaaaataggtctcttgagaaagttgccgccttaaactagccattataataactacacttctcccctcccccaatactggtttttttttaaacgtctttacctcgacccctatctttgcggattgaggctgcgggccccagcccggttgctgggtcacttacctctacaaaccaataacacacatcacacccaagaccaccagccatcccctttccattcaccgtctttccaaccacccgccccacgtccatgctcggccaattatagcacagcgtccaaggtttgagcggtaggcctattggccaatcaggaagagtacagtactgagtgacaaacgacccaactaaccagcgccaaagcagcatgtcgtgttgaagctcacccagcgtgacgcaaaaagtggccaacccctgcggagcctgagaccatggcgaccaatccgcactggtgggagaccgtctcccgccccatcacggtctccccagctcgcccgcccgcaccccttccacttcacctgcttctcctcgccggtctcctccgcagggttctcttcttcttgtttctgggacatggcgggaccgggactgtggagtgtaaggggcccgggaaggcaaccggagaagggaagggggaggggaaacggggacaacctgcgctgctgcttcggctcctgtcactagggttgctcagtcaaaatggcggcccttgcccgtgacgttgcgaccgccccttcctatgagagccagtgggagtgaggtagatagggcaatgacgtaacgatctaccaatagtcgccgtctaaaggtgggctctatagaggcgaccggcaagctggaacaccaacctggaaagagagtgagccacaaggaccaattggaagcctgtgggggatatcgggggcggggctgctggctgtggtacttttgcagctttggtgggctccggcttccttcactccagcccaccgcgtccgagagacttagcagggcgtcaaactggagagcggaaggatggaaccttttattctcaggtggagaggattaagctttgcggtgttagcagaaaatgatcgagctccagaaaatgatttggaggtcagattcgattttaaagtagtactaacaggccgggcgcggtgcctcacgcctgtaatcctagcactttgggaggccgaggtgggcggatcacctgaggttaggagttcgagaccagcctgaccaacatggtgaaaccccgtctctactaaaaatacaaatattagccgggcgtggtggcgggcgtttgtaatcccaattacttgggaggctgaggcaggagaatcgcttgaaccctgcaggcggaggttgcagtgagccgaaatcgcgccactgcactccagcctgggtgacaggacgagactttgtcgcgaaaaataaaataaaacggtaccaatggtattacgatgtgtcacttggcctgtggaagagagagactgagtctcaacccgagctgtcttgcaaaacactaatggcttacgttccgtagtttcactcttatgtgtagtttttatattccatcagggtgatcccttggggactacgctccttgaaacaaggaggacagtgtaagtatgtggtaaacatttggtaaatacggttaatactagttaacctatccagaattacagtttaacatttcctgggcgtctgtctgtatgtggatggtactgtgttagttggggggggtacgtgtatagtaaggcagtctctgcccttagaaagcttacaggcctggctgggcgcggtgactcacgcctgtaatgccagcactctgggaggcgtaggcgggcgaatcacttgaggtcaggagttcgaaaccagcctggccaacatggtgaaaccctgtctctactagaaatacaaaacaaggctgggcacggtggcccacgcatgtaatcccagcaccttgggaggccgatgagggtggatcatgatgtcaggcgatagaaaccatcctggtcaacatggagaaaccccgtctctactaaaaatacaaaaattagccaggcgtggtggcgtgcacctgtagtcccagctactcaggagcctgaggcaggagaatcgcttttacctgggaggcggaggttgcagtgaaccgagatcgcatctcgccactgaactccagcctgggtgacagtgagagtccgtctcaaaaaaaaaaaaaaaaaaagagtggcagataagaagtgctctttat

SEQ ID NO: 635 - DNA, 4001 bp, Homo sapiens
caacctccgcctcctaggttcaagcgattctcctgcctccacctactgagtaggtgggattacaggcacatgccaccacacccagctacttttttgcatttttagtacagatggggtttcaccatgctggccaggctagtctcgaactcctgacctcaagtgatccacccgccttggcctcccaaagtgctgggattacaggcgtgagccaccgtgcccgacatagttcacttttaatagtgccaaagatatactgtacttgtttccccaggtgtatgaataatatctatatttaccttaattataagcttcttatagaaagcacactgaattaactactttgattctaaggcaatctggtgttcagttattacatctatttttgaatctgccatttattgagtgcttactgtacgccagatagcatgtacgctacatggattatattaataacaccccaaaccaaaaattttacaactggcgaagaactgattacactttcaatttacagaaaaggaaaatgaagagtacatcaagtttccataaaaagtaggggttagtgctacattaacaaaactgggacgggaagaaacatatacgggctatatatcctgcttttgattaaagggatcaaaccaactaaaatttttgccaggactgagaatacagaaaacaacaatgagcaacagcattgactacagtacatcctcaagagagtataaatccactataataatatccaagacacaagacacaaccatttcttgcaattttccctaaaaacagaagggaagaaaatagcagctgtgaaatcacccagactacaaaaaaaaaaaaaaaaaaaagcatctgaaaaaaaaaaaggaaaaagaaaaaactatctcctaatgaacaactacatgccaaaaaacaagtctccacagactagtcatttatggcagggtacagggtacagttaaagaaacaacaggatgacagtcgctatcatgtggccagaaaccagtccatcagcaatctgtttcacgtgagatcactttttctcaagagaatgcctgttcttggggagcatgacctgttttggcaaaacctccccaggaataatggcctgctggtcaatctcggagggcgagcccagacccggcctctccacaggtacagcagcccagcgagcacggaggaagatttccaagccgacagatgcgcgaactgaaaaaggaggtcacgacgctgagagaatagatttaaccctctgctcgctgggaacccagaagactaagggggaacatgtttttcaatgatgcaggcgtcggtggcgggaaggcctgcgaagtcttgccagggctccctgcagtcctcagattccgcctgacttctgcagacagcccagctccctcgccaggaagaaatcgctccgcggctgcacgcaacaccttcaccgtctgaaacctgcgattctccgcatttggtttcctcccgaggctcctgcacaccgcaccgtgattgacgcacccgaggggaccgtcaaaaatacatctcaagcctaactttccaacactcccgcgacgcaaccccttcccctttcctcagcggctctggcccgcccctcgctcctcgggccgcgtcccggctggcgactcggcgtgcacacgaggctcctccgcgggagagcccgcgccccggcccggggcctgtcgggggttgcagacaaagaggctgcagcgccgccgcggccgccaggaccgtccccacggggacagctccacgcccaccgccccggctcccgcgccgccgccgccgcctcgcctcaccggtggctccggggccgggctcctgcgcccgccactgctgcagcccgacgaacaatggcaggaggaggcgccggcgtccgaggctcgggccctctgcggctcgcgggcccgccggctgctgctggctgactgactaaacgcaccagcggagggagggagcgagcgagcgaccctggcgcgcgccctcccgccttccctctgcgaggcgaggccagcccggcccgcagcccgcccgccggcccgcgcccctccccctcagttcgccacaacattgtagtaaatttctattgggccgcgccggagggaaggagggggccgggcccgcggcccgtccgcccattggctgaggccaacttctagctccccttgtttcccccctcccctaggccggtaaggagaggagaggggaacgaaaaagagagaggaaaaggcaaggggctggccgcgtgtgcgcacgcgcaagtcgaacccggtctggagccggggtgttccgggatcccgcagcacccacgtggggcatgaggcagctagagccctggacggtgaggccctttcctccttccaagtaagaggccgagatttggaagcctcagggaagtaactcgcgtagaggttgtagccaggctaccccaactgactccccctaaacgcttagtgacctcgggtaagtcactcagcttctctgtacctcagtttccccatccactagtttgactgtctctaggcgcccttccaaccctgacattcgatgagactttacctctcgtgccagctgtgtaaggcctgaaatggaagctaagtgttgagaccacgccaagattgaacctgtcttctgcatttaaggatctcctaattcccccctggcaatctcaacattataaagacctagcttccgaggtctggtctccagatgaactgagggttgctctgacaattgcttagtgtgtctttatttccttccagaagtgtcagagaccccttgacccttcctactccctgctaggctggtctgtgaacaggcttcggacccacagtgcagaaagaaggcttttgttttaagcatgatacctagaaggtaagataggatctggtgttctattttagagatgaggaaactgaagcagagagacttaaaactgacaggataagaagccaggccatctgacagcagagtctgtagatgccagctagacattcctgatatctaatcacagccccttcacgatcccagcacagcctctggaaacagattgcctgggttcaattcttagtctccagccttttctaatggtttgattttcatttttcttttatttatttatttatttatttgagacggagtctcgctctgtcaccaggctggagtgcggtgccggaatctcggctcactgcaacctctgcctcccgggttcaagcgattctcctgcctcagcctcccgagtagctgggactacaggcgtgtaccaccacgcccagctaatttttgtatttttagtagagacggggtttcaccgtgttagtctcgatctcctgacctcgtgatccgcccttctcggcctcccaaagtgctgggattacaggcttgagccaccgcgcccggctgtgcctcatttttcaacaccataaaaggggataatatgtccaagtagctgggactcccacctatagtgggaggctgaggtgggaggattgctcaagcacaggagttcaaggccacagtgagctaggatcatgccattccactccagcttgggcaacagagcaagactccatccctaaaaacaaaaacgagggttgggggagggagaaggataataatagttcccacctcacagagttactgtaagaattaggccaggcatggtggctcatgcctgtaatcccagaactttgggaggctgaggcaggcggatcacctgaggtcaggagttcgagaccagcctggccaaatggtgaaaccccatctctactaaaaatacaaaacttagctgggcctggtggcaggcacctgtaatctcagttattctcggaggttgaggcaggagaatcacttgaacccaggaggtggaggttgcagagagccgagatcatgccattgaactccaggttgggtgacaagagcaagactccatctcaaaaaaaagaaaaaggaaaacagaattaaatgagttaaaatatgtaaaggacttagag

SEQ ID NO: 636 - DNA, 4001 bp, Homo sapiens
ggaagggtcaggattcaacccagttctgctgtgtgcagagcctactgggcactggatgtcccctttcatccctccctctgctcccttcagcttctggctccctttcttctcaagcctcctacctccttgcgcaaagtttctcctggcttagaattaataattcccggcctggcgcggtggctcacgcctgtaatcccagcactttgggaggccgaggtgggtggatcacgaggtcaggagatcgagaccatcctggctaacacggtgaatccccgtctctactaaaaatacaaaaaattagccgggcgcggtggcgggcgcctgtaatcccagctactcgggaggctgaggcaggagaatggcgtgaatccgggaggcggagcttgcagtgggccgagatcgcgacactgcactctagcctgggcgacagagcgagactccgtctcaaaagaaaaaaaagaagaaataataattcccacctcacacctgctttaacgccttatttacagtgatttccgaagtgtctgtctgacaccccggagagccttcaaggcagggagtgttcccagtaggtgctccttagacttgcgggtctgtcattctatctccaccctcctccccaacatgcagaagtcccttgagcctcctcctgcagatcccttccccacccagcctcctgccaagaccatcctccaggcctgaaactgggtggaggtagggagcttgctgaagctccggggcgcgtgccagggctctggcccctccccagcccctcccgctccccttcaatagctgaggacctgaccctgacgagacactaggcagctctcacagggactcccagttgccctaagcccagccccagccaggttctgtccaagcctcctccttctggaggaaagggctccagaggcggagaaggggtcgtccgttcccggacccaggagctaagggtcctagaatcatcttccccaaccctcctctctcctccccactcctggagcgagctcgggctcgggttggtctggacaggtccctgcctccaactagctggagaggaggggtcctgtcccaccctgaagaggtggggcctgccgggaagtgtaggtgagggcgagacaattcttgaggaaagacagaggacagagacaggaaaagacagcaaaacagagacgacagatgagagatacagggaacccagagatgagagggaacctgagcctgaaccggacagagagacccgggagacccagacagagggaagtcccctagaccaagcctggcagggagggtgtggggctggcgcgacggccgggggggccaccctggcgggcacagccggcgccccagctggcgggtcggttcctgggtccggaaactcaaagtcagttacgtaagggccggagcggggcgcggggctccaggccccggagccccctcccgctgctagccgccagcccgctccagcgctgctgcgggcccggcaggagcatgcggggccgggcaaggcggggctagggggcggccgggggctgcgccgacctgcagggactctcccgcggacaccgaatgcaggacccccgccccagacagccaggaccggccggacccggacgtgtctagctccggatccgagctcccggaccccctctccagactcccacgcccctccctgcaccctgaactttaagatgcccagactcctttggaccccaagttcggattctggaattcgggaccgctggacccctcagccctggacccttcgaccctggtctcgcctctcccgggacggtccgagcccttgggggtaggttcttctgtccctaaccccgtccctcccggggaccgagggtcgccccccaggtggtccaggctcacctgggctgggtgcggcggggaccgggccgaccgcgttctggctccgcgccgctctcgccctttaagaggttcctgccactttgccccgccggggcctccacctgcactgacagggcaactccatcgtgaggccccgccccgcccgctaggccctctgattggcgcaggcaactgccgatcagcggggcggggagggggaggcccgggcagaggagtgcgagagtcgcagttgggaaggggcgggggctgcaggtgtagcctcgtccggcggggacactgagccgggggctgctttgatagaccccagaggtcaggggagggaagggcagggagttcctggattgactggtgtgacgtcatatgacaaaagtgtgaagcaatttgacacgtggtactgctcctaaggttactaggtagaggggttggtcagaggggatctagggaagtgaccctgaggagactcacctggatcgcctgtcctaccacttcgtccggcgtgaccctgaacaagtcacttctctggatctgaatttcgtcaaccataaatcttacaatgttttcctgagaattagcgatgtaagttaaatgtcaagcataggtctggtacacagtaggcgttccgtaaaagcgagttctggatcctgtcgtgcccgccttgccactcttctcagtgacttttcccctcctgatggtccactccatcaacgcttccatggtcactggccgaagtctcatcccctccctcccatttcaggcctgagctggcttacatatgcccatgtcaggaagctcaccacccggcagaatggcctctttcattttaaaactaaccctgacacttcaaaagctcttcgtcacagaatcataggatcatagaatattccaggccagagcaccgtggaaaactaaccctttctttggacaaatatggcaaactgaggctcgctgaggacaaagccttcctctgaatgtagtgatcttcctactaaatggggtaactagacttcctgtgttccaatccccaacgctgccacttcctaattgagttactttgggtgagctactaactctctccaagccagtttcctcctctgcaaagtggggttaatgaaagtattttcctcaagggttgtggcaagaattgaatgaaagaatccatgtcaagtgctaagaacagtgccagtcccagggtaagcatgcaataagcattagcatttattataattattgatgttattgttatattgatacataactgaattaaaagtcatacattgactgactctccccccctccaaattcactgaggacttctctgaatcaggtcctgtttgaggcttcagggccctggttcctgccttcaaggagcccataatctagcagaggagggtcagactgagccctttgactggggagatgttttctgatggagggaggtgggcttcaagggactagagaagtgttggatccttcgaccagaaatcaggacacttgagaccctttcagtctctatccctgtgaatcccctggggaagcctggtgcgcgagcacacacacgtgcgcacacacacacatagacaaccaggctcccaagcacattgatgtacctttcacttgcctatatcacacctgcccaccagacagtattgcccaggggttacgaggtagggatttggaggcaggtgagtctgggttttgggctttggggcaaggcacccgccccccaccctggggtaaaatgagattaataatagtgctaactttatatagagctgttgtgatggttaaatgggagtatgtgaaaatatatttgcaaatagtaattaatctagtagtattttttaattcctctcacgtgtactcttgcacccaggagagtgcaggctgtgaaatttttgatttggcctctgcaaacagtggctcctcccccaaccccatccccacccctgactcaatcaaagggctagggagaggaaaaccccagcagtcaggtggatggggtgattctaaagagctgctgtgggccctgccccctccctgctggggcagccacgtggctctagctctgttgggctgagctgcctgtgggtgactcagcagtgccagtgcctgccccagcc

SEQ ID NO: 637 - DNA, 4001 bp, Homo sapiens
agaagcccaaagccactttcactggtctagagtcaaggtgtcagcaggactgttttcttttggaggctctgaggggagaactcatgtccttaccatcttcagcgtctggtggccgcctgtagtccctagcttgtggtcccctcctccatcttcaaatcacatcactttaatctctgcctcagtcatcacactgcctcctcctctgactctggctcctcctgcacccctcatacaaggaccattgtgattattgggcccatccagataatctaaaacaacctctccatctcaaaagatcactaatcacatatgcaaagtcctttttgtcaattaagctaacattcacggttctagggattaggacattgacatattgggggtgggggtcatcattcagccttctacagggtccatggcaaatactctaaggttggctctcagattgggggtgggagtcagtgactctccccagccttcttaggttcccaaaattatagctaagagtcaattagagagagagagagagagaaagtgagtagtgaatgtatcaggggattcctgtatataccccccaatccactcctactcaggggcttttctgaggtcggtggtccccaggcatgaagacttgaacatttttagactgactcccgggcctctgagaaaacaatgtggagagatactgctaacaactggagaaataaaatctctcttctcctcagccagcccttttcccaggggctgtcacttccactgcttttgaaagaatgtctggggttcttttatgtatacatctatgacccttcctaccagagaagcttgaagtccctttattcccccaggaggcatcggatcagcagcctgcaacctctcagcatggatcacagaaaatggtttggacagcagagtccgcagaccagagacaggaggtcaggacaccccggagtcttgggagattaccctctggagcttaaaccagggggtgggccaccaaggtgagggcctctccagaggcgtcagcgactgtgggcaggaccgccgacggctttccgagatccgcgcaactgacagcacatcggaatcgcgaactggaaggcatcagccatccagggcccagaccaaccccgcggtcaacgcctcagattccagctcctccggattctgcacctagatatgacgcctctggattcaactgagcgtatagctcccctaaatgcacaatcagaggcaagacgcgggctccagtatcgccgacagcctcaaacccggcaacgcggagcgcgcccggcagactacgctcagaattcagcactgcggacagttccatgatcagcacgtcgggcagcgcccggatccagccccctcgaccagcattccaccttctgttggccacactgtggtctcctagcccctgtagtccgggctccatcccgtctccccatattccgagctcacctccgcatctccctgtctccactcttcatctccccgcccccgcacctcccacctccaatcactcagcttgtccgtctcaccggccgctggaccgccgcctctggctcccgcggttcctggcctctttctttcccaacctcccgggtctccagcccccaagctcctcagcgcccctctcttcgctactgcttgatcacatttttctctgtctctccagttctttgctgcctgcttgcttcaagccccaatacagactctagtctctccaatgactccttcccccagaacccccatcgccagccccctatcttttggtatgccacgctccgagcagagctcaccagtcttctcaccttcctcggcggtcccaggccgccagggtcccaaaagcagcgcgagacagagctgcatccggcagaggaagaggcgcagcgggtgtggaccggcgcaggtctccatggtccgcagaccgagctgtcagtccggcggcggctcaagccgcgccagcctagcaccgctgagcaatgcccccagaccccagagccagcggggggcggagtctcaccgctcaccatcatccatgggaaccaatcactaggcaccgccgcgggatgccaaccaatccccgccagcagagggtgggaaggtggagtttcataggccaggggcggaacacccaactggtggggaaaggaaggggtcctgcagatctccaaaccgtggggggtggggcagctgtgggagctggcagggcttctgcgagaggggaatgagctggcatcggtggcccagagcgctaaaccttagctcctcattcctgagaagtaggcaggcaaggtgggcttggcttaaggaggggcgaccctcggggaggcagcaacacttgcagcctctgagctagtctgaaagctcccttgttcccaggacttgcggggttttgaagctttatgtcctgaccccaagctctggggagctctcctgtctccctgccctaggtctgttcctgtgtctgaggctcccggtgtctcctagctcatccccccctttctcttcccgccctcatcacacacacacacacacacacacacacacacacacacacacacacacagcggcaggaaggaggggccgaacgatcccgggagctgctcgggaaaggagagcaaagtgagggacggggtcctgccctaccaacgcgcttccgaggctgggaaaccatgtggacgctgggatgggggcggtggcggttttgcatgaacgatcggttcctcaggttcttgctcctgctgtcaagatacaagcagcacacctcacaaccacccatgccctcagtctgctcagagtcgggggttcccctctttgatcaccccactccgcccaccccaggggactggtgaacagcacagaggccaggaatcggagacatctgcgagagaggcggagcaatcctggcagagttcagccggcgctgaagaagccgcaagaaaacgtggaacaagacctctgtctagtgaaggtcatttatgtgcaagctgagggtttaacactttggtggtgggaagggttggggccctccaggacgagggaggcggctactgagcgccaccatctgggctgaacttgaggggagaaagctccacccacctcgtggcttttccgagctcttttcttgggggacccaccccctctctatttggaagcgaatatagcctgagaaacctcgagagtgagtgtgagtcctgtgactacttggcccctgcggtctgagtgtctgtgcttttgcatatatgtatccctcacccctctacccagccctcactgggcgccatgctctgtgctgcggatgccctggtgaaccacgctgtctctgccagagtccatacctctttgaacgccgagtgtaaggaggattcctggcatcgtagatcactggccatttacaacccgctttcatgtgccatttctgcgtgtgtgcttgtgtatatgtgcgagtaaatgcacacgtgcccactcagacatacttgctggacagtagcaataggaggagtaggtgggaggaattggtcttctttacctgcagaaagaaaggtcatcaggagaggctgtggcttggacaccacaggagacaagccccctgaggaagcagaaggaggtgtggcatccctccagtccttggatgcaggcgggacttctaaaaccagacctacctgaggaagggttctcacactgccacctcctttccatcttcattctcctcacgctcgatttctcccctccccctgcctccacctctgggagatggtatttttagaagctgcttagagacccaggactcctttcatttcaaaatgagtcctcactccaccacccctcactcctctttaaaaccgggttccatccccttagcaggctctaaggcaccaatcatggcttcttactgaagctccagggacttcagcccagaggttctgaccctcggtgctaaaacaaaatacagacttcctctgaacctgacaaggatctttcagaaaccaaacagatggggg

SEQ ID NO: 638 - DNA, 4001 bp, Homo sapiens
tccaggcttccaggccagcttggggactgcagcagcaaagcacccgcctaatcccccacccccccatgggcagccgaggagaaaggcctatagtgattccagctgtctctccccttctctccaaccacagtcccccaggaagggggaggaccaaacgttggtggggcggatattgagggtggcagaaatccttgccatgagctcctgcaaccagaagtcccggttgagaccccaacccgggccctgtcactccagagactgagacaggatgccacccccaacacctgccactgcccaacggctccagatccggcctcttttcctcccaacacagaacagcaaaacctccaaacccagtttgggaggcagaaaaagaaggaaacaggccgggggtggtggctcatgcctgtaatcgcagcactttgggaggccgcggcgggtggatcacctgaggtcaggagttcagaatcagcctggccaacatggtgaaacctcgtctccactaaaagatgcaaaaattagacgcgcctggtggcgggcacctgtaatcccagctactagggaggcttgagacaggagaatagcttgaacccgggaggcagaggttgcagtgagccgagattgcgccattgcactccagtctgggcaacaagtgcgaaactccgtctcaaaaaaaaaaaaaaaaaaaaaaaagaaggaaacttctcaccggcccaagtttcctcccggcttcccccttgtggagcctgcggaaacctcgctctgcccaggcaggaggggaagccttgccctcactgttggaaattgaagctggcctgggctgggtggacaggaaggtcttcggccagggcaggagcccccatcctcgccctgaccctagcggagggacaacacccccaccacgcacccgctgcgccatgagcaaagtctgcggcccctcactcggcgcggctccgggaacactggggcgggggtgggtgattcagtcccccacccccgggtgtcctgactccctggtggccctgggctgacagctccacaccttgggaggccgcacccccacctgccgcatttcctcgttctgagtcacccttgctcagaacgcttgactttgggacttcctgtccgcactcgcggcccctaacctgccccgggagcccgggagtgcggcttgggaaggagggaaaggagtgtgtgagcagggattggcccgaacctatctccacgctctcccccgggactggaggtgaaggggggcgtggagaaaatctcagggaacaggggcttcgacagggggctcccgcccgcccgagccccctccccaaaatgcgaggcctgcacagtatgccttctccgcaaaacctcggcaagcgggttagtgaattcaggtcactaagaagctgagcccgcggaaagctgcccaaacacccccttctctaggggactccccacgccccccgccgggacgcgttcccgaagtcgccgcctggactgcaaccgcgtggcctgcgccgcgtcctcttctccgcagcctccgaggcccgtgcgaccaagctgaaaccgcttattctccggagcccctatgaccccgggtgggggccagggctcgcctcgatcgcagcccgtgcgccctccggactccagttcgccgggactgggcgacaccaggtaggttccaaagttgcgcgcgtcaaggagcgccgggctctagggggcactggggcccgggggccaggggtccagacgccgcgcgcactcaccttccttgccctgcgccgccgcggccgcggccagcgcacagccccacagcagggcgaagcaggcgcgggctgcctggagctccatgccgcgcttctcgctctcggtccgatccccccgagcccggctcccgcacacccgcacgcctgcacgccggcctcggtgtccgctcccgcccgccggcctgcgcgcaacttctgcccctcctgccccgagtccttaatggaagttgggtgagaaccgactcctgttcattcatgccctgcgtgacgtcaccaacgcccgccctcaggaatgtctttaaaggggccgggctggcacccggaggagagggaggggaagtccggaggggtttggaggaggaccttggggccctctggactcgcgggctccccgcaggccttccaaagtttgagcgtctcaaagcgccagcgcccctacggattagcccccagggatctctgagcctggtatcctcggtggaaacgtttaatggttttgcgctgagccatacccattctgcccttcacctctgagactgagctcaatgcgactgagctcaacgctggcctgaaggtctgagctgaaatggattgggggtccaataagcagttgcctcctaagcagcaggcctgagagagtggcccagaaatagacctggatgccctccttcctaaaacccttgaagagtatatcaagctgctgatggtcaaaaagagtatctctgttcagaagcctataagcctactatgatctgagaataggttcatttcctctgggaatggatcagacatgcactatcttatttattaataattctcatctgggaggcaggggtcatcatccccatgttacagaagaggagactgaggctccaagagcagaaacaacatgcccaaagggtgcacagctcacgggtagtagaagcaggatttgaatcctggtggtctctgcttgaaccactgcttctttttggggaagggggcaaggggcacccctggcccccgaccctggcatgggttgataggttttgacagtttggaggacacctgcctaccacctgccccttgataaggcctcttcacaaaacttcctcagacatgagctcatctcccttcctgacagaagcggctagtgtgagtgaaacaaacgggaaatttgctctggcccgcctgcccagccacccacggctgcctgttggccaatcaccatttgaccagtccaggaagagcaactgtggcaggcctgatttcctgggaggccccagactccctttgcctacctcttcctctctgaccccatcctcgctttgatgcccgggacctgctacccaggtacgtgggtcttctctgccggatgtggacatcttggcctctcgccttggtgcctactcttgggaagcgggtccagacatctctcctgcaggaagagaggaagggttaattacaggcgttggggataattaaagcctttgaccaagaggatgggaggagagccttggtcctctgagagcctgtgagtgtgcaagtgcctgtgagaataagtgcatgtgtatgagggtgtgagattttgttgaatgtgcattcgtgtgtatagacatgagagtgttgatgtatgtatgactgtgtgtgagtgtgtgtatggacataagtgttgtatgtgactgggcagggtggctcaggcctgtaattccagcactttgggaggccgaggcaggcagatcatttgaggtcaggagctccagacatgcctggccaacatggtgaaaccccgtctctactaaaaatacaaaaaaattagctgggcgtggtgccactcacctgtaatcccatctactaaggaggctaaggcaggagaatcacttgaaccccagaggcagagattgcagtgagccgagattgcgccactcactgcactccagcctgggccagcaagactctgtctcaaaaaaaaaaagaaaaaagtgttggtatatgtgtgtataagtgtgtgtgcatgggcatgagaggatttgggtatgagtgtgtgtctgtgtgtgtttttgtggattgtgtggatgtgtctagatgtgtgtatgagtgtgcatgtgggtgtgagagatttgtgtatgagtgcatgtgagtgtggatttgtgtatgcatgtatttgtgagtgtgccatacttcacagtagatgtggagtcagcccatgagtttctgaacaagttatttcacttttctgagcctcagtttgctcctggaaag

SEQ ID NO: 639 - DNA, 4001 bp, Homo sapiens
tccccttccctccacccaccctcagaaagccgtcttctcgggtgcagctcccagggccccaaggcctcttagattccaatcttgccccctttcctactccccagcaccccccaaccccagacctctcctggtgccccgggaacctgtgccttgttacacccacccggccctgctctgccggcatctcacttctcggccaccctgccgtgcctctcctccatgctgggccctgggctcatgggagactatgattttatctgtgtctgtgtgtgtttgttggtgcacatgcatttccgtgggcatggatgcaaacgacgggctccttacatatgtggtgtgatgtatatatgtagacacagagttgcgtattttcatgtgcatgcatctgtacgtgcatgtacatgtgtgtttgtgctcatgcatactggcttcatttctgtgtgtgtggctgtggatgttatgtggggtggggagactgaccgcacatgtcagtctctacaggcctgggtcacaagtgtgaatcccaagtagcctgtgtgtgtgcttgtgtgtagggtgggccctcggtgagctgtgtgtgaagggcagatgtgtgatctgtctgggcgtggaagagcagcaccagctccggagttcgcttacacctggaagttcatcttggcagggtgaggacccagctctggtccctggacatcagccctgggagcctgcacagagacgctctggcttccttggggcagagctgtgggaacagaggagggtcagggcaggggttggggtgtggggagtgggacccagggaaacctcctgagctggatggagctggggtctccagggagctaacgggtgtgtgggtggcaggcttaggtgctccctctcagctcttcttgtgcccccaccaccagaagtcatttcccagacctttttggtcccaacgactcagtgcacctccccaccccaatccttcctcccacacagggccccagagtgaccctgccatcccagccttctctgacaagactttgctctccggggcctgcctgcctcaatctctctgtggcctccccatcccccagccctctcctccccaagccgctcccgctgcccacgaagctgcctctcctccagctggaactcccctgccctcccttcttctccccagcccgtcgccagactgtggccctcgggccctgacccctctcccagactctcattccgcacccctccttcctgcctcccctcaaagccagtcctgctctccggggtcccgtttctcagcgcctggctcctatctctcaatgctgtccccaccccctttgccttctgccctctgaacctcctcccccattctcctgtccctccaaccccagtgcctacccccctgtcctctgtccccaaccctgttccttgccctacctcactgtaccctctcctccttacctcttctcttgtcttctgtccagtcctgtccccttgtccccggcgtccgaccctcagtattctgtccccagctgcacatccctcagtcctgtctcctgtcctttcccactgtcccccagtccccggtacctgtccgtcttcctcaagctcgcgggttcccatctccaccgctctgtcccttaatcccgggtctcttccgcggtgccaccccgccccccgggccgagggatcccggccgccttggagctcagggtccatgcaaaggaagttgagccgcaggcagcgcgcgccgcgccccgcgcccctcggccgcccctgccccgccccgccgccgccgctcaccttcgccgcgcgccgcggacacgcaggtggccgccgccgccgcggccgtgacgacccagagcgcagggggcaggcggccccgggcgggggccatggccgggccgggccgggcgggcgggggcgccacgcaccctcgggcttggccgctgcggcccgcgcgtcgggagggagcgcgctccctcgctctccgcacacccggccgggcgcacaccccggcgcacacgcggctcccagcgcacacgcgggcacccgcgcccgccgccgccgccgccgccccgggcgggggccggcccgtcacggcgccgagccaatcagcaccgaggcgggggggtgggggacacggagcccgcaccgcggccacccggcccgcggccaccgccgccgcacgtgcgcacgcccacactcccccggcgggcaccttcgggggcgcgccccgcgctgcgcacttggactcagggctcagggccccagtgcgcgaagccaccatcgggacgtcccggcgacaccaggaccagacccacccagggattccctctgtggacacacgcgcgggccgcacatccaccgcatgctcgctcctgcccgcatgaccccaacaccgagtgcttcgcgtggtgacacactccgatggatacacactagttcatgggcagaggctcagagatgggctcagcggcaaactcagaggcacttttaggtgaaaaaccaaaaaaacaccaaaaccaaaactctctccctttccccaccccaacaacttggcatttagggaccacgggattttaaggaggccttagattgcagtggtcaggagggcaggctcagggaccaggaagacaagtgtcctgctgtgtggccttaggcaagtttcttaagctctctgagtctaaaacttcatgtctgtaaaacaagaataccagtatcgatatcctagggtggcgtgaaagggcccaggtggaactcctggcagacggccgggcacacagccaggtggccggtcatgggagctgttatccagtgagggggactatcattccctgcttttccctcccctgaccttccctgtctccagttccatcccccaggactaggggtctcatccagggatggctttgggctgtgaggggaggacagggatatagggctgcatcctggggcctgctctgccaccctcaagtccctcacacacctggtgggccaagcagtccgagaagcaggcaagagacctgcagcctcctgagagggtggatgcccacgggagcaagtgcctgattgcttcccactgccgcctggcacagaccatcgtccagtcccctcttccttcgttcccagctctcatggtcactggggggtgaggagaattggagccatggctggaagttacataggatgagaaaggccatttggggaacatgtgccctgagtcagaccctgctctaggggctttataaactcgctccagtttaagcctcacacagccttgcagggctggcacacctaaggaaacagaagctcagaaaggccatcatttgccttagatcacacagctggttgaatgctagagaggtactcagatccacagctgcttggctccaacgcccgtttctttcctctgtgtctttttttttgctacagaaagggggaagacagttccataggagccccttcctcgcagctcaggtggactgcctcactgatgtagtgagactcctgtgaccagaggcatttaagcagatactagctagaaattgttcagagatgctgtaagagggcaggtgagtacaaagcagattggactagacccagagtggcaaactcaaatgcctacatgagataggcaggcacccttacagagcctgctaggagagtgtacccagatccagccaacattgctggtggagatgtgtgtccagttttctgcattttcaagaaaaagttgtctatctggaacttatttgtgttacgtcttgatttttaaggttggcagctaatgtaaacattttaataacaccatagtgtaggcagacctgtgagtagggtggccgtagcccacaggcctccgggctgtgcttcaaggctcatcagatggaagaatccatggctgggaactcactcctggggtgtcagagaagtgggcagatgagaggcggaaaaacgcagacaaggcgaggcacggtggctcatgcctgtaatcccagcactttgggaggcagaggcaggag

SEQ ID NO: 640 - DNA, 4001 bp, Homo sapiens
tcccaatgtatagcgggccaacgcatgagtcatttccccaaagccagagttaataagtggtacctcagccatattccacagagctcccgccagcagccaggccccagggctgccctccacacccagggcccgtggcaccctaggtgccccagtggccccactccgggaaaccgcagtcagccgccaaatcccccaggagccgaaggacagctgcctcagtgccagaaactgtggctgccatccagggacaccccccaccccctgactgcggtcactaaagtgctcattaccgaaagagaaactgaagttgtagcacagggtcccccacgacgcctttcccagaggccgcagcccccacgtctggtctgatatgcgttttttcttaggctgcaagaagggaaggggcgccccacaaccctaaagtggcctgagaggtgcacacagacatcatccctaagcccaagggagcagaaccctggaagggctcacgcagtttaggggcaacaaaacccagctaagtgagtgctggtttcaaagaaagaccacagacctgggttctatttttgtcacccaacggccctgggtgagacatcggacttttcagaacctcggtttccctatctgttcaagagaagtaggaatcatacctacctgtcttccccggaaggtgtattttgagggatccaacacgctggtgggcgggaaagcactttgtaaagcttaaagtaccttgtcaactgtgcagcacgttgtaaaccacagagagctgcgtatagtgcgaagtacttcataaactgtaaagtggtttgaaaactgtaaagtgcagtacacgtgagaaccattattcacgttcgcttcttgccctgcaagctcggccattcctggtggacacacccagaccgcactaactttccctccagagcaagctggctcgggagacctagcaactacccttgcccccctgggggtcgagtggtaccaatacacgaggccacggggagagggcccgcgaccctggccaaggccaacacatggcaagagcatctggtccggccccggcggcagctggagagttcccggggctccagccgccacgctgagcgccgcggccgcggggcggtggccggcgggggtgcccggagaccttgcgcggcggagagatgcccacagacccatcccccgcgcagtcctctcggggaggggaccccattgtacgccgcgggcgatgggcaggcaccgacgcgggggctggcgcgctcccttccactctgccagtccctgctctccggggcgccgggccccatctcgggggcgcgggccgggagcccccaccccggccggccgcggtgcctccctccctctgctccctgccaaactttccagccccgaccgagcgccggcgccccccccgccccccgccacggccgggcccgcgcccctccaccctgtgcggagcaagaccaggccggcgcgaggcggctgcccgagccgggggcggcgagcgcgcgtgggcagcccccagccctgggcggcgctcgccgggctggctacaaagcctcggcaagatggtcccttcgcctcctcctggcacagtcaatcagcgcccgccgctccccgggcgcccgcggggcccgctcctcccggcgcggccggacacacctccccgcggccacctgcgcccggcgccggcccccgggcaaactttgcgggccgcggagcggaggtgggcgccggcggccgcccgtgcccggccgctccccgcccccatcgcccgcccgcccgcccgctcgctcaccttccacggcggcgagcagcggcagcagcagcagcgcggcccccagcctccgcagagccatggctgcgcttcccggggcctcgggccgcggcgccgcggggcccggacggcccgggcgggagcgcgcgccccgggctcggggggccagggggggcggcaaggcgcggcgcacacacagccgccgccaccgcgcagccagcagaatgagccatccagcccgggcagaacggggacccgggctccgccagcgctgggcacggcccacctgagccgcgggcgcggggggagcctcgccaggccaccgccccccgcgcgcgtcccggcccccggcggccgcgcgccgccgcgagcccgggtccccacaccgcgcccgtagggtcacccgggggcagcgcgggcgctggagcgcggcgaccccgcgtgcccgggccactgagaccccgggctccccccgcgcagcagtggtctctcccggcgctgtggctcctccagataaagcagcgatttcagcccaaatgtttctcaatttttattgaatgctgcaaagccggagagcgtctggcgcggctgacaggggcagggagagcggacggaggggagggcgggggaaggggcttcccaaagcgggggccggcactacctgtcagggcagggagtcccaccccctcgcctcagccctgccacccgggtccctgcggcttcgaaagggaccgaactgcaatgaatggaaaaaaaaaaaaaagggtgtgtgtgggggggtggcatctgggaacaaaacaggcggctttcccaggcaccggggctgggccggggcctccgagtgggagactgggccttggcgctacccgagggcctggggtggggctggggggagggtggtcactcggcactggtgggctgggcccttgcaggcagaccccaggcctcccctccctgccccgttgttctgagctggcccgcgagcccctcactgcagactcgtctatgtctgtattagatttctccttctctgttgatcttgctcccagtgcagtttggggatggggtgaaggaagtccatgggtgaatctggggaaagccccagccacccccacgctgtggaatggacctgtctgtgcagccgtggttttgtgcatggccgtcccttcagggagaacacaaccctagccccaaccctgtgggccctgccctgctctgacagccttcatcaccatcatcattaacagactttactgaagtctggatggtgggcggctgcagggggcctgcggcaatcacccaggctgaacccctggcagttgggagcccactcctgactgaggagacttcatcaggagctcggaactctgtggagtgagtggaggagcccagtgcaggagcaggtggtttaagtcgaaggcagtttaagtctatgctacccacatctcctgtgtccctttgtcccacatactatcaaaatgtcccagcaatccctccccttcagtccataccaagaaaatggggtaccacaggctttgggaatccatctaaggtttggaaagttgggtcgtctcttgaagctccaagagtccagttgaaatgggtgtcatcctggaaggccaccaggaggaggcagcctgggagggagacagaacaggagtgagcagggagagaagagaaacaggagatttccccctattaagcctacagacccctcaccagggtcaagagccagtggggtggggctggcagagccactaccgttcctatttgagtgagcagggagagaggagaaacgaagattcccccttttaagtctacagacccctcaccagggtcaagatccactggggtggggctagcctttattttcagttcttgcctgtcagaccttccaggagacccagggtttgagggaccccaagcttggcccatcttgaggcaatcctccctctcctggacagagcagctctaagctctggccccctccagtgcatccaggtgctagacacttccaaattcaagaagtcattattgagcacctattatgtactgtgcagattcagcttttttgctttgtttctatttcctgggacccttgactccacctacccagggccagtggttacttcctttttgtctcaaaataggaagaccagtgactctgctttattgaggacatggtaccaggcactaggctgggctttgtttatttcttgtccccctt

SEQ ID NO: 641 - DNA, 4001 bp, Homo sapiens
aggcagcagcttggctgctccctaactcttcaggtctatgccagtgccacccttcagtgaggccttccctttccacctggcactcctctcccctctttaaagttttatttatctccatattacacatcatcttctaacatactttatagtttacaaatgtattttgtttattatccctctgcccctagaactgcaaatcccacgagggcatgctccccgctgtgcctcagttccacagtgagcagttcctaagtaccgcccatgcctcctcagcgcctcctaggtgtggaaatttgggaaagaaaaactgcttggagagcactcgcagagtttttgctgctaagtcagaccaagtggggccagtgaaaggccccctattatcccccaaacctagctccctgaaggaggcaaccgttacaccagaaaacaatgttactttctggagaagtgtggcttcctgaaaatgtttattttaaattatgctggatgcagaggaggctgcacagtggtaccgaaacagccaccaaccccaaggtcctcaacaattttccaccaacagctcatcaatcccagcaaagggctgtcctggaagcgggcctgccaagtgcatgggtccccctcacctcccacctccagccacaagctgagccctcacagaacttccaggacaacgagtgttgcctgtaggggcggatccaggctttgcggaacctgaagtttaaacaatgggaggtgggctatggagggggcattcaactttaagaaaaaaaagtcaaaattaggattacaacattgctaggcaccccacctccaagatctcgggagccgccagggcaaggaaggagccagaagctcagagaaaaccgacatctgccagggagggaggcaggcggccactcggtctccgcggcgcttttgctcaggttgaccacattccctggcttcaactacaaggtgaactcccgggcaagtttcctgttctacaagaggagagggctggccttcaatcccgagaccagagcgagggggtgccgggcggcggctgcggcagcagatggagatgaaagcgcatttcaactaaaaggtgtgatcagtgtcaggcctctgagccgaagctaagccatcatatcccctgtggcctgcacctacacatccagatggccggttcctgccttaactgatgtcattccaccacaaaagtgaaaatgacctgttcctgccttaactgatgacattgtcttgtgaaattccttctcctggctcatcctggctcaaaagctcccctactgagcaccttgtgaccccccccactctgcccgccagagaacccccctttgactgtaattttcctttacctacccaaatcctataaaacggccccacccctatctcccttggctgactcttttcggactcagcccgcctgcacccaggtgaaataaacagccatgttgctcacacaaagcctgtttggtggtctcttcacacggacgcgcatgaaaatcagtgttccgacttgggtgacaaattaagtgcatttcaccgccgagcgagccacggccctggaagcagagctcgcccaggccaggggacgcggtgcgctctcggggtcgcgagcctccctccctgcggcgtccgcccacagtctgggacgcggaattccctgcgagaagtccgcggtcgcctgcaggctccttcccccagtaggcggcacgcgcagtctcctggccggggcaggagctgggggcggaccaactacaagtccctctgcacccctgcgggccgaccgcagccccgacccctcggcgccccggcccgccgcccaccccggcggccgagcccgcgcggagcccgaaccgcgtctgcgtccggggagtgcgggcccggccggccccgggcgcttacggtctcggctcgcaggctccggcggcggcaggcgcgcgatctctccggctccctggctctcctcggctagttttcagcagccccggcgcagtctccgcccaagcccggcctccgagcggggcgttccccggcctggaggacccgggaaagtctctaggcctgcctaaggctccacctctgccagggataaaacgggctacttaaagggcggtccgcggccccgcggccagaaatggagagaagcgtttggcagctcctacagcagtttgatcccgtaacttcgtcagttgaatctaaaaacaaaaatccaaacttgcatgatgtatgtcctttttttttttggagacagagtctcactctatcacccaggctggagtgcagtggtgcgatctcggctcactgcagcctcaagcgatcctcccacttcggcctccagaatagctgggactacagactgcgccaccacacctggctaattttttaagttttgtagatacgggggtctcactttgttgcctaggctgatcttgaactcctgggctcaagcgatgcacctacctccgcctcccaaagtggtgagattatgggcgtgagccactgcacctggcggtgtatgtctttttaatttcatctttctagcaattcattcttagtatatttaacaaacatattggtccgtgacatgcttggaaatctaaaaacaaattagtgtctttatacagagaatgtgagaagcaatggtctgaagcactcttgggggtcttcatggtgaggaccagtataggatgctgagttcaatgccaggggagcaacctcttagtgaatcccctcccgctttggagagagctcagggcccaggcgggtggttgctggggctcttttagcttccgtgagagcgttgatccccagcccctcatcgttagaaagcctgtcccatcgcctctgccatcacccctccttagcttctctcttcacctgctcagaggtgcagttctttcaaccaccagcatcctcacgatctcggtggacagactacagctaggaggccacatgcagggcccgtggctggagttctaagcttctgactgtcaccttgcacacttcaggataaggttcaccaccacccaccttcccttggcctccaacctttctgctcaccctggcccaagaattctggccggcagacgcactcacctcactcccacctccaaacttttgctcttgcagtactgccggacagggtgccctcctccatccacatgtagagtcctcttgtcctttaattctacaccctcctataaaagctttctcttgcaactgcagtctctgacatctctgtattcctttcagaacctgcagtctgggagagttctttcccctcccctccaaatagttcacacagaagctctgcctctggccacttcaccaggggacccaaattcgttactcttaaaactgcagtgatggtgaaacaggtaggagtcaggacttaacgccagaggtggggcttggacaccagattgaggaccaaattgaggactagctaaaacagggactgggtggaagatgagcataagatatgcccatcatatcagtgtgccatgtcagtttaccagggcacgcccctggagttatcaccccccttccatggcaatgacccgaggacccaaaagttactacccttttcctagaaatgtctgcataaactgccccttaatctgcatgtaactaaaagtgggtatcaacatgactgcagaatcgcccagagctgctgctctcagcacactgcctgtggggcagccctgcactgcaggagcaggccccctctgctgctgctggacaccgccacctccataaaagttgctgtctcacaccacgggctctctcttgaattctttcctggacaaagctaaaaaccctgctgggctgagacccaatctggggtctcagctgccctgcatcaaaactcttctaaaattagatattggtgatggttacatcactacaagtctgtaaatataccaaaacccgtgaaattttacactcttaaagggtgagttttatgggtatgtgaattatgtctcaatacagttgtt

SEQ ID NO: 642 - DNA, 4001 bp, Homo sapiens
caaacatcaggccattcaagctgggcacactcctgcccccagcctttgcacctgcaccccaggcagcagcttggctgctccctaactcttcaggtctatgccagtgccacccttcagtgaggccttccctttccacctggcactcctctcccctctttaaagttttatttatctccatattacacatcatcttctaacatactttatagtttacaaatgtattttgtttattatccctctgcccctagaactgcaaatcccacgagggcatgctccccgctgtgcctcagttccacagtgagcagttcctaagtaccgcccatgcctcctcagcgcctcctaggtgtggaaatttgggaaagaaaaactgcttggagagcactcgcagagtttttgctgctaagtcagaccaagtggggccagtgaaaggccccctattatcccccaaacctagctccctgaaggaggcaaccgttacaccagaaaacaatgttactttctggagaagtgtggcttcctgaaaatgtttattttaaattatgctggatgcagaggaggctgcacagtggtaccgaaacagccaccaaccccaaggtcctcaacaattttccaccaacagctcatcaatcccagcaaagggctgtcctggaagcgggcctgccaagtgcatgggtccccctcacctcccacctccagccacaagctgagccctcacagaacttccaggacaacgagtgttgcctgtaggggcggatccaggctttgcggaacctgaagtttaaacaatgggaggtgggctatggagggggcattcaactttaagaaaaaaaagtcaaaattaggattacaacattgctaggcaccccacctccaagatctcgggagccgccagggcaaggaaggagccagaagctcagagaaaaccgacatctgccagggagggaggcaggcggccactcggtctccgcggcgcttttgctcaggttgaccacattccctggcttcaactacaaggtgaactcccgggcaagtttcctgttctacaagaggagagggctggccttcaatcccgagaccagagcgagggggtgccgggcggcggctgcggcagcagatggagatgaaagcgcatttcaactaaaaggtgtgatcagtgtcaggcctctgagccgaagctaagccatcatatcccctgtggcctgcacctacacatccagatggccggttcctgccttaactgatgtcattccaccacaaaagtgaaaatgacctgttcctgccttaactgatgacattgtcttgtgaaattccttctcctggctcatcctggctcaaaagctcccctactgagcaccttgtgaccccccccactctgcccgccagagaacccccctttgactgtaattttcctttacctacccaaatcctataaaacggccccacccctatctcccttggctgactcttttcggactcagcccgcctgcacccaggtgaaataaacagccatgttgctcacacaaagcctgtttggtggtctcttcacacggacgcgcatgaaaatcagtgttccgacttgggtgacaaattaagtgcatttcaccgccgagcgagccacggccctggaagcagagctcgcccaggccaggggacgcggtgcgctctcggggtcgcgagcctccctccctgcggcgtccgcccacagtctgggacgcggaattccctgcgagaagtccgcggtcgcctgcaggctccttcccccagtaggcggcacgcgcagtctcctggccggggcaggagctgggggcggaccaactacaagtccctctgcacccctgcgggccgaccgcagccccgacccctcggcgccccggcccgccgcccaccccggcggccgagcccgcgcggagcccgaaccgcgtctgcgtccggggagtgcgggcccggccggccccgggcgcttacggtctcggctcgcaggctccggcggcggcaggcgcgcgatctctccggctccctggctctcctcggctagttttcagcagccccggcgcagtctccgcccaagcccggcctccgagcggggcgttccccggcctggaggacccgggaaagtctctaggcctgcctaaggctccacctctgccagggataaaacgggctacttaaagggcggtccgcggccccgcggccagaaatggagagaagcgtttggcagctcctacagcagtttgatcccgtaacttcgtcagttgaatctaaaaacaaaaatccaaacttgcatgatgtatgtcctttttttttttggagacagagtctcactctatcacccaggctggagtgcagtggtgcgatctcggctcactgcagcctcaagcgatcctcccacttcggcctccagaatagctgggactacagactgcgccaccacacctggctaattttttaagttttgtagatacgggggtctcactttgttgcctaggctgatcttgaactcctgggctcaagcgatgcacctacctccgcctcccaaagtggtgagattatgggcgtgagccactgcacctggcggtgtatgtctttttaatttcatctttctagcaattcattcttagtatatttaacaaacatattggtccgtgacatgcttggaaatctaaaaacaaattagtgtctttatacagagaatgtgagaagcaatggtctgaagcactcttgggggtcttcatggtgaggaccagtataggatgctgagttcaatgccaggggagcaacctcttagtgaatcccctcccgctttggagagagctcagggcccaggcgggtggttgctggggctcttttagcttccgtgagagcgttgatccccagcccctcatcgttagaaagcctgtcccatcgcctctgccatcacccctccttagcttctctcttcacctgctcagaggtgcagttctttcaaccaccagcatcctcacgatctcggtggacagactacagctaggaggccacatgcagggcccgtggctggagttctaagcttctgactgtcaccttgcacacttcaggataaggttcaccaccacccaccttcccttggcctccaacctttctgctcaccctggcccaagaattctggccggcagacgcactcacctcactcccacctccaaacttttgctcttgcagtactgccggacagggtgccctcctccatccacatgtagagtcctcttgtcctttaattctacaccctcctataaaagctttctcttgcaactgcagtctctgacatctctgtattcctttcagaacctgcagtctgggagagttctttcccctcccctccaaatagttcacacagaagctctgcctctggccacttcaccaggggacccaaattcgttactcttaaaactgcagtgatggtgaaacaggtaggagtcaggacttaacgccagaggtggggcttggacaccagattgaggaccaaattgaggactagctaaaacagggactgggtggaagatgagcataagatatgcccatcatatcagtgtgccatgtcagtttaccagggcacgcccctggagttatcaccccccttccatggcaatgacccgaggacccaaaagttactacccttttcctagaaatgtctgcataaactgccccttaatctgcatgtaactaaaagtgggtatcaacatgactgcagaatcgcccagagctgctgctctcagcacactgcctgtggggcagccctgcactgcaggagcaggccccctctgctgctgctggacaccgccacctccataaaagttgctgtctcacaccacgggctctctcttgaattctttcctggacaaagctaaaaaccctgctgggctgagacccaatctggggtctcagctgccctgcatcaaaactcttctaaaattagatattggtgatggttacatcactacaagtctgtaaatataccaaaacccgtgaaa

SEQ ID NO: 643 - DNA, 4001 bp, Homo sapiens
cgagttctgacaaggcccctgcaaaccacgccccagcagcgcccctcgctctgtcttggaaacccaaggcaggaggtggtccctgctgggaaccccaccacttgcatgtcctccattggctacatgtcagatgtttgggactctgctggggggttgcagaggccctggagtttgctcctgtcaagagctgcccctctaaacctagaattgggctactgggggtcgttctatgaaatacttgtccacagtggtccagcgatagagctccaaacagaaatccacccagggcgatggctctcgccttattcctgcagttctgtaggaaatctaatcaggaaaatcagcttggcaccccccacctccgcgtttctatcagtgatcccagtgaactcccagcttcccaccctcaggccctagagtcatctccaattctttccccacagcccatcaccaagtcctcatgccatcagattcagccccctgtgtgcctcgccccctcccctggaccagagcccttatcaccccacatgtgattatggagacagctttcaagagaggaaacccacaacctcttctctcatagtcaccagcatacttcttagaaccgactgcagccttcgtcctgggaatcatgcccaggtgtccacccttgaacttccaatctatctccctctctggattgtgaaactctaaagtgcctcaaggtctcactgatcaacatttactcagtctaccatgtgccagggggcaggccttcgctatccctgctggagacacgtgggacacgttgatgcatgttccatctccagccaagccaggccattgctttcccttttttttttttttttttttttgagacagagtctcaaagagtgcagtggtgcgatctcggctcactgcaacttctgtccctgggttcaagagattctcgtgcctcagactcctgagtagctgtgattacaggtgcataccaccacctcctgctaatttttgtatttttagtaaagacagcgtttcaccatgttggccaggctggtctcaaactcctgacctccagcgatccgcccacctcggctttccaaagtgatgagattagaggcacgagctgctgtgcctggccctgtggctttcatctttcaatcccaagcagtaacagtgcctgggccccaaggaccctatgtcagctgatcagatgggcagctgggaccacactcccacaataaaaacaaggcagggaatacctggaaatgagttcctcttatttaagtaattcagaaaagaaaaaacatgcatcagcttctttcatttccagaaagacgttatgtctctgccaggaaatcctgccctttaagaagatggagaaaagtcagctaaaagcccctgcggtattgaaagcaggactaggggttagggactgggagacacatgggagcgtgtgggaggcagccgaaggcagagagcagagcttcccccagcaacaggagcagctgaacacacttcactgggcaggcagatcctaccacaataaaccatagcttgggaaggcagggctgtgcccgtcctgggcactgccttgacccacagtgcccagcactggtgactggcccagcacagcgaagagctccaccaatattttatgcactagaagctagtaagacacattttgcatgatgttgtcaaggaggctgcgagcataatattagaacaataaagagggatcaccctccccagtgaactttacaaaccaccctccttacctgtacctcagcacagggagaagcactgctgtcgcttccctctaggatataaatgtgcaactttcccctttctgggcagaaagatcccagtgctttcacctgtccaccaggctccacgttctcaccctctgattactccttgggaaagagagctgtggagctctgcacctggcgatgctctaagggcctgtgagagaggcagggcaggctgcaggcactggcccccactccccacggccttctgacaattgcacagtcctgccaagtcagccaatctcatgtgtgcacagcgtggttatctcccctggactctgcacagcaaactgaaccacgctgacctgagagatacagggctgaaatgatcagtgctcgagtcccatctaaaagaagggaatctgggacaaggggcattatgatggcccccaccagcactaccaggtgtatcacccaggaagaggagggcaaagtgacagattcaaagagaattttaaaaacacgatctcttgcattctaattaagataacaagaatattagtacttgcttggctcaaggatggtgccttacagccactgatctcagattacaaataggctctactgcagtgtgttactttgccacctagtaacagccctttatttaatagcaggtggttaatgcaccaaagaaaagtgttcttgattagcctggtgtgacagcaggtgttgactgtgtgggggtgggtttccaaccccgctgccgccttgcgctcccacatgaacagtccttcttcttgctgcaggcaatattcacttccaccagcccaagcccaaggagcccaccctggggaggacggagggggtcaccacggctccacacccccccgtctgctttgtcggagagctggccaggcagagtggcgccctcttgactgagcctcaaacctttgctttcctcttactccaaataaagccgcctggcgaaggagctcggaggcctgatggcagcctgctgggcgcttgacaattcctagaccctggtaaatgtaatccatggtacatgcaaatccacccactaaagagccacaactcatcaaacttgactttccttttcacttatttaaggcaagaatcggagtaggcaaggggcttagcctaaatcacactgcagttgtgaggattagaatctgtggccacagcactcactcctggtctgtcactgggtgtgttgcaccccaactccccttcttgttccctctcagcacctgtttgcagccttgagtcttcaggccagaagggactcctagggcacagacgtctcccaggcctgcatagcttttctcaaaaaatgtaataataagaaacaacaccctcccctatctggtgggtcagccagtcctgggaaggactgcgggggcggcgggggtgggcggtcttagagtctgaccaatgagtccaggcacccactctctatctgcctaaccctgcccacacattctgctgcagttcgagacagggagaattgcagatgcccaccgcccaggcagggaggatctagagagtgccaggcacccagcaggctgtcctcaggcctctgggctccctcgccagggctgcggctttatgtggagtaaggggaaagcaaaggctcgaggctcagtcaagagggcaccactctgcctggccagatctccgacaaagcatgggggtgtggagccgtggagactccctctgtcctccccagggtggacttcttggggttgggctggtgaaagcgaacatcgcccagagtgagaaggactgctcacgcaggaacccaaggcggcagaggacctggggtgggctggggagggggtggcactaagcagatgagaaccctcccctccctctcatggcctccctctctcatggccacccagcactcaagaggacagagcagggctgcatcacccctacatccaccgggtgggccagttgataagtcactgccactgggcatggaagctggagaggaactcagcagcctcgagtccaaacccctgctctacagccagggaaagagggggccgagtgactgagtctggggaagcttgatggccaacttgggtgatgccatttaaggagccagcctgggtttcccggagactccccatcccatggctccctgcaaaacagcaactctgacaacctttgactttagaaatgaaaacatcttggaggttacaatacgagggctttggcccagtgtggtagctcatgactgtaatc

SEQ ID NO: 644 - DNA, 4001 bp, Homo sapiens
cttatttttaggtctctccttcccacattattattttgagtgttgcatgttctgttccccttgctgcctgctcatgtcatgtcagtgtgcgtttctaataagagaatgccctgagtgctcaagacttcactctgcatgtaggagacaagaaaacccaaggaaaattaaaaaaacatgggaatgagtcaggaattcaagcaaatactaagcaggctgaattgaggaaagtagagggaacagcaggaataaaaatctctgaaagcaagcaagctaggaaacaaaaagaaccaaaagctaaacacagacattgggtttttatagcaggcaactcaagcaactgagttttcagatgtgaaagaatcattttgcagattcagaagatgaggcccaaagatggtaacatgagtcataaaatggttgagagcagggctgtgaccagaatctccatcttgtcctaactcccaggacaatgctctttccactcggttctctgtctctggggaagctctttaggcggccagagcgaggggaaaagtgttttatggaattccagatggttcttatactacttttacccctcaggttgaacagagataacaaatctgactttaccctcagctgcacgatggcttcctagaggttcaataactttttttattggtggtgagtcttggaggattaaatgttatgggcactgcaatggatttaattaacagatactttattgcactgactatgcatcaggcattgttctaagtttttcgtgtttgtttttataaatattaacctatttaattctcatgtcgaccccaggcaagaaagaagttctcttgcccttctgaacttcagctgcggggcaatttagctcctaacaggaaataaggacttggtgacataaacatcccctcttatgaggctgggtttgaaaggcctgtgagtcagactgcagggtgtatcacgggaactatttcccttcaccacctggagcctcaggaaacagaatatttgtgggctgtgaggaagcttgaacaattagcgtctgcaggcatggctggatttaccttttattccattcctttctttggtccctgacttcataagtatgcattcctccccacaacacacacaatttacttattgtttcatgcaacctaagtcgtctgtgatcataataaactcatgactcccaaagactgactgtttactcttattatctctaaaattgggcaagaacagcctcctgagacattaggatgccacgaggaacaattctctacagctgatctgagctctaaagggcaaaagggtgacaggagacagcttccccttgcagtaggaaaaagagcaggtttattctgggttgttgtggcgccggggggcagtaatataagaggcccctgattagagaagttccacattcagaaaccaatcaaggtgcctgcaaagaccgagtgctgtttatctgtatctctctctctctctctctctctcacacacacacacacacacacacacacacgacacacagggacccaacccctcctcccctcctgccaggacactaggggacgctgagccagcgtctcggaaggagaagcccggagccccccaccctcgcggcggtcacgctccctcccgctcccgccaggcccgcgcggcccttcaccttgatccgcacgtagcagtgggtgcccaaggaggggtcgctcaggcacgcgggagggtgctcccgggcgggccgccggaaggtctgcgccggccccttgccgaggctccacaaaagtttgagcaggtggatggaggcgcagagcccgcagtagcagtagaccagggaccagaagagcagggaccggagcgtgagcatcaggcggggcaggcaatcccgcagcctcgccattgggaggcggcggcggggcccactgcccttcctcgggagcgggtgagcgagcgccgcagcgcgccaggccagcccgccgtcgcctctcgacgcgcgcctcccccggcccggggcggccggcgttccgtgtcaccgcggcggctccgcacacgcgccgcgcccagcccggagcgcgcaggggagagccgggcctgcggggtgcggcgggccaggccggggtgcagagcttggctgtcttccgcggagagcgagatcccgtttcaaaatcgcaaaactgtgggggaggatgaaggcgagactttcccaaaccatcctgggcaccaaagaaggtagcgccactcagtcttctttgttgttctcaatgtatcaagcaaaactatttctaagcccacatattcgtgtgtcatagttcagggacacaggtcagcgacaaacttccatgctattacacccaaagagattctttagagtgcaaaatcactctgcactctgaaagataccagccttcctcttctcaaaatctttcgtggaatcataatttctgtagaaatccgcctatgccttgcctggttcagccacagcaaacttacagagagctgcaaccccagggatacaacgaatgcttcaacaacgtgacgcggcagaagcctggccagaaggccacacacctgagagttcgtcgaagggctggaagccgtgagagtgacagtcctcggtaggtatctcagcctcagcaccgacatggccactcttgtcctgacctcttctatcgtccagttcactgttagaatttcattaagccttttcccaatcaccgggtcaggtattaagtgttcattttttatgagaaactgtcaaactggtttccaaagtggctgtacaattttgaatttacttcagcatgtgtgagttatacaattgacctttgaacaatgcggggggttagggttgctgaaccctttcacatctgaaaatccatgtataacttttgagttcccccaaacttaagtactaatagcctactactgaccaaaacaattaacatatgtttatgtattacatactgtatctttataattaagaaaaatgttaaaatcataaggaagagaaaatacatttactattcattaagtggaagtggattatcttaagagtgttcatccttgtcatcatcaggttaggtaagctgaggaggagaaagaagaagggaggttgatcttcctgtcttggggtgagggggagggaagaggtggaagaaaatccatgtgtaagtggacctacacagttcaaacacatgttgtttgagggttaactgtattttgctctttttttctagggtcttgagttaggaacttattgagacctttgcaatttctaatgcaatcatttagcacctatacatttctctcagtactctttttattttattttttgagacggagtctcactctgtcgcctagactggagtgcaatggcgcgatctccatctcagctcactgcaagctccgcctcccgggttcacgccattttcctgcctcagcctcctgagtagctgggactacaggcgcccgccaccatgcccggctaagttttttgtatttttggtagagacggggtttcaccgtgttagccaggttagctcgtgaaccgcccgcctcagcctccctaagtgctgggattacaagtgtgagccaccgcgcctggcatctctcagtactctttaatcgtattacatatgtgttgatatgttgtattttgccatttgttatgtattttttaaaatgtcctgttttaggttgggtgctgtggcttacgcctataatcccagcactttgggaggctgaggcaggaggatcgcttgagctcagcaattcaagaccagcgtgggcaacatggcaaaaccctgtctctacaaaaaatagagaaattagccaggtgtggtggtgcacgcctgtagtcccagctacttgggaggctgaagtggcaggatcgccttagccctggaaggttgaggctgcagtgagccaaaatcatgccactgcactctagcctgggttaaagagtgagattatgtttcaaaaaatgaaaaacaaaacaaaacaaa

SEQ ID NO: 645 - DNA, 4001 bp, Homo sapiens
aggttgcaatgagctcggtctccaaaaaaaaaaaaaaaaaaaaaaaaaaaaaaaacagtatcaggagctttaactatagtctcacttaactctggcaaccaatcctatctggaagacattattctccctttcttaaaacaaggaaactatgggagaagctaaataaggaacttgtcaaggtttcacaactagtaagtggcagccaggattggactcaggtctgcagaaaccaaatgtctttgctctcaatcatgaaggcactctaatgcctttccagctcaggaatcaaacccattccttttagagttcattgatttgttgtgcggttagtccattactgcaaccaatatgccaaaacattaccatcttttaaatgtttaaaatggctattaagttgtgtttttgttcaacaaccttaaaacatcaccaaagttgagaatataatgaataatttcatcagccccacgtggtcaactgtatataaaggtatgggcttcttcaacattagaaagtactgtgtgtgtattatcatacatatgcattaacaaatattaggtcaggctgggtactgtggctcacgcctgtaatcctagtactttgggaggccaagtcaggatggcttgagcccaggagtttgagacctgcctgggcaacacagtgaaacgccatctttccaaaaaagacacaaacacaaaattagccaggcatggtggcacgcgcctgtagtcccagctactaaggaggctgaggtgggaggatcatctgagcccggaagttcgatgctgcagtgagccttgaaagcgccactgcactccagcctggacgatagagcaagaccctgactctcaaaagaaaaaaaaaaatcggcaaactacttaaattcttctgtgtaatttcccaaagtaatgaaaaagcagaaattctaagcaatctaccaacaataatcttggtcatgtcgaaaaaataattccaaacagaacttaagatgtgtcagtaaggtgacagatccaatgtttactctgaaatttactacacatccacagggtgcagtaaaagcaaccgcatcagtctacagtgtacctgggtgttttccccaattaccctaccacatttaattaaaaataaatgcagcctcagttgaaatcctaaatgctaatatgctcgtctgggttatttcttctgaactcgataaaacgtaaggaaaatttgactcaagtgaactgaggatttctcctgagaggagggacaggacaggaaaggaggtaagaaaaggagttgggggaaaaatgctaaaagagaagcgacgactattggattttaagttttaaaatcttatttccacgagcaactctcgctctccgggggaaaaagggagaggtgagttgactgggagttcatccctctgagaaaaagatccgaagcggagtctcgtgttgtctagcccgggctcacactgcgcctccctccatgcccgggaaaaccatcttcaggagcagatgcacctgccggggacacggggcgaggggtgcggagcctcctccacgtacaattctggggcgaggggcaggtccaacatcccagatggtgaccaccactgcgcaaagccggggcgcagcgaccttccacgccctgcaccctccctggctgatgcaacccacacaggtcattggtctcggccccttacctagcggagggtctcctgaattcacggtcagagagagcgtcgccatctccaccagtccgctggtccacctgtcagtacgcctggctcgtgccagaactacggaggaccccgcgaaaggaagaagatgcaacgtgtgcgcgtacccgacgccgccgcagccttcgctccgcccctgcgccgcagctactgccgacaccgcgcacgccgcggtgcgacatcgtcgcgcgccgtcttcgtccccgcccgcaggttccagagcctgctacccctcctcttggccgccagggttagaacggcctgcgtggcctttcgtgctgcggtgggaaagacgctgaagtggacgggactttacgacacttcgtcaagtcagcaggtcgtaaaacagcaggttgtaaaaccatctttaagatgggataggcgtttatgtgaagcacgaaacaaaagcatgcactgtctttatgtaaaaagaaaagtcctggaagcatacacacgatagccatgattacgttgggaatgggagaagtttttctcgttgtttattttatacattcccccccgtttttttttttccaaaacaagaacgtattttcaagagttatttgcgtgttgaaaataatggttaaaggaaatataaaagactctttaaaaatcactgcaggccgggcgtggtggctcacgcctgtaatctcagcactttagaaggtgtaggcgggcggatcacctgaggtcaggagttcgagaccagtctggccagcatggtgaaaccccatctctactaaaaatacaaaaattagcctggcatggtggtgggcccctgtaatcccagctacttgggaggctgaggcaggagaatcgcttgaacctgggaggtggaggttgcagtgagccgagatcgtgctactgcatccagcctgggcgacagagtgagactccttctcgaaaagaaaaaaaaaaaaaatcacagcagaggccgggcgcggtggctcaggcctgtaatcccagcactttgggaggccggaggcgagcggatctcgaggtcaggagttggagaccagcttcaccaacatggtgaaactgtagagacgggggtctctactaaaagtacaaaaattagccgggaatggtagcgcgcacctttaatcctagctacttggggagctgaggcaggagaatcgcttgaacccgggaggaggaggttgcggtgagccgagatcgcggcactgcactccagcctgggcgacagactgagaccccgtttcaaaacaaacaaaaaatcactgcagataggcgcagtggcgcgctcctgtagtctcagctattaagaaggctgaggcaggatcgcctgagcccaggaagatgaggctgtagtggcctcgccgtggacttgcctgtgagtagccactaccctccagcctggccgacacagggagagacctgatctaaaaaacaaaacaaaaaaaccctccgatgccgcccccaatcatggagtccacaggtgtttttttcagcgtctcatctgattctccctttcaaatcctttgtgacggacgtgcatgcatgagctccagagatactccaaggtgtatacacacattcgtgtgtgtgagctgcacccatatttcaagggctggtgttaaagtacggggacccgggatggattccaagaaccatctcaaccacatcctcgcctacactttttcttaacctccccaagacatccttgttttcattagggagggccccttagattacatctcccatgagacttgaggccaggcgcggtggctcatgcctgtaatcccagcactttgggaagctgaggcgggcggatcacctaaggtcgagagtttgagaccagccaagccaacatggagaaaccccatctctagtaaaaatacaaaaaaatagctgggtgtggtggtgcatgcctgtaatcccagctactcgggaggctgacgccagagaatcgcttgaacctgggaggcagaggtttcggtgagctgacatcacgccattgcactccagcctgggtaacaggagcaaaacttcatctcaataaaaaaaaaaaaaaaaaaaaagaagcctactttcaggatagtgggacttatagcagaaagtcttaggtcttagagttaccatcttgttggatgcttttactagttccaatcattttttagttatgttggattttctaggtaaatatcattttcttcctatccaaaatttacatgacctatatcttatctctttcattggctagaacttccagaatgatgttaaatgggagcaataatagtgtcgaataagagagtatttg

SEQ ID NO: 646 - DNA, 4001 bp, Homo sapiens
gtacacattaatacctaaatatataacccaagaacatatgtaaattttttaaatggctataaaactgacagagcttgaagcaattctccagagatgaatgatgtaaatagaagctaaaaacatggtattacccagggagagaataaagtatgcacacaactgagaagcaattttacggaagtctttaagagcacaaaatcttcaagggaaaactcctgccagaattggccaacagagccagaaaacaacagcctgccaacagggatcttgtttaatgcaagtcactaactagactcacagaaagtgaatacctaaaagtcagtgctgtagttgttcaaatttgagttttgggaggacccttccaaacatacataaccaagactaaaccaccacattccatgttaaagggttctctgcttgtcagaacaggacaaccaccaccaccatcaaaaaaactgggaaatagactttccttatgacacttagaattcctgcaaacacgggttagttattttacatgaagcatgtacgtgactcctggtttctgagaaaacatttttttctctctatcctacagtgctaggcaaagcaccccaaagcctcttgattttaaacacagaaaactccactgccgaaatgtttgccctatcccagcgctaaagccttagaagcaccgacgaatctaggccaaggagtacaagatggcagtgagataccacaatgcaggcaaggaagacgggatgggccccaatcgggaagcacgcgccaccagctctggagagaaccgtctgaggagacgcgggggagagtttgggtcacaggagcaggaaggaactggcaggtgtctgtcaccttatcatcccggacaccatgtttacattgtaattggcttctttacagagagggagggaccaggttcccagtgtgagtgatgtttagaggttttctgagaagcacaaggactggactttgacaggaagcaacgaggcaagagggaagctcgagaacaggttttgctgaggattccccccaagaaaagtgctccccgggaggccgttcctggcaccaagactggcggagccaccacacccgttaaagggatccacctggacagcgatcaggcgtgagccccccgaggggaagttgaagtggaagcagacgtgggtggcaaaaggctgcattgggggtctgacccagaaggaaacctgatcaggaggggggagaggctgaacggaggaaggggccggcagagtgggtagttgagtaggatgagacttctttggaggcgaggctaactacattaaactctgggaagggagggcttccgtcggaccctgggagaaaggcaggtctggagaggaaagactggcttggggggcctgcgcgtccggctctggaaggcaactcctactgggggcggcgcgcagccggcctggcgggcgagcctcgtgcggcccgggggtgcggccggcccgcgcgagctcaacaggagctcacctgggatgcgtgcggccctgtgggaggaaacttcctgggtaggtgaaagctgccccgcgggagccggcccggcaccggcagagcgcggccgggtcacagtccactcggcagcggcgcggagggcggcgagggccgcgcggggcggggcaggaggcgcccgacgaccctgggcgaggtcgcggcggccgcaggggggctccggctccggagggcgccctcccgcagtcgcacccgctttccctcacacacaccggccgcccggcccacaagccaagaagctgcctgcttggcccacaagccaagaagtcggcgaagctgagggcggtgggggagggggcaccggccggccaagcccggcggacgggcgtgtggcgttacctgtgtcagagagagctgggccgccgcagccatggtgtttccatcatgcaagggaggggaaggaagacgggctgactggggctcggggcggggaggaggcggagggagcggccgcaggcgaggccggggcgggcgggcgggcgtctcccctaacttccacaacttccctccccacgcccgccccgccccgcctggccccgcccgcctgcccgcccgccggagccggccgcggcgccgcccaaaccctggcgccggagtctcggccaccggaccagagcctgcccccggggccgccttggaaaacccggcgcggacataaaattaaagcggacgggctgcggaggcgactgcagattgacctgtgaacttcagacaggccacctacctacgctgagctcctgcttctgaaaaatgggggaaattgtaactagaggcccagttacttacaaagactaaatgagataatgatagaaaataataatggcactttatatatgccaggctctgtactagactcttattttttgaattgtatgaatgaaggaactgaaacacaaataagtgtcttactaaggtcatacagctaattatatagctgaattagaatccaagtctaactgtaaatatttaaccatctgctagtatattggaaaagaagacattaagtcattccctcccacagccaaaatccatttggaaaggggaagcaaaaatgtatttgcctggtgcctgtcacatttagattgtttaacaagggaacgctggtgcctgtagcactcctagcttctcccatcatccacttagcaaactcctccttctttctcaggacataattcaagtttcacctcctttgcaaagtatctttttctcttccttatgtcagagttacacactctcctttataacctttcttctctaccttgtgaagtcatcaccctaatgacagtttacacctatctatccctctagattaagagctcctcaatggcaagaactgttttcaatatatttctatatcgtcagaccctagcattacagtgcatgctcagtaaaggccttcgttcctgcctatattaaacataacacatcctacaccttctgatgctgccaaccttcagttggaatacccagttacttgaaattcatcttcaaagtctcagagtatataccacctacttcaagaagccttctaggaactccacaccccacctctaagttgttctgatgtgaccgtttttatactctgccttatctgtaagcgttagttgagggtttgtctccacctcactgcactgtaaaatccttgaggacaaggggctgactcactgctttatctccctcatagtttagcctaccacagaggcctcaataaatgtatttgcccgaattggtcttaatttcttagtcacgatggcttcccattacaacaaaccacaactctatcaggcctacacccattaccattatcatagcagtccccgtggtaggagggacaactgaacaagacccaggatggagttagccccacctaagtttttagactattgcctccacaagcaaaccattccagaaatttcccaaggaactcctaattctactcagactccttctggcaaaggccagctaacaagagcaagccatataggtctggtgagtaaccacttattcaagagcatcttccttggcttcttttttgctgctaatctctttaactgaagagagaataagagatactgttttacattacttcactttggtacacttatcagccataaccacaaccggtgtttctaccggtgttttctactttatattagcacatttgagcttcacaactctaaaaggaagtaatcgtcatactcactttacaaatgaggtaatgcagggtcacagaggctaagtgatttgcccagggttatacaactgatagacaaagcagcatagtatagtgaaataaataggactcagacattaggaatatccaggttccattcctggctctcccattcactagttgtatgcccttagggttgttgtgaggatgaatgagatgacatatacaaaagtgcctaaacttgtagctacacaaattatgaaatctgaaaatcatggagcaaatcgctttg

SEQ ID NO: 647 - DNA, 4001 bp, Homo sapiens
gtgccaatcacacattttggattttgcaaagcttaaggttagacatacaccttaccattgccactaagtaagaagggcaagcaaatcacggagaaattctgatggacaacaaaacttctataattataagacaccaaatgttcagggatagcctatttaaactgaaggaaacaatgtaaatttcagcactcttctaaactgggtatttaaattcacatcctcaaaaaatgcagcagggaaaaaccaacaggtagatatactcaacaaaatactgtctatcacaagaacctatgtactttaaagcagtaactggctaaatttagaagctgtccaaaattgtatcagtagctacacctatttcttcaaattatgaaaacttgtgtagattattttatcttccattttaaactatttttagtaataactgcttagaatgtgtggctcttttgcatttcctaagaagctcaaaaactgcacaaaataatgtaattcagataacttaccctcttatgcccacctaacctcactgccagagagagaattatattgatgatgatctcttaacttgcactgccttcaggaaaattcaagtaaatataataaatgtagtcacccaatcagagaatcaacttccaacaagaagtctctctggcttcttcctcaattcttcagtaaatcattctccccaccctagcacagtccaccagacagacaatctctaatgaatgtcctgcatcaaaacaaaacaatgggcctaacacaatttagagtttttccctacttaaaactattaggaaaagcaggaaaatccaacatacaagcaacacattaagaaatgcccatccaagagttcttactagcaactgctaccagtgcttctatatccaatctcctctatgtgccggtgcagcactaaggaaacagtaccccaataacatggccacatgcattgcttactgctctaagtgaggcactgcccagttttctctatttctaacgttagaaacactgctactcccttatttttatcatttcccaaacaaaaactgaggtttttgtcatcctttctctttgtaaaatgaaacaatttaacacaacacctaatgaaaatgaactaaagctctttatgccaaagtttaagatatgctggttactaagctactcataaaatgctactttaaattgttctgtatcatctcccaccctacaagtattatgagaaacagtcctttaacatactaggtctcctagctaacaaaaacctcacatgcatgaaaaagcatactggtttttgatgatgatgatgatgatgatgatgagatgatgatctcactctaattttactggtgcaaaaatattaacattgtaagtcatgcaaacttacccctttaatgatataatatgcaggtaagtaccatttaaaaaatactttcaaaactagaaatctatgctgaaaaatactgctttctcattgcagtataatctttgcaggccagaattccaagcaagaacaatcatcttggaaaagataaacatttatataatataaacattaggcattctcttgacctaatactacatccagcaaatagtaaataaccatataaatttaaaatgaatagtcctaaatcagcagtggaacactaaattttatggtcacttacctgaacctcacttgtcctctgtttaatagtatcttccttctccttaaggtcctgttccacattattcttttccctagaagaccagcaaacaatgcaagaatattttagaacatcagctacagctggtatggttatccatcctcctaatcctgaatcgctttttaaatacatagtgaaacattcaatttttaaatgaagggcagatttttctaccctctttcaattatttatgaaataaaaatcaatataagctccatttgtaaaaaaaaaattgctttctcactaaaatgtggtgaaaagaggatagattaaaaaaggaagaggagaaaaataatcaatgaaacactcaggtttcactgatgtcactgttgctatggaaatagtgtccaatgaaaattgctggtaaagaaaaggaggggttgcatcagctctgtaaggttaacccttaggtaccactgtcaaattaaatgaaaatggctaataaaaacagtcaacaatactaaggaaaaagacatttactgaagtgttaatttccccttaaatcactggtgtgcatcaattttagaatgaaacaacagagaaaatgggaaagattattaatacacaggcaatttgctctatcaaaaattacatctcaaaaaaagctattttaggaccatatatcaaatccaattgatcaaatatacaaacagtatatataaagtaaaaaaagaaccacagcagcatttatctcttctgctcttcaaatcaaacatgctgggctccgcttttactttgaaacatcgttacctaaattcttatatgctttaatcaggcctgagtggctatgaacgaatcccaagcaaccttagattcagaattgcaaaataaagctgtcacttttgatgtaacaatttaactgcccatttgtagttgtactgaaatcatgcgtgcacacgcacacacaaacacacacacctcccttcactttcttttctacaaaatgagagaaaaagctcaaagaattctgcagcagtacatttctggggtcgcagggaaaggtaaaaggcggcaacatggagaagggaagacagcatttaacaagtcctccagattagtatagccaagtttctccttcgagcttcaagactacatttcagtttccatctcagacataacccaaaatgtaagctcaggctccatttagctccagcataaaggaaagtgagaaaattataccaaagcagatacttaagggacaactgcatgcttcatttatatttctcaccttcttgaggtgagattttaaatgtagacaaaaatcaactgttttggatacgtaggcacaatgttcttaagatgtctatggaagaaagcatacaaataaagctatttgtacactgttacttttaaacatttgagatggccaaggagctcactaaccgtttgtcagatgggtcgcaatgtgggtcgcgatgttgtgattttaaacagtcccttaccatgagaatcattgttgcagcccgatccttccatacctcaacctatttatcatgcaaagaccatcccccacctccaacccttatataaattaagcaaattcaagaaatacaaaaacacggggaaaaatttctgaaaatacccaacaaattctgcaagctcaatcttggaaattttctttcctccttatgtgagcagatgaatgttttcagtcttgctgcagcatgttagagataagtcacatgaaaatctagcaccctccccccatcccaaatcctcagaggcattccacacaaggtcagtatcaactcagctcctggtttctgaaagtagataataacaaaaatagaaaacactacagtgtcacagatcagcagtgcacacatttgtactgaattctttctgctctgctgctaactgctgtcactgacagtgtctgctcagatcaagtgtgcatgcaggaaaacagggctacaagaagccagtgagctgactcaaagtagccaaggcagaaagatgggagagcaaaggaaggaagctcacttggtgaaaatccaaaacagattacaaaggactcagctctaaacagcaaacacagtctatgtttgggtaaaatggaggaagcttgaggactacaaatttctcttcataatttggggtctatgggggaggaagaggaaggggaggaaaggatggtgttatctctaatcatatcctgaagaccattcccaactaaaaaaaaaatatggagatctttaggcattaattcctcttagtaagaagatcaattaaatttaacttttgattcatgtttatctaataaaattctggtcttacaatattccttttattagcaca

SEQ ID NO: 648 - DNA, 4001 bp, Homo sapiens
gcctcagggaaggctccaggcctcccatggtttggctgataaagctcatgccaaggagcccaggaaacctggatggacagggacctgcgttcagatcctatcttgggcctgggtatgaaagatgctggatgagcagagggttctgtagccgaccccgccagaggaggccctcttgttcgaccctgtttcagttctgcaaactgagaggacgctgatgctggctcttcagctgtagaccctctgggaagactgcatgcatgtgtgtgtgtacttatggtggcactgcaggactcgccagtgagctgacctcccccaagtgtctccctaggcctcctggctctttgctttttgtactctgtatcctctgcccaggtcccctcctgaccccaaccctttaaattctagctcaaagatcaccctcttggtgaagccctcctggaccatccaaccccaccctgcccagggtaccctcctaatgctgcactggaccttgtacatttatctccagcaacaatagtcacaatagccaccacggtgctgtgagcctggtgctgagccccttaccaacatcctatcagtttctcctcactgccgtccacttgtacttacttggcgccacgtgcctagcactgttctaacggcgttaccttcagtcactctaatcctcaaaacaacctcacaaggcaggtactggtattgtccccatttaccatatgaggactctgaggctcaaagacggtaacaggcctgaggtcacaaatgaacgtttaatagagagcaacccagatctgtccgattgcaagcttcgtgttttaatggtttataaacatgcctctgccgctgggctgtgcgcagtcacagagggagtctagagaacatacatgttgaaatggagtggaattaaatgtggtgtgtgtgtcccgggtgggggtggtgttagtctgtgcgggtcaagggtatgtgttatccaaatgaggtttgtgggtatccacatgtctacatggtacacctcagttgtgcagaaatactggactaccccgggtaacatgtgagagagcaacccatacccttgtttattaggactgttgtgaaaatgacgtaggatctgataagatgactcagtgtggaaggaaataaactgccagtgaacaattaagggaatgtggaagggacggctggatctctggtttccttgtttgggaggaccccttttctctccaggggtaaggcggggctagaagcctgttccccttccccagcctcccccaacccccattgtaacacttcctgcttctccatgctctccatgcagaagaggaagtgaggtctgcccctggtcagccccactccccactccctcaacaccagggtgggccctgtggggccctctaggtaggtaggtcaaggtggggaaacagctgcagccaaagattccctaccccagggagggaagagggagctggcttggcctgccttgccccttaggggtaggggagctgtgacagcccatttcccccctttaagccctagatgtaggggtttggagcagggaaggccatcacctcatagaccctggggcaagcatcccagaggcccttccggagcctggacctcgctctgctttccagcccaccagccagctgctgagtcccaagcccctccttgggcttgatcccctgggctgcagctgggaacaggctggagacctggcctgggaagccactgagttgcccccacctgccctgagatcccctgtgactgggctgggccccgatcttccctgggggccaggcccttacctgggtgccagtgaaggccgggtgcctggtccccccaggaggctggtcttggagcaggtggtccggtgctggtggtggaaggacagcagcttctctgctagtggccacaggcagagcctgcctttgatgaggttacagaggcagccacgcctgtgctctttggactctggtgggtggggaggcttcctggtcactaaccgctcaacatcaacctggacctgcggcagtgtctgtgctgactggcgtccccagcttagctagaggcccctgcttccctgtttcccccactgctagccttggggtgtggccccctcttccctctgccttttaggtgcctactctggggaacaggtcagcatcaggcacggggctgggaccagaagaagagagcacacatggcccagagtctgggttctgtggtgagggcacaggtcggctggaggtggactccaggcttgggggaagctgtgggctggcgtgtgtgccatgcctgtgcgtgggtggcacccataggtgtgtgatcctgtgtacctgggtggtgcctgtgagcaggacatggatcttgtcacagaagatggggactgaggcccctggggcattacatggagcgctgagattccctctggcagggccctcattctgtccctactgttgtcccttccagcaggagcccccttaccagccctttctcgctcttccactctctttccttctgtaccccatcttgtgcccagacccctggtggacgcctggccagcttcagcaaagatggaaaacggaggcctgcatctatctctagtcataaacctacccacttcctgcactccatggtatcgaaaaatctttcttggcactcagagtgggccaggctcccctgccctctgggaactcacagtctaaccaacaaggccaggtataaacagaaaccagggagcagggcaggaggggaggcgggggcgggggagtgccagtgagcctcggaccctcgtgggcagaatgcagggtcccggtgctgggccctgtgatggagtgtcctgtggagtctgagggctggagcactcccatctttagcttccctggaactatcccaggatatctcagccttctctcccatcaccacccaaccaacgctgccctggatggcctggagtccatgcgtcagatcctagggaggtgccttccctgtctgggctgtgtgtgtccctgggagagtccagtggacagccagctgctggggcccagggatcaggtgcctgtgaggccagcacccagccacagccccatgggaagcagtcctggggttctttcccctgggtccccatcttgtggcccttcagcttcttttgggatagcacagcctgtcccctcgttgcctcccccaactccgtgaaggccacagtcatatttcaccccagccctggcttggggctcaggcaacacctcatttctgcccagctcaggccaggcccgtccttcccataggaccctccccaagtcagtgtgagcacagcagggactcctgggggggctctggggcaaggtgggcaggggcagagaaacaatgagtggcattcccagcaccttgccctctgcagtgccctttaggggtgcccctgggagcagtgtgtgtctcctcagacataaagcctttgtggccttggtgggtctggggcttggggccaggtattggggacatctgcttctgtggagccccctgagggaagagggaaatcaggaaagagggagaggccaagcttcccatacctggggacttggggccataactgaagcttctgcacaaagctccgggtgccacagcagctcttctgcaagggagttcggctgaggcaccaggagctgggacttaggttggaggggaaggaagcaggactcgaagggcatgtccttgaaattgtggggttaaaaggctgtgggaccacattcgttcattcattccacaacttcctgtagaattgagggcttcctgcctgctaggcactgtgagaggtgctaggatccctctggagggcttacagacaccttggaattcaagctgagttcattatttctcagcaaaccatctcccctctcatgctcccatctcagggaaggcatcagctcccaatcgtgtgttccagcagggaggggagtcctccctcaatcctcacacccaatggactacccttcctgcagtcccagctc

SEQ ID NO: 649 - DNA, 4001 bp, Homo sapiens
ctgggccaggactggggtaggggttggttgccacaaatccacaagccatactgaaaatggccacatagactaggaaacactttcaggatagttccaagcctgcttcaagctctaagaaagtcaaggtaactaaatcccaagtcaaaacatcaatagatacctatcatccttttcaactaattcatatcctccaaaggaccagaagttgcagagatgcccctgttagtgatgtcttttgcataaagaaacacctagggttggaactaatatattcctgtctaccattccacacatttaagactttcttctactcagatcccctgggaaaaggccactcaccaatttaccccaccacaaagaaaacactttttaaaatgaaagggaataaaagcacttttatttggaaatttcaagttggaagaaaagctcttagccaagctctatgacctagctagctgattatttacaggatctttgggcaggaattgttaatgagcttttaatttggagtgcttaagttgccaaagtgctctgagctccagtgaagcaccacagaatctataaaggaaaccttatcaatcacttcccggcagctcccttcccccaacccccacctcctgaggaaaaggcagccaagtgggtttctaaccaggatcacagacacacattagtggagtcacactccaagtccctgtttataaattggcttttaaatggtaggagattcaggtataataaactaagctccaagcaagaacccactaaaacaaggcatgctgtatatgataaagtcagaataaagcagaatttgatgaagccaatttctggaagaaactctacaatcaaaactcatttagccactcacaacctactatagtttgaatagcgtacactcttttagccaataggattcatgttttgctgcccttccgctgggagactgattaaatgtctgacaagagtaaatgccattgaagtggccagagacctctcgcagacacaacgatgggcactatttgttgcaaaatccagctctaaggacaaaatccaaacccccattgaggggccccacatccagcatcttccaagtcaacaaggagcagttatattttgcaagaactcgcagtcaagcctcaatccaagttcatgctttttttaagaaaacacctgttgctggaccatttgcaagacaggcaaacagaaagctagccaggttaggcccttattcactccttccaccatcactactaccaccgcttcagatttacaaagaggtaaactgctaacctggtgtgtgggcatgtgttggcgagagggtcaagggaatgttctacccacaatctccatgctccatttctagcctctctagtcaaacctttttcttctctagtaatcccagtaagtcaacccccttaataaactcacccatcctgtcttgcaaagctctgccccgctccccctccgccagaacattactcagtagattaagtaagcatccagggtaagcacatgggccagcaccccaggttgcataaattctgcgcaccgcgaccctcaccccgcatgcattaaccagggcccaatcttggcggggccattcagcatcacccaccccggggtgttgcccccaactcgggcccatccaagtccaggggagagtaaggggaggggcggggggccaggagaccagccctccttcccagggccgcccccgccccccgtcagcagcgggagaggctgtcgccatggcaacgccccctcctcggggccagcgcggcaggctccctccaggtgcaggccccgacgtctccctcggcctcagcaagcgctcagggcagttggcggcggcgggcgcggcccgcgccgactgcggcgccggccaggcagaggcagggccagctccgcccgctccccaccgcccgttcccggccgcctgaacagcggcagccagcaccacgagtccacaacacaccgactcacctccgcgcactctgaccccgaccgacgcggcggacgggcgggcgctgtggccaaccgctgagcccgctgccgacccctttgaccaatgggctgcagtcaggcggggcttcttctccccaaacgctcgctctcccgccgacatgcgcgctaaggtatgtcaagatggtgactcccggccgccggccttatgggacttgtagttttgacgttgcacaaactcagaagagaagacggggacggggacatcacttctgatctgtgaaaggaatttttttaaaatgaaactttctatggcctacagcgatctaaccaggatcacagacacacattagtggagccccccatctccgttttcccgccctccaatatacccgtaaggtgaatgtgggctcacaacgtgacagaattctatttacatgactcctcatgattcgttcattcaacaagtaattattgtcatctactttcggatgtgggcctgggggagacctgagacaaggagggattaagctaagaggaaaatgcttagatttgtgaagggccgtcctaaggaagagggaactggcttgttcaggtccactcagaggaaacttctgtttaaaaggtttctggcctcagctgtgaggagcttccccagtcagtctctccagtaagctggagagacctgtgtttcttcatcctggttatgcctttctgggtagtcatgggtcccaggttatgagctgggaatgatggctttgacagcttcccaatcggtcaggaccccatcctctgggcccagcttcagttaccaagcccctctgtgtgctgtctgcatacttacacttaggatgatgtcatttctgggccctaccacctctgagagcggaccttaccataacggtttccacctgagctgagagtgcctggtaatccccatatcagggaatgccttccttaatcccacccacgtcataggttaggtgattctgctgtggacctatagcatttatcatattgtcttataattgtctgtttccttgttgtcgctcccacagggttttaagtcctttaggaaaagcattttttccatattgttcatgttgtatcagtaatacaccgcatagggcaggtataaagaaggcccgcaataaatgtctgcgaacaaatgagggaatatccagcagcagggacagacttatcccgaggtcagtaaagtggaggcactatcccccaactcttggagctggaacagattctcctattattacctacacattaaccccagttggtcagtcagtccatctgtatttatagtgcctctcttaagtgtcaggcactgtttctgttgctgaggattcattgatgaataacgacacacctctattctcaaggagcttttaaattggagagggaagctgggtgtcgtggctcacgtctgtaattctaacactttgggagtctgaggcaggaggatcctttgagaccaggagttcaagaccagcttgggcaacataatgagattctcatctctacaaacaagttaaaaattaggcaggcatggtggcacgtgcttgtagtcccaggtactcaggaggctgaggtgggaggatcactggagcctgggaggacaaagctgcagtgagccataataaataaattggggaggggctgtaggaggaagaatagataataaaacaagtaaatataaaaataagacaagaggcagtgagatagctttgttatatactgagttatggcctgagagtagggcacagccaatcttcttggctgtaagaatgaagtaaatctatagtatctggattcaaggctttatgtaatgcccagccccaacatcctctgtggagccttccatggtccccttgacttccccagaatgtgttctttcctccttggtgcactagggctcaactgtacagcttccaggacttcaccacactgtaagttctttttgtacaaagaccaggcaaattgattcaaataatagaacagtttaacagctcagtatacacttggtatct

SEQ ID NO: 650 - DNA, 4001 bp, Homo sapiens
agttctaacacaattttcatttccgaatacatgcatctctagattggatgcaccatccggcaataccatttattcagcacacatttgttgagttttattttgttctgaacactgtcctaagtgaagggatcagagaaattaatacaatatggtgcctacttttcaggagcttaccatttaagtgcaaagtatttgttgccatcttaacacctttcctgaagagtaccatgaaacatactcttgcattaaatcacaaatttcccttttccccataggcttggaactaatggaacttcagaaaaatttgacttcagtttctgaaatcttaatcatgcacagtttaatcaatagctacatttttctcacattttaaaatagattattaaatggtctaatcagattctaactagccaaaaacttgaaaaacataggaagacaaccatgactgacatatttattttcccaaatgcaaacatactgcaaacatcagctgctgaaaaatagtgctatttgcatcttacgtagcatcttacatgacccacagataactaaaaattgcacaggagttcagcatcaaaatgttaaaaagtacctaaattaaattcaacttgagataaaacaaaaagtttatgtaatcatagctatatcacttttctaaaagttctgaaactgatttccaacgtggcaccttatatggctttagttttttcaaacattttcatttacgccattacactcagagaattcattaaaaagtaaaatcttgaagtttgggtataagttccaacacaacgactaatgtggtacttcaaacatcacaaactccaaatgatctcaaatatgttgtcctctgctaatttgctgctcctaaaaatgtgcaataaatgcaattaaaaaggaaagtgccttcaatttaattgcaagattgactaggatatttatcttcttactagatgtatcataataaaaaatcgtctaatatgcattacattgtttaattcaggaggaaattggatattctcccttccaataaaaaaagaaactttttttttttgcaacagccaataatgacggtgttctttctagaatacattgaaaattgccaaaataggttatctaaggggttcacctacctaaagcaactgaagatcatgagtaaatacacaggcacacaactcctccctctcttttcctgtgccatataaccttcctttattaaaatactttttaaagacccttatggtccttttgagattgggcagaaaaaaatccctgaaataatacccccttttcccaatgaaacatctttcaatactgaatgaactcacacctcgcttatatgtaagctaaggtgagaatgcatctctcattctcaaatctccaaacgaattcttattttggtaacctcttcttttgcatctaaacacacatgttccacaccacaggatcttcttgatcccagcgaaggtccttgcttaatgtatgcgtttttcacttccattttttaatccttccagggtgaaaatttcaaaaggggcgaacgtgggtgaaagaaacgaagaaggggagggaggagacatgatgcctgggatttctgccatcctcgctgcaacccagaattcgtatatattttcctctccccagccctccccctcgctcccctctcgccccttccctccgcagcaggagggaggaggaggggcagctggctgaagccgccacctgccacagcgtggaaaagctccagttgtcacttacccagcggggtgagaatggctcatttttgcaggatcccttttggaccccgcggcaggtgcggagggtgggtgcgtggggccccgtgcgcgctggcgctgcgacagtcgcgctcgaggggtggctccgcaccgaggtcccctgtgcgcgggcacctgggctgggccgccgccgcccctgggcgcccgggctacccgcagcctcccgggctcccaccctccgttggtatccacagcttccctgttgctaagggaggagagaggcaagcgcccagggtctggagaagcggaggcgctactggaaccgagcctgcggaagctggaagtgaagccagcttctacccctttttctgggccctgatagggaggagacccaagcaagcccctgctctgttgctctagggcgcgagttccccaggtatctgtaacatgaaaacacaaacacactcgtgcacacacacaggcacacccacacattttggctggcgtgcttcctgctaggccctggggaaggaaggactgggtagcggctgagggtaataagagcagggagcagctactgcgtgatgcggtggtttccagtgctaaaacagcgattgcaaatttgagggaaagaaggacgtctctcaatctgttttgggttttgaatttgtttctgcatctgtaaggcattacaatcgactcattttctccttggaaaacccctatccttcttcctagctgaggtccccacttccagtgggcagggctgacagagctggctttcagaagatgggggagacgcagttattcagtaaagcacccagaaacagtacttacattggaatccagtacatggaatgcagggcttagatgaagcagcctggatttaaaggaggatctgaatgtggaggaagtttaagcactagacttagataacctattcttgttttgttcatgcttggtcaggtgttttgcagaatgacttgatctctggcctcaggttcctcatgtataagtgaagggttggacgcatcagtggtgactgagctttctagggtctctattctgggtcagccacatttagaggtgggaagagcatcacctcattaacgtcattctgcttttcctcacgtggtaaagacccactgagtatgacagagttcaaactccttagtgtgacattcaggggccctcatcacctggccccagtgtctttcccgagcctgtgtgaccactttctccactaccttaaactctagcaaaaccaaactcttgcgctatccctctagtggaaacatactttcacccttgactacttggaaaacttctattcatcctgtaacacttagcttaaacacttcctctttgacatcctcaggtgtgctaatgactctggcctcagggggccactcggctgggatatgcctgttttgtgcttaccccctgtataacacttgctgaagtagatgctgccttttctactcaaatgcaagctcctccatttcattttgtacatctattccatttttctatattctcagaaggaagcaacagtttaataaatgtttgcagcatgagtgaagggaaaaaaggaaactcttgagtggtggcatttgtaacgagttgttactaaatgctctcctcagccttttattgagcatttactatctcatttaatcctcatcttcattttatgagacaggtttttttctccatttcatagctatcaaaactaatacataaagaaattagttattttttctgacatctacagtggcttccaatgggaaaaactaggattcaaatccagatctatctgatttcagcctacaaatgcctttaacaattacaagttgatttacttttccgtggcccctataaattgccagagaagccagatattctataccattacaggttttggacctgagtgaccagagccattccaagaaaaaaaaaaaaatatgatgctagcccaatagcttaggtcctgagactgaaggattcaaggctgcttcagagcccaactggccagagctagactaaggcagaggtcatctccccgtgtcccctaccgtatgtctatccccactaacattggtttccatttgaggttgcccttaatgctcactgtaactagatttcacctggataaaaatcgggactggggaaggaggaggaggaactagaaagatacactgtaacttgccccaggtgctgccaatccctaaggatggtgtaaataatgtaatcttatatagatac

SEQ ID NO: 651 - DNA, 4001 bp, Homo sapiens
aaaatgtcaaatcatctgtaattcctccacccaaagataatgtttctataaatattctttctatgcatgtacataactttttgtaaaacaaacaaacaaaaaccatgactgggcacagtggctcacgcctgtaatcccagcactttgaggtagaggtgggaagattgcttgagcccaggagtttgagaccagcctgggcaacatggcaaatccctgttgctacaaaaaaatataaaaataaatcaactggctgtggtggtatgtgcctgtggtcccagctacttgggaggctgaggtaggaggattacctgagcccaggaggttaaggctgcagtgagccatgatcacgcccctgcactccagtctggatgacagagcaagaccctgtcttaaataaataagtaaataaatactttatatactgttttgatacctgatattttcaccaagtgctacattatgtgcatttcccaaggcaatcaaatcttctttacatgactttaggattccatcatggacatagaattttagaagttaggatataagatgtaaaagctttaaaataattctatattgaggacatttaggttgttttccaatacatcgctattataaacattgctataagtgacagtggattgagggctagaatcagatggcttagtcctagtcttggcttggtcccttactgctctgtgattttgtaacttttttttttttttttgagacagagtttcactctgccgccaagctggagtgcagtggcatgatctcagatcactgcaacctctgcctcccaggttcaagcaattctcctgcctcagcctcctgagtacctgggactacaggcgcacaccaccatgcccagctaatttttgtatttttagtagagacggagtttcaccatgttggccaggatggtctcgaactcctgacctcatgatctgccctcctcggccccccaaagtgttgggattacaggtgtgagccactgcgcccagccatgactttgtaactttaagcaagtcacttagattcttaggccttaagtttcccatctttaaaatgggaagacttttcatctgcactgacaaattgccctccagaaagtcatatcaacttaccaaagtatcctatgaaatttcttgttttcccacaaccttaccatcactggatattatcatttaaaaaaaaatttgccaatttcatgagtaacaaaatgccatccctttttttttgtttgatggtgattcatttcaatttgtatttctttgattactcactggttatttggactttgtcaattacctgtctatgtaatttgctcgtttatctattgggacatttatttcttaatggtttgcaaaattctgcatatactaaccatttttttccactacacatgttggaaacatggcagttatttacattttaagtttgaaacagtttaatttttaaaacttctaaatcagaaaaaagattgtaacagatgttctcttgacagtcccaagcagtttaatatgaccctgcaaatctgcaattgatcagtctaaaagcacacagcacagcgtccagcaaatagtaagagctaaataaatgttggctttaatttaataatgatgacaatactacttaaataagagtacttcaacaaaacccatccagcaatcttgtcacttgtctccttttgtgtttctttagtgatagctaacaactgccccatttcacccttgaaaatgttcttgtgcgtaaggagaaaggggattatttctctactaaacctgaggatcctgagaaagttaaaggactaaaaagcatgaagagagagaggaggactcaccaccttctggatcagggacgcttgttcctctcacaggcaaagctggagtttgcaagctgggaacactccttccccatgcagagagaccagggagcaggcaagcgcatcaggaaggcctagggatgtgggccgggaaaagttcatattttatgaaatatgagaggccagggctctctctgcccccacagaactcccttctcgctgtccctgtaaaccagcaagccacaccctgtctgtatgcccctgataaaagaacagagcaaagaggaggctcccaaaaatgagggaaccactgagtatgactgaccgggtaggaggcacgtttgcccctccactcccttttcctccaatgctgccaatagtaattccctctgatgcgttttgatcctatcacattctttctgaaaaccttccccctttacttttcaaatcagagtaaattggaagattggtttcaaagacatccaccaattaaccaccttctttaactcactatctttatctccagctacaccctgacatgtgccttctgataagcaagcttgctgttttccaacatgtgataaacgcttcccgcctgtcttgctttcataatatccttagctgtatgttcataatctccataattatatcattaacaatacattacacatttttatgtcctttgaactttataaagatggagcccattgtacataattcccaattattccctttttttattcaacattagcttctgagtctagcagacatctgtggtggcccacaccatgtcccctcagcccacccaattttggtgtagctgagacttgcaggcaagctgctagcatgtcacctcataggccatggcatttttctgcttgcctgtcttggggctttctacaaagccttggaaggctgtgcagcccagaagttcaccaaagctaacacctcggagacataaacaacagtgagaggagtcaagacaaaatgctccaggcttgcaccttcagctctgagctgtattcgacatgattcctctgagtgttcccaatgggagtgagcacggtggttcatagtggtaagtagctccgtactgcaccttttattgacttttcttccttttttgctcattcccatttctgcttcctgggattacctcctaaatacactcttgaactgaagtacttgtctcacacctcacactctgttctgggggtgtacaaattaagacactgaaattaatccaggttgtttcacagagcactaggatattcattcactgctatatagtagaccattatataaatctaccaacagtttctctcgtcccttaatgatagaaatgtgggttgtttctgggctttagcttttataaataatactgtcctgaacattctttttttttttttgagacagagtctcgctccgtcgcccaggctggagtgcagtggtacgatctcggctcactgcaagctccgcctcctgggctcatgccattctcctgcctcagcctccggagtagctgggactacagacgcccgccaccacgcccagctatttttttttttgtatttttagtagagacggggtttcaccgtgttagccaggatggtcttgatctcctgaccttgtgatccgcccgcctcggcctcccaaagtgctgggattacaggcgtgagccaccgcgcccggcctcgtgccctgaacattcttgataggtatttcctgctcacatgtgcaagaatttctctagagcaccagttcttaatgtgtggtccacaaacacttgaagtccctgaggccctatcatccaggttaaaactacattcatcataataaagacgttatttgcctttttcacggtattgacattttcaaggacactgcaaaagcaatagtgggtaaaacagctagcacaaatcaggaagtggcaccaaactgtagtagaagttacaaattttattaaatttcaactcttagatacacatctttttaatagtttgtgtgacaaaatgggaaggatgcataaacagttacgctgcatatcaaagtatgatgactttatcgaggaaaaaaccttaagtgattgagttgtgagctgaagtaatcgcttgactcatggagcaccattcttacctgaaagtacagctgaaagacaaagtataattattcagacttg

SEQ ID NO: 652 - DNA, 4001 bp, Homo sapiens
cagtggctcagtggcaccactacttttccagtcttccatgtggcttttccactcctccattccctatagctggtttgtttttagctggcttctaaaggtcctgccgtgtcttcagctgtaatctagttcatagcttatatgaacgttataaaccataccatgtgacacaaatgtaaaataccagtactacatcaagatttctgaaatagactctgacttggttacttttattaataataatcgaatcagcatttgtatagggtttttaaaaagacatttaatgtactttcctctgattgctaaagtataaacgtttactgtagaaattttggaaaagctgggcgcaattgctcacatctgtaatcccagcactctgggagactgaggcaggaggatcacttgagcccaggatttccagatcaccctgggaaacacagtgagactccatctctacaaaaaaattttaaaaaattagccaggcatgatggtgtgtgcctgtagtcccagatactttggaggctgaggtgggaggattgcttgagcccaggttacagtgagttatgatcacaccactgcactccagcctgggtgacagagcaagaccccatctattttttaaaaattaaataaataaaaaataaacattgtgcagtagatctctagaactttttcaccttacaaacctaaaattctataccctttaaacaattcctcttttccctctctcctagccactggcagtcaccattctactttctgtttcttagactttgattgctttagatacttcatatgaatggaaacatgcagtatttgtctttttggggcattgtgctcacttttaaggcttttgatacctagtactaaactgacctccagaaaggctgttaacgatttacagtttgactggaagcgtgtgtccatctgggctgagttcattgcttgcttagcatctatcagttgtttcaattcttgccagtttgatagaggaacaaatagtggacccaaacagggttttactttggataaggccattgtcctatgaatcctggctgaaatatttgctccagcacttagaagctgtgtgacccgggacaactcacttaacttttcaatgcttctgttcccttatgtgtaaatggggataataatatacacgtatacattatacacacttattatgaggaattagttaataaatgtgaagctgtaagaacagtgcctggaatatagtaagcccaaatgtaaggtagctattatcatttttgtcaatccttgctaatgtaatacctggaaaattacagccagctattttaatttacatctcctcggtaatcagttgaacgtgaatgttctctgtatttatactggctattggtacttctgtcaagatttcctttttcaaagcactgtggcaaacgggatctcacttgatcctcccaataaactcatgaatgaagaaggtggcaatcatcaatccccacttttcgaattaagaaattgagcctcggaattcgaattctgagcaattccaattccaggattcggatctcaccctctaaaacctagtagctgttgcagaaaatataacgggaaaaagctttggttagccgtaaccaccacccaccccggtgtggctccgcccctgccccgccccggcaccggcttgccccgccccgccctctacgcgggtttccagccatcctctctgcgcacgcgcggccgctcctgcgggcggaagcctcctggcgctcggccctgcgcccctccccccggcgcgcggccccgcccaggacgaggggcggtgggcaggcagcgctgggtccagtggtcgggggaaggcgaggattaccctcccggaggcgttgtctgcgactcggcggaggctccaacttccagtggcccggtcgggaaaggtacagactcccaagcctcttggtcggcggctccagcgaccgccattttcctccaggagagggaagagggcaggaggcgggggccgtcccctggggccgggcgggccggggcggggtcggggggccgggcggtggggggcgggcccggctggctatggggcccggccccctggccccaggagcggctgctgcggcggagttaggccggccgcagtgggaaaaccctgggcgccctctgggtctcagcgtcccattaggacggttccgcgctgggtgccgcacgccgcacagtgggcaacgctttcacaggggtctttgcatttcacccgcacacagcagctcctggagggaggccaggaaaacacttaacccattttgcagacagaaaactaaggctcaaagtggggaggagacttgcccagggacacccagcgaggttgtggccttgggactcggttcctactcccccacatccagcgcccttgccaccagaccactctgcctcacctggcaaaggatggggcggagctaaaggattagaggagtaactggcagggtattttttgttttgttttgttttgaagatctgcctctttctgtaccacccagatcagagcctcctaagaaatatccagaagtcaagccatggatccacctgcacgtaaagaaaaaaccaaagttaaagaatctgtcagcagagttgagaaggccaaacagaaatcagcccagcaggagctgaagcagagacaaagagcagaggtgagattaaggcggaggctctgtatgcctgtagtctgctggagatgatgctggaatagagaaacagcagaaaggagaactgacagcgagccatacttgcctccaggcaggatgggtgttctcccaggtttagaggggacaacactgaggttcagaatggtgaggtggcagcccagaatcacatgccaagttagtgtcagaaccccagtctggtgcggagcttttgtggtaagagacccaagggaaggaagaaaggaaaaaaaatgatatgtaaggggaaagaaggggtcagaatgagagagagcacgcaagtgtcagacacccccagtacagatgttctggatttggtgcggaaagcagctactcatgccaggtagaggcccaagctttaaactcaccagtgtgttcctttgttctctcaacgattacaatcaacttgagaataaaaagctttaaactttaccctgccaatattgagccacatacagacataagtattttattttagtatttaatgtcagggaaaatcttgctggtctctttttccctctttgttttgtttatctgtctgctttgttcatttcctgtcttacatccttttacttctccatggacaactacttttttttatacttttacattcaaatatattaatagatatccttgaacaatatacagtagtattttaaatttttacattaataaaattcctgcattttattttgcattttgcttacattgttttttagaactattcatgccaatataagaatttagtttattctcattaatttttataatagtctattttatgcatccattttacttagtatatttattcattcttacagagatgcacatttaaattatttatagtattttttgctattacaaacattgctgtagtgaaaagcttttaggtgtctcctttggcacctgccttagaatttctgtaggttatttaactagaaaaattactgggtacattctcaattttactagacattgccacattgctttttttttttgagatggagtctctttttattttttattttttattattatactttaagttctagggtacctgtgcacaacatgcaggtttgttacatatgtatacatgtgccatgttggtgtgctgcacccattaactcgtcatttacattaggtatatctcctaatgctttccctcccccctccccccaccccacaacaggccctggtgtgtgatgttccccttcctgtgtccaagtgttctcattgttcagttcccacctatgagtgagaacatgcggtgtttggttttttgttcttacgatagtt

SEQ ID NO: 653 - DNA, 4001 bp, Homo sapiens
agcacctgggaagccaaagtaagaggctcgctggaggccaggagttgaagatcagcctaataacatagtccccatctctacacaagaattttaaaaatacaggtgaaattataaaacattaattacacataattagtggtaaatgaaaaaaatttaaaatgaagtttctagacagataagcataaattaatatgtgctatataaaaagagaaaatgggaactctcatttcagaaaaatatcgaattgtaaatttcactcagaaacactcaactagtgactagaaaataattttgccaaagacaatttggaaaatttactttagtaagtctgcccagattaccactatctattccatctcagtgttttccaagtgaggtccaagaggtagtcaaaagataactttgctacagttatactgtacttgcaatgtttgtttaaaatgctgatatctgggccatattccagatccaatcaatacatgtggaggtagggccagagaatctgcattttaacatgttccccaataccaaaaatttgccccttttatttttatggttcaaacacagacacaaacggactattcaggcactctgggatttagtgcagggcaccataaaaccatgaaataaagtgactcaattcagaaaaacatgttttcacggttacactcagagtcaccttcaatttttcttggatgagcactaattgcttcaaatgacatctcccctcatcatcaggccacctgagaccttcgttttatttttttggccctcagcagtgctgcctccttgcagcaggtgcagacaacaagcagcagcacctggcaatcaattcaaattctactgaatagaagcaaacacctctctgaaggcgaaaggatctggtcagctaagcctcagatttctagcacactgagaacacttgtaatcatcgcttcacatcaacaaccagccagcacctcacgactgccagagccagagcctccatccacgagccacaacgccccactcagacccccccagtctcgtattgggacttacctggcgatgccacttggcagacacagctcagctgggtaaaaataaagcaatcttgagcaagggaaggtgctcgaggaagagtaaaagcccagaaagctctagtccgacagttcgagtgaagtcttgccccctcccaatcccctgcgcctggcggggcctcgggggtctgcggagtgcccccaactctcagtctccctccctcactaactcctgaagggaaggacgtcaccgtttctctgggcgctcgctcccttcgcaagacagccgaggtggttcatgcccgtcccatctcccgccacactcccagccgcttaacacatccgagaggaaaaaacgaaaacagctcagggggaccgtcaccatcttcctcttttgactgccattacccggagtgtcgccgtccccccaccctgcgggcggttcgcagatgtttcccgcactggacggtcaggtctctgctccccgggttttctgctcgccagaaatcacctcttttctggcccggccctgcccggccctccccgcgtcacagccgcggcccgtgtgtagcggccgcgggtgttcggccgggggttcccggcccgctatcactcgggcttacctgcgcctcgacgacgctccgcaggaagctcagggtgaccagcagctgcaccgcggccgctaccccctgcccagcgcctgcccggcggaccccttggctcatgctgacctctacccacaccgcggccagccggacccctcggggccggggaacgacgggcggcccaggcgacgacccaaggggacggttcccagcggccgagcgactccagggtcagaggtctgcactccagtccggaggcaggcgactctttccccaacacccggcagctgcgagtgaggcaggaaaggcgagcgcccccacttcatcccccaggcggccccgcccccggctcgcttggctcctcggccacgcccccaagcgcggggccttgtgggagttgtggtcctgggcggtcgcctaggcgccgcggcaggaaggcggagccgctgaacgagaggactcgggaactacaactgcgaaggccgccccgcctccccgaggcctcgggctccgcggcggccaatgaggcgggaccacgcgggcctccaaaacaccggggggtgcgggcgggggaagcggggcgacctcttctccgggaaaccaggctgaggacctctctgcgtcggtccctgctgtcgctcctggagtcctcgcagacgccaggctctaggattcacccagtacgcgggcgagttaggaacggacggtgcgggatctttgactttcggtctgaagcgtattctttgtctcattcatttttctgtagcctcacatctgctgtgggtgcctatgtaagctacctgtgacttgtagagatggcttcggctcttttttaatttcatgcaccctagatgtggatgtcatctcctgccccgccccagcccgactcctaggttgacacgtgcgagtataacgcatgctaaagaatgaagacaaacccaaaggcttatgatgaaatatggggatggggtaaaacaaaaaaaaacttagagtgacatagattgggcgcagatcccaactctaaaacattctagctagttattgggccttaattcccacctcatatcttgttctagggctacataagattagatacagaaagagctgagtatagtgcctagcacctaggaagcactcaataaatggtaactgctattagttttattaatgcctttgatttctacaaaacgagtaatacatctcccttgtgtttatgtagcgtgtattagtttctcattgatgctgtaagaaactatcacacatttagttgcatacaacaaaagaaattcattaccttatagtactggagatcaggtgtccaaaatggacctgtagggctgtgttccttttggaggctctcagggacaatgtgtttccttaccttttccagcttccagaggccacctgcattccttacctcatgacttcacatctccttcactctctctgcttccctcgtcacatgccttctcttgtgaccctaactcttctgtctctcttgtataaggacccttgtgattacattggttacagaccatcctatctcaaaatcctcaacttgatcacatctgcacagtcccttttgccatataggataacatattcacaggttccagagattaggatgaggatttataaatagagggtcattaatcagcctaccacatagtggtttatacctttcagaaccagcagagcattaaaccaaatgcagggtcctggggtggctgactgcataggtcacatgcccatgaagccagtcctgcctgtccttttcccctccagcaactctttcccttctgcctccaaactgtccagatcttccctagcttaaaagcaaaaagaaattggctgggtgtggtggctcacacctgtaatcccagcactttgggaggctgaggcgagcagatcacctgaggtcaggaatttgagaccagcctgaccaacgtggagaaaccctgtctctactaaaaatacaaaattagccgggcaaggtagcacatgcctgtaatctcagctacttgggaggctgagacaggagaatcgcttgaactcaggaggcggaggttgcggtgagctgagatcacgccattgcactccagcctgggcaacaagagcgaaactctgtctcaaaaaaaaaaaaaaaaaaattgttgcttgatttttccagctacttttccatgtctccttttctcttccaaacctatacttcctatctgctcactgccttcttcccttcatataaatgtgcttttgataagagaaactttttatcaagtttggtagactttttaaaagattccttgtctgtgctgtatttgaggttgtcaataacacatacttcctggaattttgttatgcaaaacttcttttttta

SEQ ID NO: 654 - DNA, 4001 bp, Homo sapiens
cagttttacccgtcaaaaatatcaataattcaggcatttcataacagccataaaaaaattaaacagatttgctttccaacccttatcaatgactgctccaatcctgctgagccttaaaaggtaaaacatgctttcatgcaattatttatcaacatcaactatgtgcaaggctgcataagatagaagctatacaaggcagagtgcctacccttaaggagtttacaatctaatatatctgtcaggttataaatcgttagtctaagacctctatcacttattatcgagtgtcccctggaacacacaggtgaaaataaacttctgcttgaagcaaagggaatgacaaatagtttctgaagtccatgctaaatcctttgttatttttcttcaaacttgctaatatctggaaaagaacttgcttgataacatattggtaaccaattatagccagcatgttagcaagaaaccagcttcttttattttggtctttgcaaaatttgatcatttgctgatacctagcctgtctttggtctctgttcaaataaaatttcacttaaaactgtatattgtaattacagaaatataagaaaagaaatgcagttaaaaaaataggtacggtgaacttgggatgttcagtctcaacaaatgtgtgtacccactgcattcttacacatttataaaaggttgaacatttgttctggaagggaaaaaaagggcattttaacctcacctttcttcacccctgacagttgcctagaaaccagtcttgccctacctgtgttgcaggtgtacctcaagtcaccgacacatctcttttaaagctacagtctccattctgacttaagtttatgactaaccatctattcatatttttatcaggtaagagactggtttctttcaagcaatgatgaaatcctaataaagacttagcaagcactaatacagcaccattcacggttaaagagtcatctaatttgtacagggctatgatatacatataaatacacacacaaaattcccaataagcattcacgtcttgaacacataattttgcagtccgattccattcaaagccgtacttaagacactcagagcaaagaatcacgtttctaggagagaaggaagagttcagaacagcttagacgaatttttaaatactgatttcggcattaccatcgtcgctgtgagattaggcagagggagcggggctgaccgccagagaaccggtaccaaccaccgcaagcaatcgccgagcctcccaccccagctttcaagacaggatttacgggtacacggtgtgaacaagacaacgcaaccccctttttacaaataaaaaaaaaatcaaacaagcccccaggcccgaagacgctcatccccgccgggcaaccccgcgagcgcaggctgcgggacgaggaccttcatgctcgccgctcccgaacccccgtccgctcctgcggtcccggtgctgcggggacgtatcccgggcgctcgggtgcatggccccggccagccgaggggccgcgcgacgaccacagccggcgtggagaaggcggcgggcgccggcacttcgcggcgtccccaggcccgggctgcgccgccggggagggtcccgctctccacacctcaatggggagaagcccgcgagcgaccggccggcctctccctccatcccagagactccgcgtcgcggcgaccctccccgcgccctccacgcccccgccctcgcgtcggggagccgcctggatcccggcgcccggcgcggggccccctgagggaacggagcgctgcgtggccctccccaccccctcagcgcgccaggccccttaccccggaggagcggcggctgccccgcggcgccctcccgcgcatgtccgtcccggctggctcagcgccgcgggctcaggggcccggacatcgcgcaggcgcctcttgctggctcgcgctcccgctagcactctgcctcgcaccggaccgccgtcgccgcggctgccgccgccgcctctatatatagcataggccgccgggccgtgaggtcgccgcgtcccgccccgcctcctcccgcagccaatcagggcgcgcgccgcttaaaggggcgatgccgtggccgaggcgttgcgccgggcccaccgtggcgtatcgcggcgctgcagggagccggctttgtctcccggagaggcgtctccgggctgaccgcggccgcagctccgctcctctgcctgagccgtgcggcagccctgggagcctctcaacgccgagctttcctcagaagcccgcggcgacccgggcctcggccgctgttcctgcccgaactgagggcacatcgcgcttcgcgcgggatttcccataaattcaggctccgggcaagattgtgtgttttttcctctccgcgggccgccgctggccgtgtgggccgaagaagccctggagggggagaggggagccgctctcgactgggcttgcggcgtgggagggacagtgagggacacttagggactgtgtggggcagtgaaggatagtgtgggatgatgagggaccgtgtggaccggtgagcgactgtgtgggacagtgcgggacgatgagagacggtgtgggacggtgagggacagtgcgggacgatgagggacagtgagggactgtgtaggacagtgagggacagtgtgggacggtgagggactgtgggacagtgagggactttgggactgtgagggactcggacagtgaaggatggcaagggacagtgtgggacagtatgggacagtggacagtgaggcactgtgaggggcggtgagggacaatgaaggatgtcaagggacagtgtgggacagtggacggtgaggtactgtgaggggcggtgagggacagtgtgggactgtgagggatggcgagggacagagtaggacagcaagggaggatgaggggacagagtgggccggcgtggggcggtgaggctacgcggggggaacccagggctcctctgactgcgttggaatatggaggaaaggtcctgctcgaggttgagcccttcagggtcgctgtgggtttccaggaggagctccctcactactgacttagggggccctcggcttcccaggtttgtgtttactcaggcgacctgagctggccccgacgtcttttggctttggagaggccacggatgcccaaggacaaagccccagcgggcctgtgggaggaggtttctcggggcgccagtgatgcaacttaggcttatagtttaaccgtaaaataaataatacaaatgataacaaaccaagagtgactaaagtcagaaaaaaagcaaacagacggaaaccctctagttttaactagaacaaattccctggctggtcctctgttgggagagcccagagacctgtcgctgacctctagcctcctggagcccctgcttgcacttcagcaataatgcctgatagttagacactgatcactagctaattggggtagtttaacatatggaatgagattctggccttattatcaggttaactattaactctacaccccatgaaatgatttgcctttcccccactattatttacttacattctttttaatttaattcaaaggcctaattttgaattcaaggccttaagcacgaaaaggaaaaaaaaaagaaaaagaatctgaagtatctttgccctctctcacttgcaaaacaaacgaacgttttgcagagagaaatctggcttcctttctgatggctcttctggcttacaaggggctgttgggtcattttcatgcctatgccatttgtcaacaattcagttaacctatcttcttacagccattcatttagtattattttaggatgatggaaatgagtcacaactaattgcagagttccttaccaactaactaggttttttgatccaaagaaaatctgtcccgattttcctcccattttggcgtcatttatgtttgtggcttacccatatgctgttatcagtgtaaaaaaaagatgagtgtgagaacttgccagggtacat

SEQ ID NO: 655 - DNA, 4001 bp, Homo sapiens
gctagcgggcacccaggcagaaccatggtgaaatgtgacctaagccccagctcctgagaaaggcgctcccttcctattggccttggggactgtgggtctgaagctccaggggtcccactggctctgggcctctaagtggtggaaactgtaaggagagggccacaggcctgtgggctctggcctgtgcctgtccaggctgtccaggtgtccaggccccaggagcctcgtgcgtggtggaccacaccctaaagcagcttatctctctgggctgggcaagcccaaggatccaggtcatcccccccacactttctccccccacacccaagcctgcccagcccagagggcaggagacgataagctgggcccaaggccacctgcttctcccagctcctctgcactggccagagaggcttctggccagggctggacactggatctgggaggcatgccaccgcccaaaagagtgggcatgggccacttggccaggaagccctggtaacagggcccactgagagatagcaggtgggccatctcccaggaagggtgggaagaggggcttgctatctgaaggcagaaggtggggttggcctggccatctttggggcatagtaagccagtttagagttaccctgactcctccccttccatctccaggtcacccagtggtctaagtggaaatcggttgtggttcctccctcccatggctgcccccacacccagaatttcatccaaatccctaacctcggcctatgatactctctggcctggccctggcagcttttcccttcctcacccactctgaacatgatgcctgaggctggccctccgacaggacaagagcgtgcatgcctcagggctctgcacttcttgttccctgtgcctggaactgtcccaccgctgcctggctacctgcttctcagcagccaggactccccttggaggtcactgctcagagtgaccaggtggggtctggaggcagcaagaatcagcctgggttggagaagcagctgacagcttgacagcactgatgtcctggggtcagcctgggttatggggagacccccatttaccacggctcatcacccttcccccacaccctggctgggacacctgaatctcagcctcgggtgggctgtgggactttgcccagcctcctttcagatccggtcctggaggacacgggcgtctgactctgctgcccaggcctcacgtcccacccacttccaggactacaggatcagtgctttgcttctcccggtacacactagtaaccacaagccccacggaggcccctcccttctggctcccatcacccaggtgcgcttccagggagcacccaggctcgccagggcatctgccccagtactggcaagccagggagcccattcacttgagggcctctggaaggagctccgtgcagggttcagctgggccaggaggtgccaaaccccacccatccttgagccccgggggactctgggccaggactctgtcctgaggaggaagcctcagtgcccctggcgaaccgcgcggacccacctgcactctgcagccgccctgcgacagcagccactgcaggcaggcgaggtggccggtggcggaggcgtcgtgggccggtgtggcgccgttgcgggcgcgggccgcggcggggagggcggcttcctccaccaggaagcgcagacagtgcagcttcccagcgcgggccgcgtggtgcacgggcagcgcgtccagcgggtcgcgcagcgagggccccaggaggcctgcggcgtgcagcgacctcagcacgtccagctcgccctgccgcgccgcctgcagcgcctgctccagggccatggtgccgcgtgcggcgccgcgactccgcactcagcgccttccccaggacgccatgcacgtgttcttgcgggccagaggagcccgcggtgcggccgtcggggatctgcgggccgggaggcggagcggctgtgggcctggcctccgctccgcgctgcctggcgctccgctccgccgcgctctggggccggagcccgcggacgccggcttaagactcgggcccgcccccaccccgccccgccccgccccgcagcctccgcccgagttccccgcccgcccccgccgcgacgcggggacactcgtgcgactggggcaaggtgcccaggggcttctctcctaatttgcctcacgtaacagttgagaccccagagggcagcaaaactgggttcgaattggagagccgtccaggcacagacaaattcattcatctgcccagtgcccgctaactgcggttccaggcgccggcgacgcaattccagaggtgatggggagtgattgtcgggaccgcgtgggcggacagggaaaggtctctgaggaggtgccgtggggctgggtttgagcggcgagaagggtattccaggcggggtgaggagcacgaggacaacggccctgaggcaggagcagccctgccacgtccctgaagggctctgggtcgaaatccccggagattgcaaagagccctgccttccagggtccctccagatccgagaactgcccccagaggttccagcggggagggcaggaaggcaggacgggaaccactagtgcgctgggaacgccatggcctcaggccgcccgcagccgctgtcggtgtggaggggcttccagccacacagaaggcagggatgggtgggaggttagggcttgtggggagacgcgggagcgccggcatccagagagagggggctgagacccctgcaggggctcaggaaagtgccagagggcgcgggcaggagagcgaatgtgtgccaagccaccctgcaggctccactgaacaccagccgtgggagcggctagtgcccaaaggacgcgaggaaaagctgacagaaggtgggagctacatggctgtgggagtgcaggcggcctatcagcgatcttgaagcaccctgtgcccttcctgtcccaacacccaccccctctggagtcccgtgggggcttggccccaccccgggctgaaggtttcactccgccccagccccagcctggcacagtcagcactggaaatgctgtagaatgaaggaagccccttccaggaacagtgggagtcatagtgctaaactcatagtgctaaactcggcagctgcctccggtcctttccctgggcctgccacctagtggcgacctgcgtgatggcctcccgcgctcccaggtgcccaggtaactggagctgctgggctgtgcctagccaggtgggtttccaacgacttccaccaggccagatcgccctcactctctccatgggacctgtggccgctggaatctgggacgcttgcccagtggtttgcagacaaaaggaaggaggagtcatttcctcgcagcctcgctgctggagctggtggccaaagcaacaggctcactgcggctggcgctgccctcctctgggtgcccagaggcaggtgtgccgtgaggccagcaagtggcaggggtactgttgggaggaggtgctaaaatggcttgtcttgggcacccctcccctgggcctcctccattccaaaaggccctgcaatttgtgttctccactcctaaggtggccaccttggtcatggacgagctcatctagcacatggttttgtgattttgtgggccagggctaggtgatgctttattgctattccagtgggctgagcagatgcccctgagcccctgccactgttgttaatgacatctccattagtgccacatgtgagcacccacccctgctgaccaacctctcagactcctttcgggacatgactcaaactcaggctgtgagccaggcccttcctgccaggcttctgtcctctccgggctctcccatgtccaccgggccaattgggtcctccccagcagccctagggagctcacggcagcagtagcacttttatgaaatctgtaccacccaccaagtgctcaccatgcttcacatggatatttaatccagaggtgctatgagagaggtacaactattgttc

SEQ ID NO: 656 - DNA, 4001 bp, Homo sapiens
aacaatcttctatctccattcatcaccccagtcaatggacagttttatgtgctatgtgataccattctcgatatacacacgtttaattctacttaatgcgagtttaaagagttatgagaattgctttagtaagaataacaaagccatgcgtaacagacaaatgtacgcttaaatgatcatccaggcctgcttccttatatacttgattctttttctatttgaaggagatgaaacctcatcaatgtcacttcgtctccatcagtgttttcatgtctcttcttcctgtcaggcattcctcagctcgggatttgagaaatgttcaaatttccctctatttcccacaatgacagaactgtttctcaggttggttaactcattttgacaacatcaaatctgctggacaggaaaaaaaaaaaagagagagaaccctgaaaccactcctcaatcccatttttctgtctttttctctaagacatttccgactctttttctctcgcctgctgcttctgaatttgggcattttccaaacacactcccctatttggtctttgggcagtgtgagaaacaaatgagagtttctcttcaaaactagaccaagtcattcagctgctctgaaacatacttcacaacatccgcaggtctcttgatcttgacttaaagtattaggcaggagtgttttgaaagtagtaggaggtcatatggacctaacagcttctcttaacccacatgctgagaatttctttttttcctgtcttttttttttttttttttttttttttttgagagagagagagagagtgctattttcaacattgccctctggtttatgttagtgaaatcatttgctttctgtgtgtgtctgtgtcttattgcatggccactggttctggtactacaacacaaacatagcaaacgtgcttccctaacataagcagacccatgtggcaattcacaacataaccgagacaagcacaataaataaacacatacataatcattccacagcactgaggcaggcgggggtttctacaggcccttccggactcttccagaattgctcattaagattctgaaagggggagagggtgcagcttggaaaaggttgccggaagggaaaagaaagggaggaggggagctttgccctctgtgtctttctgtctctgagactctcccatcaccaaacaaggggtgcaggggtctatcctgcagaggctctaacagacttgaggggtagaaggaggtagatggtttaaaatagttaaatgatgatcgggtgacctccgtgcaacttcagcgactccctcgggaaggtgaaagggttggggagagagaagggagggaaagcagcgtagaggacaggagggagacacctaggactacagcagcagcaatcaccagaaggattttccagcccatgacagcagtcctcaactcctggcaccaccctctcccccaacgacccctgctccatatcccctcaccctaacccctcccctcccagcgccctaactctgccctcactctttgccactttaccaagcactgaagtctctatccaggaagggggatgggaggggtgtttaaagaacaaatctaattgcaattagaattcatctgtgtctccagcacacacgctcacagttttgcagtcatggtaaggcaagtctacaagaggtgggcagtacttatggttgtgttattcagggaggggttgctttttttttttttttccaagagactataagcaagtgaagggggaagggggtagcaatctagatttcaaccaggactgcaaataaagaatgccccagatgcaaatgtctgtctccagatgttgatgataaggatttggaccagttaccttggcagggtcagaactgcagcaggttaatcaggtgagtcgtcggggattttaaagaagccgaagccggtttctttggctatgaaagtctacaaaacccccatgcaggaacattgcacatcttacacacgcctcctttaactgggctcccgcgacctcggcaggcgagggggtgctggccggccctccggtggcaagggcacggccccccgctctgcccccgcgggcgcggggccggcctggcacccggggtccgcgtcccgagcggctgtgcactcaccgagccgggctgcgaggggcagaggggcgcccacggctagccggagcgccaaggcgcctcccttttctcttggtagcgtcggtccgcactccctgtgacccaggacgtcatgatgcctgtctgttttctcaatgataacttggcagaagaagagagaggctgccaggttctcctcgggtggttacgtggtatgtgcacgattctgtttgcatgcgtttctctttttaaaaataaatatctatatttttctaaaaaaaattcccggcactgtcatgatttgattgcattattgcgtttgcataattgacgcctctgggtgtgtatatatgtgtgcatatgcgtgtgatttttttcccctttaaatcctgctgctcctgccgccgccgcagccgctgcaaacggaaagcaagcatgcgttcatcttttgtctttcattttaccttcagggtgacattcagtgccaactgctcccttttgaccgtcaccaatccccgcctgggcaaaataaatttgaaaaacgtggggggaggggaaggaagagccccctcagcccgaatgctggggtttccattcctacggctagggatcccaaacctacccaacccacctcccaaccctgaaaaaccattttcccttctacccaccgggcccaggcagagaatcggcaccaagacagcgaggagcatccacccagggccagacactcatgttcgcggctcgcacttgctgacttgcatctctcagttgcattcccggtgtgtaggcctctcacaactggagctatttttgtctcccagagatgttctttaaagccttttaaaaatggggaggggtcagggaagaaagagcgagagacaaatagagagaaagggacccagagagaagcccaaacccctagttgagaaactcgactgacacatcataaaatttggggggctccgggcatctggcccaccaggggagtctggaagggcaagaaggataactagattttatttaactcattctacaacagcaggaaaacttttttttaatacaaagatgttattgctaattatgcactgtatctgttatttttataattatgctcagaatcagtaggagtggtctcaagaacaatccttaacgtttacttctgcaaatatgagaatgcatttttagccggtgtggccacatggcaggtaaagcacagattacttctttttctaatatttgtgttatttgtacattgtctggtaccttttatgtagcttctcttaatcataatgttgtgtatattacccaacatgtggcatattcctgataaataagtatctagcaccaggtttggcaaatgctttgctctgctttatcaataattatccatttggagtaacaacatttgtttaggaatttttattttcaccgagcctgtagttggcctttgtcaccatcatgtattggtggagtcactgttcctactaattccaaattcctaaaagatgacagcagaggccgaggttgcaaaaaattaagcacaaggagagttttgaatctgaaaagcacagccgattgagagaaaaacttttgaattcatccataataatctgcagctgctcgaaggtttaaaaatagtttacctatttgagaggtcggataagtttaatgaaaacagcaagtaacttactagatcttttccctttagagtcacagtccaagaatcattcgcaaattccacagggaagatattgtaattatgcagagaccagatgatctgaattggagaaactagactaagagggtctgaggactattgactgatggccagatcccaaaacttggcctatgtctctccaccttgaaaattggacatagcttctc

SEQ ID NO: 657 - DNA, 4001 bp, Homo sapiens
agtctctacactcttcaactacttcctgctgcttagctgcattctgccaggctggggacctgaaacccaggatgttgcaggggaaagagcatcgctggattcctgcccagtctgagtttaaaaataaactttttatagtcaggatcaaagcaaacctcacttttacacacatgcataatgcagaatgtgacccaccaaagaaatagatttaccttttccaaactgaaattggcctgctttattatttttttttttctttacgtactctggaggtgataaaggtgaaggtgtttttcttgggaaactctggaaaagcaaattcttttctaaattaaaattaattcctcttcagctcacttaagaccctcattccttgtggctcggtgcccctgccttcacctgcctcacattacaaagcagacgtgttcttgaaaagttgagcatgtagctattgatttttcaaatcaaatcatattttaaatgctctgagagagttggttatttaaaggaatcttgtgataaattattttttaaagtcaatctatttctagtgtacaaatcattgccccttcctgcaatggcatagtaagcatgaatttgaagcatatccaagttttctgaaagcagggcacacctgtagtccgtgagaagtagatgtaggtatcactaatatttaaaactaaaccgatgctacgcaaaacaacagatgatatcccagaatcatgtaactgaatgatttggggccagaactccattttatgatagttcaagctgaaggagaagagagaacgccaaattcattccaatggacttcaaacatgaaaacatattctcccgctgactacattactctcaatttgcaaattaagcaacctgggtgccatgaaaaaggtaattcaacttctaaagtgccattttccacactgaagcaggagtctgctgaatgctgttcaaaaatatgccttactccaaagggttcactagcaagtaccattgaaaggcatcattggcagtgagtgcacagggattcctgtgcacctactctgcactggcctctgcagcaggaactcagagtaactaatacatcagagatcctgcattagaggaggcagtggctcttcatccttcctgagttacaaacccatgtgagggtatgatgaatgcacagacactctccaacaaaagaatctttacatgctatgatcctcgtatgatagtcattacaactacaacagaattcatggatgcaagtgaaggacctgggtctaggatattaattgactaatggatggtatcctgggaatgttagtattacataatttcccttcaaaaatggagtgaagtagacagatatctctagaaagaaatgggtattcaattggaatctaatggataccatgaacttttagcaagctcacagaaggtagaattagaaagagaaggatccctatcttaaacgcaggacaagacgtaaagaagagtaatattttacttcttaggcaccatcgaaagacaagaattaagaaatagtctgactttcacaacctcagcttactggtcagtatagtgaatcaatagaaacaagggcaaaacctttccaaagcacctacatgatcactacaacacatacttggtaaagtccaatcttccagaatatcctacacatagacaaaaaaaaaaaaaaaaaaaaaaaaaaacactttaaaggcatttaaaatgatgtttttacattttaaaaggcagaatgcggaaaacattataccttactatgaaatactagccaacaccacaatagtagtcaaagatgtcaagaggacacttaaccctctaatgtgtatcacgtggcattatgttatgtagattttaaaagaatgttaatatctcctaatcttgtagggagcagcttacctttcaaactgcgacagtgttagcgtaggattttttccttacatcttcataatttaatattgtttcattgatgaaccagtaaattgtcagctctattcatttatgtgacgtgagcaaggatccaacccaaaaaaggaaaaaaaaaaaaaaaagtaaggtcaattttctcggccgctgcatttaataaaatctcccaggcaatagagttaagcacacattaatagctatgacttagtatgctctgcctttagcaagtctttgattttcctacacatacactcagggctgtattaacactccaacgaaggtacagtcctcatttcttattttaagatttcttccttctcagctttatcagatttattaatcttctgctcctctcttatttatagcaaatgctctggttagggtttcaaagcattttccattataatacccatatataactttcagaaaaaaaaaaaattcttccaagaccaagggactttttacttacttcacattagtctcaaaatgtatgcatttctccaaacgtgaaggctttgtgtcctatttctctgatcttcagaaaaaaacacaagagagcgagtagagaggctcaagctttctaagtggaaaaacttgaagcttctattttaaataaactccaagtgggttttcactaaacatacactaatgatgttttagggagatgtctgtcaaaggaagctactgggttgaacctcatgaagttgctgttattctatcaatttcaacctacaaaaatggcaattccatatgatttaacttaatgcttctcatatctttactaaaatataaaaagactgttcagagcaacaaagcaatcccttggatatccggggaaattctgtgccgaacttgcagctcagggggtgagaagggagaagagaaggttgtgaccaacaggaggctggaatgcccctgacagtttgtttggtgcatgccctggtgcaatttattaagtaaaagatgtggagaaaataattactcgggtggcaccaggccactttgcatcacatcccttgaggcatgaatgtggtaactgtagactttggggagtgaacacctcaaagagatgcctgtattgcattagaagaccctcagagggacctctaaatctattcactaaagacacccttcagactgatagctttcccgctttctttcaagaatgaggttaaaagtaaaatgcttgacaaataaactagattgaggtttcaatcccaaattccccctacacccagcaattggaatcatatcttggtaatttactgtaatgctaaacagaagctatttgaatactagaaaacaaagggatcattttaaaataatttcttgcataaagtgagctgaagatcaactaagacaagagaacgaggaggtttctagtgtaggctggaatttgacagggtctagaatcaagaaaggactgtgctttacacataaaactaggatggtgtttcaaacacactcatgagagagacaggaggtaagatgactcaaatgtgagaatccaaccctatttattttctaggattgtgaagataagagcctgttaaaaagctgtaatttatataagtataaagaaacactaggagaggacccacttaactgacactagagggtcagaagcccaagaagacctaatttaggttgttgcttttttaaaaagaaagcacaggactcaggaggtacaaaaacaggatttgaatcaagaaaaatccttcaggtgctgatttcaacagttatatggctgctttctgtgtaatattgctaatgctcatagccagtgtggccgtagatttcaagttaacatttaaactctacaacttgtcatactcccatttctgaaatggctgaaaatttgaaataacgttaatgttaaaacaatggttttgggaaccagttctccttttgatcccacaccaacaactatctcaaagcagaggcattcacctcaggagattcggtttgtgggcgaggggagacggtggggcattggaagggtgtgtggaatcagttcctgttacccctatgatttcctcttattacaaaatgcagtatacatttcc

SEQ ID NO: 658 - DNA, 4001 bp, Homo sapiens
atctctcagtatccttggggattggttctgggactcctgcatataccgaagcctaaacatactcaagtcctgcaatcagccctgctgaacccacgtacacgaaaagtcagccctctggacatgggtttcacagcccacaaacactgtagttttgatcggtgttaggttgtaaaaaaatctacccacaagtggacttgcatggttcaaacccatgttgttcgagggtcaagataataatgaaaccagcaacagtttactggacacttactctgccagacacactgctgaatactttccatatgttatctcatgtaactctttcagccaacattggtatacattattaccctcactctacagatgagaatgtggaaggtcaggtaggtgaagtcacttggcctaaaaatattaaacatggttaggtccagagcaaaaccccaacccatgtctgactctgaatattatgcttcataatcaccctgtacctaacacttttagtcctatctttcagcttggagaatcaaggtgaggaaaagtaaaaacagcatatttttattatattttaccccaaactccacttatacttggtgttcccacactcgcttcaaattgctcctttcccccccccaacattaattactagagtctattcttttatatctttttgataaacatagctggtattagaatagaaaacacaccatgagatcacagtattaaccatgatattctgaaacatttttcagtctaagcatgcaataaggctctccaacatcttaaaaagattgattttaaaaaaagcttaaatataagcactatgttaacacttagcacttacagttctaaacaaagagtttgccagataaaatctggagtgtatgtagagggggttgatgcttttacattttattgagcttctaaattataaccctcatgctttttcatgtgctgattggttctattacagtagaggtattaatagaaaaatacacacctgaaattctatcattcagtatgacacctgtatatgtacaatgatgcatctattcagaagaatctatatgttaaaaggagttaaaagagccattatcttttgttccaggatgatgcaattatttataccatctgtatgtggaaggaagtatggctcaagaaaccagttcaggtctgtttcaccttgaagctcagcacacctagacagagtcctttgcttaaagtgcctgtggttccttgagactgtgactctgagcatcttcattcctgcatgcatgctgtgtactgactagatccacctccaaatctggataaagacacggctatgcttccaaatgtcccctttccccccagatttggctactagacattcctcacttagtttttaaaataagcatagcagataacagcacaccaaacaaaccacgaggttagcacttaacacaggtacaatttgctcatttttctcggttgaaggcaaatttatgaatacaatcattttcacacactgaaaccacctctaccagagaaatgcaaatattattgtgatatctggtcctcgtagaactcagaaaatatctgggtagatgaaaactctgaagttaggacacagcacttctcacagtatctgcatgtgcttattaccatatggcagaagttgtttctaaagcaaataacagttttcagaaagactgagtttacgaattaatctggagacagggagagagagagaaaagacagttgtaccatttaaaagctaaggaacgaaatgacctattcctcttatgtcaagacttgagaacttctagtacgcaattagcttgaccttccataaaggaagccctgaaatacagacttcctttttgtttctaaaataaaggtacttaccagtgaaaatccacaagtcaccacactttgcccagaatcacattggccgcccttctccatggaagcacagagtgggacctgccaagtttgtggagatacctacttgggttggttggaaataggtaaggggggaagaagggggagaaaataaagactttccctttaaaactgaacagaagctgataccaaatcacatgaccttttaccgtaatttctattaaaatcatttcatgtctggttgcctctgctctcctggctcatttgtattgtttacaacaagtcattgcactggcagttagtggtggctgaatccatggttacccgtttttacattcactagttaaatggaatgcagctctgctgtgggtttcagggagcaagctcttaagaaaccacaatccagctatcaatcagactaatctgagagaaattaatctcataaacataagtattgttgcatattaaaaattgatagaaagggggcatgggcttttattggttggagttaattggagttatgaaagtggacaagccgagatttgacttagagccttagagtgttcagtctgtggtctccatctgacagccattcacattgtgcacctaaaaagctttcaagggtaatacgaccacccttgaaaacaaatccaccactttccaaaattctgtgagcatttactgacctgaatgttcttagaatctaggtagtggctaaatacaggtttaaccagactgcaatcctagcgaagtaacttaaacagatatatacaagacagtaaaacaccaaacagacagcactgggtaggattcaattaagacaaaacctcagtggaatgctctttacgagtaaattaaaactgcaaactaatatgttttgagagcaagaacagtacaaattcattcttttgtccatgaatttatgtggttaattctttaaaaacattccccaaagctaacttgtttctcaagatggacatgaccaacaattacaattcctaataaaaatttagaagttttatagtttaatgcccacagtaattgtcccacaagtcacatctaaatgctaaatgagaacagcaaatagttaaagctaacatattacaaccccatctactgcaaagtcactgtatcagaagctagaattgatttgtttcctcagaacaaattgaaaatgaatgtaacataacgtcggaaaaatccctcctgcactgctaatcggatattgtataatggttgattgcagctttgccctgtactattgctgcctaaatcatacatacttacacgttctgggttcttccaagagtttggtgcagtttcaaggacaaatgtcttaaggaagcctctctactgtgcagcagggagcctggctcggatctgatgacaagagcacagtgctaaatctgacaacagagaaggaaacttcctgtgtgaagaggagatcttggaaagtctcagggttaaaaaggctgctttaaatgtgctggttgatttgctccctggttgtgtatacacagtagcagctgatctgtatttgcagccctgcagaaaggaacctttactgaaaaccaatggcatcacatttcagcagagctggtgccaagtgctggagagcagagcaacctttgacaacttcacacaattcaccccagcagactcaccacaggtcagaaaggaatgtggaaagtatctccccaccaggtttcatctcaggtatgttagcgcagtccctgggaaaccacacactgttactggctggattctgacaacagtgtaaggtattctcgggacttatacgtagttcctgtctctgctgtcctgacctacagtgtactatattttaacagaagctttaaaatgaatcaggattttttaaaatgcatttccctctgcttcttatagaaacctttgtatgtaaggttcctctgtttttcctcagaaataaactgaggacaaaataatgtaagatcgggtagtctggtatcaacctctgcattctgtctcccaatgcagaggctggagttttaacattactgtgttgtcaggggccattttagtattgttctttagaaactggggatggctgcaaaacttcactccaacagaaccaactgttgtaa

SEQ ID NO: 659 - DNA, 4001 bp, Homo sapiens
cgacggagtcgggccgctgggcgcctccgggatcgctctcactttgcactcggaagcgggcgcggggattcgggctgccgcgtgtagcctataaatagcaaactttttgaccgaagcaactaacaaataagaggagcaggcgtgcattttgctcaagatccccccttttctggggacgaccttactcccacccccgccccctttgcagtagttgtgaggggatagattgggagagagagatgaaatttaattttattagaatttacagtagtggtgttaatttttgcggaagggggtaagaatctcgccatttatctgaccttctctacccacctacctttgctacccttctcccccacccaacaactggcactggatgggaagggcaaagagcggagctcccagggagggtggctgttgaagacagggggcggagggcgatccggagccgggtttctctctgggagtaccggagtgagtgggagggaaagggaaagcaacgccaggagttggcgttttcctgaggtactgggacaggaatttaggtaacccagaattttagatggaagtgcgaaaggtgagtgcggaaggcacaaaggagttcctgcagtgcagatttcctttcccagaagcgacaataacccactcagcaactttacttcaaccctaggctctggcctaccgggagggcaaacgcgggcacccgggtcacgtcatcgcttgcttgggggcgccagctctagcgtaagcctgagctgcgagatagctccgtggggttttgccatggggtcttgcttactaatcaccccgcacgccctcacccctgtccctggacgcccttttgctgcacccgctcacatctgcagacccaacggatgggatctacttgactgagattcctgaacacaacttactgcccgcccttcccctttccttttggccaggccggattgtgggtggtgattggctcagtaggattttcattttcattctaggtgcttccttaaaaataaagccccccgaatataacagacactcgctccatacaccaaacttcccagttcctgaggttgctacgctaaatttatcctgaatgtcgcacagaaaccagggtcaataggacgatcagcacggatgggtgtggggattgaggaaattggagatattgcagctgacgccaggtaccgggagaggagagtccgcagatgcagggacgttgctctgctcctctttggacgttctctgcctcagtgtcaggcctgcgaaatgggagtcaagcccgtcccgtgggcctaaagcgactagtagctgggggggagggagccggaggacagtggtgctttttctttccagtgccccacctctgcccaatgccagcagccagtacactacacaagaggtcaaacgcctaacctctactagtaccccaaagggcaaaaaccaaacagggtcccccatgcagtttatgtagtggcgttgctgacccaatcgcgcctttcctaacaccgctgcccaccagttacctcctcctaagaccgcttcccactagttacctcctcttaaacgcaaaagttactctgtcccagaatccagtttggaaagagtggaaaaatgcagaaatactaagggggctcaggcagtagctccccctgcggggtgtgcccaccgcccatggctccacgcaggcgtttgcgcgcgtctccctttccagcccccgcgaagaccgcgcctggggctcgagagctgacggactgccctttccaggctgccccaagggcctgggaggctgcggtaccgcctgtcggtcccggtcccgagcgcgcttgcttaagagttctcaaagacggggttggaagcagtacagacgtccccggttatcgctgccgggcttgtgcgccccacgccacctacctgtccggccttcccgctccaattgctgacccgtttagggagcccggcctggagcccgccgcctccagaggagcccgccctcgccctcccccgcgcgcctccgctctctgggacgcctggccaaatgcggggcggtctctcgcgggccattggcttgggccaccgttccgagtcagctcctaggatttccccaggctttgcggcccctttgtgggtctaggccagcgcctcaccttgcaccctattccacctccagtccccttaggtgcccccgcatccctcctccagagtccaggctttgaaactgcagcaactccgcaaagaaagcctttgggaaaacctcctagagggccgaatgtggaggtcgggtgggtgggtgggtgggtactcgcggcatttctcaaggttctgggtgttcgtaactaggggaacaggccctatgggggcagaaatgacagacgcacgaacagcgtctctgtggctgtctgcagcgcgaggttcacgtctattgttttatgcctccgggagagctaccccgcgtgatagatcttttcagatccatcactggaagaaaaaccctggtgataacgattatctcccgctcgcgctatctcgccatcgccccaattcatctccctctggctctagccccttggggagacgaggagggcgaggcgctggcaggaggaccggccaagccgctgtcctcggatggagaggagagggagaggcacgaggccacctcattcgtccctttccgcttcgggctggggagacaggacaccgagggtttctttctgtctctgccaagcctcacgcttctttcaaatgattttagcctggtgctacggtctatccatatacatttccaatctcatggctcataaactattagcaaaatggtttcattattcaccttctgtatcctacaaaagggagaaaagaaaggagcgggaggaaggcacagtgggggcgggggacagtcgtcggacactagttaacaatgatgcctccggtgtttaaatcatagctcagactgctttcttcaagccgacactcaacaaatctggtctgtttccaaggatctgtagccgaccccttctccccctccccctctcctctctgtctctctctccatccatcatatccatctctccttaatacttggtattctggaaggaccagatgaatagcgagatactgcaaatccattatttgcttcattaggtgtcatcaataaggcacgccctttagatacgacacacataattaattggttagatttgctatccctggcctccttttgggtggtgttggtgatgggatcatgtggcatccctgaaaccatgttaagacaaaagtctaggttgataaccaagaagttgacttagagatcggtgtggccttaaggtgcccaactcggcaccaagtcctcatctggcttctgcaagtggggaagttgcaatgaacgatgtgtgggagtgtgggtgaatgtgggcgtgcataggagcgcctgcccctgtgaatgtgtataggcaggagaatgaggcgggttgggccggggggtgctaacagatttcagagagagggaagatgcagtcaacagctcttactcaaggtctttggtggattctgagaagtgtaacacacacacatacatacacacagtcaacccaaatgaaaacacaaatagaagcaaagtgacacatggaggcctgagaacctagggcaaagggctaaataaggcagaaaactgcgggcaggcgggagctggcagatgcagccttgggccagtggaacctggacctgctcctccgatgaggtcgatgatgatattaggtgtctccgcgaatactgttacttttcatataaatatttttaaatctagaatgactatcactccccctccaatacatacgtactcttcccctgaactttttgaaaatataaaggacgctaggcaagtgagcttgcggtaattatccctggatagagaaaccaatctggctgggagaggcccctctgcaattgccggcggcggcggcggtgcgcgggcccgcgcagaggccggggacttcgggcgcttgcta

SEQ ID NO: 660 - DNA, 4001 bp, Homo sapiens
ggctcagtagtgttcagactcttgagtgtcccccgccccatcaccaaatgctgctgaataaccaacatatgaccatcaataaaatccacttttcccacttacagatgagaataagaactgccacaatcacaacggaatattaattcaacagtaagcaccaaagaatctaaatatttactaatatcccttagatttttgtctagacatttttttagcttatttgaacaggacattcctcttacattttggttgggggttttggtggtgtattcagggctctctgtcgagcctctgcctttggtcttagctgtactcacacaatccctgcagctccgagcccttcgtgtgattaatagctctgccagccattcctatttaaaaactattcctactttatgtcttttttttacttgattttctctgatccttgtttttctccccagtaaaaattacccactgttaagagttttattcccactccaaagccttgtaactttattccacatcgttttgttttggggagcttttgttgagtagataatagggcaaagcctactcacattaaacaagtaactggccaaaaggttctaacacaggttaatctgccagtacctctctccctccatctgccctccctttccaaatccacaattttaaggcagaataaaaaaaaaatattcacaccaccaaatggtataccctctcacaccaagcaagcagtacttcccttgatctgtttctgcactggaagtgtaagttgcattttcaaaattattctctcagccctgtgacaatttaattaatttatttatttatccagtttctcaactctgtttaggtagcaatgtctcgtcaatatctcattcaggtgtagcatggaaaagcctaacaaccccgggccggcagccaagcttaccagtgactgacgctcgcttaactgagcaaagatttgctctgcacagagtggggcttgactatacaagaaccagtagtgacagcaaggatgccggctagaatcctaacaaagctacttccaacttgtgctcaggcaagtggaaccaacacttaaactgaatgttaaggggcttcaatcttggtactttttaaaattttttttcatcatttaccttccgaataagccctgggattttagagagaaaacagcacattagcactcttaaatcacaaatccttgtatctttttaaaaggctgttgaagatttattaacttgtaggagcaatcatttaattgcttgcttctgctacaccacacactttttttttttaaatgaccaaattaaacctgctgcacaaatttgtgctttgaagttcatgcaaaaggatcattcctttgagggagtgataaaaagaattgaaatgctctcctttggtacaaatgtccacacataccccccttccccaaccgagataccttcatattacagaagcaaatctttctcctttaaatgtttccaattcattttctaagccaggtcagaatttcattgtcacatttccctctgcaatttcaatgaaagcccatagcatttacaaatagaggaacattgtacttacaattttgggatgtgtaatgcagctgtgtatcttatgaaaaaactgttatgtttatttttgctgtccttcctgttcaaagacaacaccactcttggtatagctgaagaaattagtgagaaacagaaagtcctttccacaccacgaacatgtgaaaactattctttgaatcgagatgtggtggcagtaagtagtctgttgtttgagacttttgtctcttagatcaaattcagcccaaagccaacaagatgatttaacatctaacctcactgaatttggtgacatgcaactgcagaatcaaatatttagactaatttcctacttcaccaataaaaacagtatagacatgaatcggtacacacacaacagtcccctgatttgcacatttgttgagttagctagcaatattccgatgctgtgtgtggataactagacagtgtcagagtgacagagacagtgcatctgggtttttaaagtgctggatgcctcttacttggaaaagagctctgttccattgcatcagacacccagtaacacgataccatgaacctatgtgagcatcacaagtccaggcgggtcacaagtgaaattcccttcgttgccaattgagattgacatgtgctgttgtcataaatatcacactgtccaatttggtcaaattggtggtcttgagaataaacaaaggtacagtctacagtctgtcaaactgaaaggcatttgccgtgctcaagtgttaggcttccgcagtgacaatttgctgaatctctgtctgttagaacactgttttgtaattggaaaaaaaaaaaaaaggattttttttaacctttaggtgttcggttttgttttggctttgtttatttgtttttgtttcagtctgtttgtcaaggcatttaagcccagaatactacaaaaggaaataagtacagcctccctgctagggacataagagtgtatggattctgaaggagagaagatgactagaaggctgttataactccctcagaacccaaacgtggttagctgggaaacagcatttcttcagagccatcctttctttcctctatgggacttggaacctggatgctataattgaaagccagtatataaagcataacacttcagactactgttaacatccagcctcctgcaaggctgcctcctaatagctctgttttctgcctacagtatgtgcaagcaagtggaaccatcacatgccctgcatgctaaaggccgcagcctttgtcttctccaagttctgtctatttcagaggctaacatgcagcaattagtctaattaatgtgaaacaatgagctgtgttaccacttatcaaattgattgttcccctatcaaaacaaaacaggctggctttttgatgtaatttcaagagatgatttgaaatgtcatgttgctgcaagccaattaccttatgactagagtcacggtcaacagaatacataattagcttgagtttgggaaggctgcttactgctagtatgttaattaactgtcttttgtcataaaacaaaaaggttgtacgaaaggttttgaaataggtcttttttatttacatttctttgtgcttatcaacgtgaggcatgacgatgcaaaagaatagaaaattttaattccactacttcaaattaatacccagctgcaaggtcaggcataacgtgcaggctgcaataccattcacctcactctagtcctgccccagtgtattatattacttgtggagttaaattaagtatcgggtaaaactcgaatgtaagaaatactgagcttgaggaaacaaatcccctaatagacttctttggggtctcacatgtttttgtgcatcttgccaggactggacagtgttcggctgccctgggaattacattcaggtgtcagctttcaatcttgaaatttggagagaataaacccatcatcaaatgatgttattgcctttacctcaatatggtagagacagaatgcataatgggcacctgtgggctagtaaaggaatcctatctgtgaggccagggctctgtaactcatctgtagcttcctctcgtatgtgatagcttggcaattccacattcttgattaaggaaccaattctgaatttcttgagctttaatgcattctgggagtagctaccatcagtaactgacaattaacaatcaagtccatggcagacttacgccatggtttgacatgaatattagcaaactagcttctggtttggagaacaatttggaagtccctcgaagtctaatacaattgttccaccgtcgaatggcatcctttcacccgcaaagacggttgggagaggttctcttggggatctcataattgtctatgagaaatgtgttaccattttgtgggtgcttaaaaacccttcaatttttctctggatgtggttcaggtctgatagtcatattagaaa

SEQ ID NO: 661 - DNA, 4001 bp, Homo sapiens
tctctacactcttcaactacttcctgctgcttagctgcattctgccaggctggggacctgaaacccaggatgttgcaggggaaagagcatcgctggattcctgcccagtctgagtttaaaaataaactttttatagtcaggatcaaagcaaacctcacttttacacacatgcataatgcagaatgtgacccaccaaagaaatagatttaccttttccaaactgaaattggcctgctttattatttttttttttctttacgtactctggaggtgataaaggtgaaggtgtttttcttgggaaactctggaaaagcaaattcttttctaaattaaaattaattcctcttcagctcacttaagaccctcattccttgtggctcggtgcccctgccttcacctgcctcacattacaaagcagacgtgttcttgaaaagttgagcatgtagctattgatttttcaaatcaaatcatattttaaatgctctgagagagttggttatttaaaggaatcttgtgataaattattttttaaagtcaatctatttctagtgtacaaatcattgccccttcctgcaatggcatagtaagcatgaatttgaagcatatccaagttttctgaaagcagggcacacctgtagtccgtgagaagtagatgtaggtatcactaatatttaaaactaaaccgatgctacgcaaaacaacagatgatatcccagaatcatgtaactgaatgatttggggccagaactccattttatgatagttcaagctgaaggagaagagagaacgccaaattcattccaatggacttcaaacatgaaaacatattctcccgctgactacattactctcaatttgcaaattaagcaacctgggtgccatgaaaaaggtaattcaacttctaaagtgccattttccacactgaagcaggagtctgctgaatgctgttcaaaaatatgccttactccaaagggttcactagcaagtaccattgaaaggcatcattggcagtgagtgcacagggattcctgtgcacctactctgcactggcctctgcagcaggaactcagagtaactaatacatcagagatcctgcattagaggaggcagtggctcttcatccttcctgagttacaaacccatgtgagggtatgatgaatgcacagacactctccaacaaaagaatctttacatgctatgatcctcgtatgatagtcattacaactacaacagaattcatggatgcaagtgaaggacctgggtctaggatattaattgactaatggatggtatcctgggaatgttagtattacataatttcccttcaaaaatggagtgaagtagacagatatctctagaaagaaatgggtattcaattggaatctaatggataccatgaacttttagcaagctcacagaaggtagaattagaaagagaaggatccctatcttaaacgcaggacaagacgtaaagaagagtaatattttacttcttaggcaccatcgaaagacaagaattaagaaatagtctgactttcacaacctcagcttactggtcagtatagtgaatcaatagaaacaagggcaaaacctttccaaagcacctacatgatcactacaacacatacttggtaaagtccaatcttccagaatatcctacacatagacaaaaaaaaaaaaaaaaaaaaaaaaaaacactttaaaggcatttaaaatgatgtttttacattttaaaaggcagaatgcggaaaacattataccttactatgaaatactagccaacaccacaatagtagtcaaagatgtcaagaggacacttaaccctctaatgtgtatcacgtggcattatgttatgtagattttaaaagaatgttaatatctcctaatcttgtagggagcagcttacctttcaaactgcgacagtgttagcgtaggattttttccttacatcttcataatttaatattgtttcattgatgaaccagtaaattgtcagctctattcatttatgtgacgtgagcaaggatccaacccaaaaaaggaaaaaaaaaaaaaaaagtaaggtcaattttctcggccgctgcatttaataaaatctcccaggcaatagagttaagcacacattaatagctatgacttagtatgctctgcctttagcaagtctttgattttcctacacatacactcagggctgtattaacactccaacgaaggtacagtcctcatttcttattttaagatttcttccttctcagctttatcagatttattaatcttctgctcctctcttatttatagcaaatgctctggttagggtttcaaagcattttccattataatacccatatataactttcagaaaaaaaaaaaattcttccaagaccaagggactttttacttacttcacattagtctcaaaatgtatgcatttctccaaacgtgaaggctttgtgtcctatttctctgatcttcagaaaaaaacacaagagagcgagtagagaggctcaagctttctaagtggaaaaacttgaagcttctattttaaataaactccaagtgggttttcactaaacatacactaatgatgttttagggagatgtctgtcaaaggaagctactgggttgaacctcatgaagttgctgttattctatcaatttcaacctacaaaaatggcaattccatatgatttaacttaatgcttctcatatctttactaaaatataaaaagactgttcagagcaacaaagcaatcccttggatatccggggaaattctgtgccgaacttgcagctcagggggtgagaagggagaagagaaggttgtgaccaacaggaggctggaatgcccctgacagtttgtttggtgcatgccctggtgcaatttattaagtaaaagatgtggagaaaataattactcgggtggcaccaggccactttgcatcacatcccttgaggcatgaatgtggtaactgtagactttggggagtgaacacctcaaagagatgcctgtattgcattagaagaccctcagagggacctctaaatctattcactaaagacacccttcagactgatagctttcccgctttctttcaagaatgaggttaaaagtaaaatgcttgacaaataaactagattgaggtttcaatcccaaattccccctacacccagcaattggaatcatatcttggtaatttactgtaatgctaaacagaagctatttgaatactagaaaacaaagggatcattttaaaataatttcttgcataaagtgagctgaagatcaactaagacaagagaacgaggaggtttctagtgtaggctggaatttgacagggtctagaatcaagaaaggactgtgctttacacataaaactaggatggtgtttcaaacacactcatgagagagacaggaggtaagatgactcaaatgtgagaatccaaccctatttattttctaggattgtgaagataagagcctgttaaaaagctgtaatttatataagtataaagaaacactaggagaggacccacttaactgacactagagggtcagaagcccaagaagacctaatttaggttgttgcttttttaaaaagaaagcacaggactcaggaggtacaaaaacaggatttgaatcaagaaaaatccttcaggtgctgatttcaacagttatatggctgctttctgtgtaatattgctaatgctcatagccagtgtggccgtagatttcaagttaacatttaaactctacaacttgtcatactcccatttctgaaatggctgaaaatttgaaataacgttaatgttaaaacaatggttttgggaaccagttctccttttgatcccacaccaacaactatctcaaagcagaggcattcacctcaggagattcggtttgtgggcgaggggagacggtggggcattggaagggtgtgtggaatcagttcctgttacccctatgatttcctcttattacaaaatgcagtatacatttcccc

SEQ ID NO: 662 - DNA, 4001 bp, Homo sapiens
tctgtattttttaaagatgacttttaattgagcccaaaagaaagctagtttgaatcttgcgccaaagccaaaaggacatgtgccttgacttcatttaaatgcatctgctttaagaggcttatctaaacgaattattcaaattagctataagaagttaaattcaaggaaactacttcaaaaagaagcctctgggggatttttaaagtttgttttctttatttatttacaagagaaagttcagaatctgggcgtgcttggataagacattcttcctgacacgaagacgtcttaaactctccaattctacagcccgaagtacactaaccttcaaactacacttgagcgggcagtcttacctttgtttatttttcatttttatttttacacatcttaaggttgtttcttcccttgagtgtttcaaactgatgcaagcacagccttataatctttcagttcctcctaaatccatctcttggctaatattccctgtgtgagcatggatgtgggtggatgtgcatgtgtgagcgtgcatacacacacacactcacactcacgctcaaacatacaggagcagccactgagactgcaagtcacttttcatctcttacttaattacaaagcaatgcaatatgcagtcactaaggacagctagtggacatctacctataatgcactacctcatcttctagagtttgatattttcttcacaatctatagagagaaatgtttgccaagggcactcttttcagaattataacagttggtattactgtaatgtgaaagcaaagcaatataactgactcaacagaaagggagataaaccagtgacagctctcgtgatatactaacattttatcttaacagtaggttgaaattaagtttatcacctactcatttacacaaaaatgcctaacttacttctcgtaccccctactcactcccccccctttagtaatctaaatatatatttccatgtgcataaagatatccataaatactaattaaactgcttgtaagaacgaaagtacttttctatattttctggacacaacaaacgagacaaatccacactctgagcagtatttaaggggaaaattttaaagtcactactgtttcttctttagttttttttccccccttaaatatttataatgtgtgaaaatctcatgttacttaatggactgatttgtcagttaagtgctgacttaacgctaaccatgcaaataacattattctagctcagaattgcatagggctagcttttaaattgttctctgaaggagaattagtaaatgtgcaattttgcctctaactctgcgcggtaagaaatgacaaggagctgaaaatatctgtcaaactgcaaatacataagaggccctcaatagtataaatcattttgaatattgtattttaaaacatctttccttgggaaaatgggtcctagtaaaagatgcattttaacagttcactaagcatttgtgccaagtgcctattcttagcacctgaataagaagtgactgtcacacagctgttttactgacagtcactgagctttgcctcaaaggtaacattgtagtcagagaacaattctcgacttactgaattaggagatcaccctcaacacaaaagacacaagacagacacaaacaagcagtcgtgcacacaaaatacccagggcattacctgaatcagtgtgtaaagatatagtctgtccgcccccacccccgcacccccacgacgagtttaaaaaggaaagaaaaaaggtacctactcttcctcgtagtgcagggaaaaagattcaggaaggcaaagttctaccgaatccatgtgcgaccggcaaccattatttgtgcaccccagctataaatcaaagtttccttgacagagcacagtgcaattaacacaaatgttctcctagtgacaagcctataggcacagccagttgggaccaaagctctcacactctcctaatcaaggacttaaagccccgattggagcttattaatatgaagtagggctttacatatgcagtcccaccggcccagccgcgcagccgattggggggcctctgcccaatcaggagggaggcgacgggaggctgcacggagcgagaggagccaggcaggtaggcagggtgcagagagccgaagggggctggaaactgagagtgggcagagaaaaagggagcggagaagggagcgattgaaacgctcccaatacacactctcgggtttgattttttttcctcccttctctctctttcttttttttttcttctgggaagctacaaaagaaacataactaacttaactctctaagcactggagggatttgcctttgatttctaacctaagatctcttttgccttgaaaaggagaactcacgcagactctcagttaatttgggaaaggattctgcggaaggtagagaattaagtttgtcctgccgttgtctgtgtttttattacaccgggggccgcggcttatttggtgctgtactttctcatgtattcctaatcatgtcttttcctgttttcctgatgtatgctgggcattaaaaataataataataaaggcattcttctaaattgtttgagcatgtgaactgggatcgtcatctctgaggtggaatgcagttttacacaactacagaagaggagatagtgacaatacaatttgaaagaatgcctaagtaaattatatgtgtaaacctttctatacctgcgactgtctctttacatatagatacaacgcatagcttttcaaaacaacggtaaacagccgcaggacaaattggcttcttcagttttaggggtggggagtctgagggctgtgggggtaaatagcgaattaaatctctctcgatgcattttgacaaaataaagacagcatttttttttttttttgtagggagagcattactaaacagtgcactaaaagtattcttaattatatgtatatatttcaatacaagcttccaaactaggaggcatataattttatatatgattttacccaaaacatcctgctttcaaataaaacacagtgtacacatttgtttctatacataaggcaccctatatgctttaaaaaaatcaacccagaaacattttataaaccatcacacagtctggtcactataagaactagtttcaaacagataataatttacaaaactaagaattctcaatcaaaagtgttcaaaaaaataaaaataaaaggaggatataagaggacaagtgtgttttttcctccttcaattgtgtacaccgtgtctttaatttccatataacaaagagtttgcttaggtcctattttaatctacaggatttttttatactagcaaatgtacattggaatagataccagctatttatggcaaagagataactgctaccttatggagagtgaaaaacccacaattttgatataattcagctctactgcttatcaaccttttacatcttaagtcctacatgatagaaatagtataatctttgagatcaaaataaattagttcagatattcatcgtatgttaaattcactaaattaggactcaactcccttaaccctctcaaattttctaggtctttaaaaaaccaaaacactaaaatagagcagccacattaaaattcagaatataaaaatgacagacatgatttggtccccccacagaagaaagcaatttcactgccttgtatttagctatatctaagatataggcctaattccttttatttgtgttctaaatgcatacaaagtttctagatcagaactcacatagcaaaaactgtgcctcagaatactgtataaaagcaggtagtaaaagcttaattaccagtagcattatgctgtctatattgttaaatgtgaactctgcaattaagatgtaaatttggttgtgagcagtgaattaaaagagctttgagatgtagaagaaaatccaagcattctgcagacactgagagaaaaaaaaaattgtctattcaatctaaaataag

SEQ ID NO: 663 - DNA, 4001 bp, Homo sapiens
tttttctatttgaaggagatgaaacctcatcaatgtcacttcgtctccatcagtgttttcatgtctcttcttcctgtcaggcattcctcagctcgggatttgagaaatgttcaaatttccctctatttcccacaatgacagaactgtttctcaggttggttaactcattttgacaacatcaaatctgctggacaggaaaaaaaaaaaagagagagaaccctgaaaccactcctcaatcccatttttctgtctttttctctaagacatttccgactctttttctctcgcctgctgcttctgaatttgggcattttccaaacacactcccctatttggtctttgggcagtgtgagaaacaaatgagagtttctcttcaaaactagaccaagtcattcagctgctctgaaacatacttcacaacatccgcaggtctcttgatcttgacttaaagtattaggcaggagtgttttgaaagtagtaggaggtcatatggacctaacagcttctcttaacccacatgctgagaatttctttttttcctgtcttttttttttttttttttttttttttttgagagagagagagagagtgctattttcaacattgccctctggtttatgttagtgaaatcatttgctttctgtgtgtgtctgtgtcttattgcatggccactggttctggtactacaacacaaacatagcaaacgtgcttccctaacataagcagacccatgtggcaattcacaacataaccgagacaagcacaataaataaacacatacataatcattccacagcactgaggcaggcgggggtttctacaggcccttccggactcttccagaattgctcattaagattctgaaagggggagagggtgcagcttggaaaaggttgccggaagggaaaagaaagggaggaggggagctttgccctctgtgtctttctgtctctgagactctcccatcaccaaacaaggggtgcaggggtctatcctgcagaggctctaacagacttgaggggtagaaggaggtagatggtttaaaatagttaaatgatgatcgggtgacctccgtgcaacttcagcgactccctcgggaaggtgaaagggttggggagagagaagggagggaaagcagcgtagaggacaggagggagacacctaggactacagcagcagcaatcaccagaaggattttccagcccatgacagcagtcctcaactcctggcaccaccctctcccccaacgacccctgctccatatcccctcaccctaacccctcccctcccagcgccctaactctgccctcactctttgccactttaccaagcactgaagtctctatccaggaagggggatgggaggggtgtttaaagaacaaatctaattgcaattagaattcatctgtgtctccagcacacacgctcacagttttgcagtcatggtaaggcaagtctacaagaggtgggcagtacttatggttgtgttattcagggaggggttgctttttttttttttttccaagagactataagcaagtgaagggggaagggggtagcaatctagatttcaaccaggactgcaaataaagaatgccccagatgcaaatgtctgtctccagatgttgatgataaggatttggaccagttaccttggcagggtcagaactgcagcaggttaatcaggtgagtcgtcggggattttaaagaagccgaagccggtttctttggctatgaaagtctacaaaacccccatgcaggaacattgcacatcttacacacgcctcctttaactgggctcccgcgacctcggcaggcgagggggtgctggccggccctccggtggcaagggcacggccccccgctctgcccccgcgggcgcggggccggcctggcacccggggtccgcgtcccgagcggctgtgcactcaccgagccgggctgcgaggggcagaggggcgcccacggctagccggagcgccaaggcgcctcccttttctcttggtagcgtcggtccgcactccctgtgacccaggacgtcatgatgcctgtctgttttctcaatgataacttggcagaagaagagagaggctgccaggttctcctcgggtggttacgtggtatgtgcacgattctgtttgcatgcgtttctctttttaaaaataaatatctatatttttctaaaaaaaattcccggcactgtcatgatttgattgcattattgcgtttgcataattgacgcctctgggtgtgtatatatgtgtgcatatgcgtgtgatttttttcccctttaaatcctgctgctcctgccgccgccgcagccgctgcaaacggaaagcaagcatgcgttcatcttttgtctttcattttaccttcagggtgacattcagtgccaactgctcccttttgaccgtcaccaatccccgcctgggcaaaataaatttgaaaaacgtggggggaggggaaggaagagccccctcagcccgaatgctggggtttccattcctacggctagggatcccaaacctacccaacccacctcccaaccctgaaaaaccattttcccttctacccaccgggcccaggcagagaatcggcaccaagacagcgaggagcatccacccagggccagacactcatgttcgcggctcgcacttgctgacttgcatctctcagttgcattcccggtgtgtaggcctctcacaactggagctatttttgtctcccagagatgttctttaaagccttttaaaaatggggaggggtcagggaagaaagagcgagagacaaatagagagaaagggacccagagagaagcccaaacccctagttgagaaactcgactgacacatcataaaatttggggggctccgggcatctggcccaccaggggagtctggaagggcaagaaggataactagattttatttaactcattctacaacagcaggaaaacttttttttaatacaaagatgttattgctaattatgcactgtatctgttatttttataattatgctcagaatcagtaggagtggtctcaagaacaatccttaacgtttacttctgcaaatatgagaatgcatttttagccggtgtggccacatggcaggtaaagcacagattacttctttttctaatatttgtgttatttgtacattgtctggtaccttttatgtagcttctcttaatcataatgttgtgtatattacccaacatgtggcatattcctgataaataagtatctagcaccaggtttggcaaatgctttgctctgctttatcaataattatccatttggagtaacaacatttgtttaggaatttttattttcaccgagcctgtagttggcctttgtcaccatcatgtattggtggagtcactgttcctactaattccaaattcctaaaagatgacagcagaggccgaggttgcaaaaaattaagcacaaggagagttttgaatctgaaaagcacagccgattgagagaaaaacttttgaattcatccataataatctgcagctgctcgaaggtttaaaaatagtttacctatttgagaggtcggataagtttaatgaaaacagcaagtaacttactagatcttttccctttagagtcacagtccaagaatcattcgcaaattccacagggaagatattgtaattatgcagagaccagatgatctgaattggagaaactagactaagagggtctgaggactattgactgatggccagatcccaaaacttggcctatgtctctccaccttgaaaattggacatagcttctctggctcactttgcttatctgtccctttggcatgccagaaggatgaattggtgcagtcttgtcgggtgcttagatgttaccagaggcatagatgtttccaaagagggcaaaggcctattgagaactcaaggagggattactataggcgttattggtaactttccagtaactatccaagaggtactcgttaatattcaatctaccatcctg

SEQ ID NO: 664 - DNA, 4001 bp, Homo sapiens
gtttagctcccacacactcctgggtgtgcctctagtgaatgggatttggcagtggagaaatttccacactacttgggaggtagacgcctcctgctgctccttaccctccaccccagtacggaaagaaacatcatggaccagaatgtggcaggggagggctgggagttgcccagaacactatgtcctgaccagctgccaatcaccttgtgccgggcagtgtgctctgctctaccccttgccccatccagtggtggaggtacaaggagggtactgaggttggcacccatcccaggactttagtggccagaggtccttaccagaaaagacaggagacaactgggctgcgagcaaggttctctggacagcagggtgatgaggagaaaggaaccatggaatttacggggcacaatgtgacagagctgggagggccctagaggtcatctgaaccaattctacgtagggaaactgaggcaggagaggggagggactggcagatagcacgttagatcagtgctggaattaacctcaggcctgcttgatgccttgacagtcttataccaaactgggccttttattttgaaaacgctactccatccccagggcgggttctgtcagcctccacacttggttaagaacctccccacaactttgcccccaccccaccccagaatgcctgtctgcatggagccgctaccattccagcacaagctacaagcgccccactcggcaccttcctccacaggcagcccacagcggggctggaggtagtcagctggggagttagcctaaggctcagtgagtggctctgcccacaggtgtgtcctgggacctgtgtccagctggggctggggaagatggcctgtgtgggggtgctgagcccgagcctgcagcgatggtgaggagctgagtgctagctggaattccacagggtggctcctgggacccacaggggcagctcagagcctggaggatttgctcccaccatggggtggagaaggggcagcaatgtatgcatgtatggctgggtcgggggggcggggggtctcttaaaagttcccgcctcctcaggtttcagagctggctgggtacgcgcttctggtcagcgaggggcaccagcacgcagcgacagggggtgcggcccgcacacgcagcatgccgacagtgggcaggtggccaccaggcgtgcctaagagccccgggaggaggggggcgtgtgcagggccaagggaggtgtgagcctagttttggtagcgacgaaatcaatccgtacacaaaccacgttccaaacctttcttgcgcagcagccgcgcacccctgggactgacacccggaaggatgcgaggactgggtccccgcatccccctggcagccctggcaggaccccatcctcggccccgcgcccactccgctaccttggtccgaacttgctcgggtttccaatgcggccgcagctcctggatgaggcgcagggccccgggaaggatgtcgtccgggtccacggaaatgccgaagtacgcgacggcggcggccctcggggggcccggcggctcccggcagctggcgctggccgccgccttctcctccatgccccatgagcactgcgggcaaggcgtgtgcctcctcaggtgaaaggacgcgcgcggctgaggggccgaagggggcacagccattcccagcagccccaccccctcggagccgcggcagacgctagccccggcgggggggtccggcgagggagtgggagtggtagaggaggggccaggggaagtccatgactcaggcgcgagctgcccgcttcgatcgccggctcgcggcccgccgcccaccgccgaccccggagcgccgcggcccgccgcgattgtgacatcacgggcggtggcccgcgggaacgcccccggcccgcccccgccccggcccgcgggccgctggggagctcagccagccaccgccggcagctgaggccgccgctacctggagcgcggggtgggggcgacgcccccctgggggccggtgacgccgggggtggggcctccgctggctccgccccgcccgggtccccgccggggctggcttcccggcctccgaggccgcgagactccagctctctcccggtagcctggggtggaggcgggggagggctcgtcctgcgcccccacctcatcctggaatagagagatccgctgctcccacgacgtcagcttgggctcgcccctctgtgcccctgctccgtgcccccagtccccggaccccgggaaatggctctgcaggggcggcccctgctgcatctcaaaggtccttccctgcagagagcccccccccacacccaggcaacctcccatccccgacagaaacacactgcatgaagaggggacattgggtgatagcgttggggtgagagtgtgccagtccagcagactgcgctgtcccctggcaggccactgaacagccagggcgttggagtgtttgggcacatcctgggcaggacttggggccagactgagttaaagcctccctcccatcctgagcgtgtgaatggagccaggtagcaggccagcggtgtacccgagcccagtgctttgcttggcattcggggtgtgaagtggacagaccctcgcgcgtcctggggaggacagccaaatgcctggcgcagctaagggccaaagcaaggcatggtgatggctgggggtgggaaggaaggggaaggggtgacaaggtgtcccggggcaggttgctgtggggaggagacatggagagaggccaggccggctcagggggcaagtccctctactagccagattctcctttggtcattctctgccaccttctgagcagggctctgttggctgccagccctatttgttgtagtgaggcctcagggatctcactagtcactatctctcactgccccacccagaaaagcgccttcagagaaggggccctttcctattttcccagttacccctttggcctatcccggaacctctcaaccgcaaggctcctatgcttactgcggtccagaatccagctctgcctagcagaacttctgcagtgattgaaatgttctatatctactgtccaatgcagtgaccactagccacgttgattttattaaaaaaatttttttatttgagacagaatttcgctcatgttgcccaggctgctggagtgcaatggtgtgatctctgctcaccacaacctcggcctcctgggttcaagcgattctcctgcttcagcctcctgagtagctgggattacaggcatgtgccaccacgcccagctaattttgtatttttagtagagacgggggttcctccatgttggtcaggctggtcttgaactcctgacctcaggtgatccaccctcctcggcctctcaaagtgctgggattacaggcgtgagccaccgcgcccggttgattttattcaattttaattaattttaattttagtgtaaatagccacatgtgcctaccatattggatagtgaaggagataatgggggtcgtgcctgccttcctaaggtcctggagctccaggatggagctggaaaagacactggccaccaacacttcctttgcagtgaggaagtacagctatgcaggacaagggaacatggagaatcagtgggagtccagggtcctgaagcccaggctccggctcttggcgctacacagggactcttgcagatggctcccagaggtactgagggcctggttgggccattcagtgcctcacgactttctgtcaaaagagaggtgagcaactatggtgaagagggatggcttcagtggctccaggtggatgctaatttctcattccccaagttacatgtgccctgaagacagcccaaggagtgagagtgggagaagagacttcagcctgacgagtcccaggtggatgggatggaggatagcagtgtgtgtgtgcacctgtgtgcttgtgcacgtggccctgtaccagcgtgcgtgaagcactgtacttatgacggtaccaactgcttat

SEQ ID NO: 665 - DNA, 4001 bp, Homo sapiens
aaaccacaaagtgtaaacactgtctttaatatttgttttcctcctcctgaccaacccttcaaatgtaaaaaaataaaaataaaaaaggaaggtacagtgaaatgggtccaaaaacgcagccaaaacaagtcaaacagtttgtcttctattactagacaagcccacatgccaagatacacaagcctgagttcaccaagatgtaccagtttaaaggatgaaaaaatcccaaatccatctgattcccactcaagaatgaacatctgattttgatttattttactgaattatgtgagatagaaggaagattcttcccagccacaaactgctccctcccccttgaaaaataccctgggatacaggaagtaaacacaccatatgtacatttactctattcaaaaaacacacacaaactctcaaaaattttttgagaaaaattatacattttctccatttaacaggaaggggtgaaaagcaggcatttctgaagcccttctggccagtgagtggaaggagtcttgctgcgatttgaattcattccatccagatttacagttcctcaataaatttcctgttcctcccagcaaggagctttgtgttaatcacttagcaaaaaggagggaggggtgaaactgccagagggacatggagggagggcagatctaccctcgctgttccccagggtggatgacaggccctcagcatccacattagcaggcatctggagagaatgcctaagtggcccccgcgtagggacaaattccttatcttggaaatttcacctaacctaggatttctctagatcttttgaatattttttctcaccaaacacattaaggagaccagcaagtgtcagtctacaaaactactagcggccgaggacaagataaacaccccaaaggaaggagcagacaaggaaaaacacacacacacacacacacacacacacacactctcacacacacacgagatacataataacgaggcaccggggctgaggcaggagcttcctcttccaccttagtgacaatgagggaggaaaaacacgaatttccccactgctccaggaagctgccctggactcttaactcctaggatgcgctgtcagatcgcgaggccttttaccctgccacagaactccctccaaccatcacgaccctggggtccaaatcccgttgcaacgataacctgacaaggaaaccctctcttgacactccagctctccaattttccccataaaagtccctttcccaggagccctggggcgcctctgcacgcctttcgcatattcactgcaaggacacttccatccaagtagggccactcgtctcaactctgcaaaccacaggacccctgcccttcctctgatcgcgaccactccccgaagagtgaggcatgcacagtctggcgctgcgggtttcccgcagcagctccgggtcctggcttccacagcccccagaacctccttgccattcacctcccgggccgggcttcccttaaccgtggcctcagggctgcgcggggccaccgcatgaacgctgccctgggtccctgtcgcccctcagacagacacgggatcccaccctcccccgccccccgcactgggtgaggcccagctgggtgggtacgcggcctggcggccggccccgattccagggacgccgtccccgccagggtcccggatccaacccagacaccccggcggccgaggcgaggccgggactcacctcttcccggcacggtccgtcttcggtccggtctcctccgcggcgtctccggctcctcctcatccaccccagcaggaagtgacctcctcggctgctttcgtcacttccatcctcagcagagagggcgggggaggaggaggcgccctcccgccggttcccagcctcacctcgccgcacccagcagcgtctccctttcctttctcctttcagcagacgccgacttccgcccgcactcctccccctgcgcgctcctcccggcccgcatcccgcgcatccgccccggcacggcccgtgcgtcacgctgcgggggcacgttacgcacgctcgtggcgggcggccggcccggtccgctgctgggccagggtcctccagacgccgaggggtgacgcggcgcgagggggtgctgagctgctatacgcttcccccgccagtcctgcgccgtgaggcagaacggactttgcggggcgaggcgctgccccggggtcccacctcccgggggaggggacctcgcagaccccacaggaaggcccaggcgccgggaaacagtctctcccacacaacagagaggcggcccgtctttctccagaaatgggccctgcgacctcccagagtggggatccctcacaatgggaagacgggacccgcagacttcagacgcaatttccctaccctttaagaaagggccctttcatatacgtatgaaagaaaccgcaaagctttctctgaagcacgtcgctttggcatttcctccctgggaagactggggggcatgaccgcttccccgctagttcccaccccactgcatttagtcttaattcgtcccagtctaagcagcttgcaagtcctctccctaagtcattaaaacgcgtgtccccttttggttttaccttttgttcctgctcgggcaatttgtctgtccaaagcatgattttttcttcctttagaggctcattaaggataaagaatctcaagcagttcagctttatctgcagtcccacccctgtaaatctgagtggtgtccaggcatagtttcactccagaggcagaagaaagggagtagtgaggatcagtaaaggttaaagaatttagaataaatacgagcgtgggggaggtgaagaagagagatgggattgaaggagaattgaagatcaattttgatcaaatggatcaaaactttgtacctctgctctagtaagacctttgcaccgtctctgccacatgggacttggagatattagttgttacaaaaattgcttccagttttgaatgtgctactagtcactgtgtagctcttgataaattaattagtaaattggctccctctggcctaaaattaccttacctgttttttaaaaaagataacattgttgtgtcttttctagttagaacttcctactctgtaggtgaacaaaataaggagcagaacttaaacaccatagagagggttaccgatacctgcaactagtccactagctctttgtaggaactgtctatatattctttgcatcttgtgcatggtacctagaacggcaacttacatgtagatatcagatgtttgctagaacattcctttaaaatattggggttcggctaaacggaaattaagtccttgtgccttcatctactagctttgtgaccttagttaagtgacttaacttctctgtgtcagttcctcatctatgtgaacataatacctacagtatctactgatgtgattgttattagatgtgttaatacatgtagagtggttagaacagagaatggtatattttaaatatggcagatgaaaaatgttggcaaagataataatcataagaatcattcttatgagaatcctcaatttctcataccacccatgcaaatcttagtaattgttacaactcagaaaccagggtgatcgggaatgagtagtttcttctgaaagtctgaaattgctcatctttggctcatagctcaaatggtcatggttagagccagcatggttgactccaaggagcctgtgctctacaaagggccaggagtcagagtatagggactctttctgcatatttttactcaagccagactcctagggttctctgctgctgcttctctaattaacgtcacaaaggatgtcttgagtaaacacaatcaacagagataaacaagtctctctacctggctggagtctaaattgatatattgagaaatgtttatattccagcagaactcaacattaagtttttacattaagagtctaatcactggcctgaaactctagaggtgaatttgggtttg

SEQ ID NO: 666 - DNA, 4001 bp, Homo sapiens
aattactttaagatgctatttatttagtatcctctcaaaagttttctggcagtctctccccaaacttcctttcccctgttcttctttccgtatgcaactctctttctttcaaacatgtcacctccaaactgctactccccaagttatcaaatgatgggcctcaggtcatcagcttcaaaagccataattatctctcacctgactttaaaccacaaagtgtaaacactgtctttaatatttgttttcctcctcctgaccaacccttcaaatgtaaaaaaataaaaataaaaaaggaaggtacagtgaaatgggtccaaaaacgcagccaaaacaagtcaaacagtttgtcttctattactagacaagcccacatgccaagatacacaagcctgagttcaccaagatgtaccagtttaaaggatgaaaaaatcccaaatccatctgattcccactcaagaatgaacatctgattttgatttattttactgaattatgtgagatagaaggaagattcttcccagccacaaactgctccctcccccttgaaaaataccctgggatacaggaagtaaacacaccatatgtacatttactctattcaaaaaacacacacaaactctcaaaaattttttgagaaaaattatacattttctccatttaacaggaaggggtgaaaagcaggcatttctgaagcccttctggccagtgagtggaaggagtcttgctgcgatttgaattcattccatccagatttacagttcctcaataaatttcctgttcctcccagcaaggagctttgtgttaatcacttagcaaaaaggagggaggggtgaaactgccagagggacatggagggagggcagatctaccctcgctgttccccagggtggatgacaggccctcagcatccacattagcaggcatctggagagaatgcctaagtggcccccgcgtagggacaaattccttatcttggaaatttcacctaacctaggatttctctagatcttttgaatattttttctcaccaaacacattaaggagaccagcaagtgtcagtctacaaaactactagcggccgaggacaagataaacaccccaaaggaaggagcagacaaggaaaaacacacacacacacacacacacacacacacactctcacacacacacgagatacataataacgaggcaccggggctgaggcaggagcttcctcttccaccttagtgacaatgagggaggaaaaacacgaatttccccactgctccaggaagctgccctggactcttaactcctaggatgcgctgtcagatcgcgaggccttttaccctgccacagaactccctccaaccatcacgaccctggggtccaaatcccgttgcaacgataacctgacaaggaaaccctctcttgacactccagctctccaattttccccataaaagtccctttcccaggagccctggggcgcctctgcacgcctttcgcatattcactgcaaggacacttccatccaagtagggccactcgtctcaactctgcaaaccacaggacccctgcccttcctctgatcgcgaccactccccgaagagtgaggcatgcacagtctggcgctgcgggtttcccgcagcagctccgggtcctggcttccacagcccccagaacctccttgccattcacctcccgggccgggcttcccttaaccgtggcctcagggctgcgcggggccaccgcatgaacgctgccctgggtccctgtcgcccctcagacagacacgggatcccaccctcccccgccccccgcactgggtgaggcccagctgggtgggtacgcggcctggcggccggccccgattccagggacgccgtccccgccagggtcccggatccaacccagacaccccggcggccgaggcgaggccgggactcacctcttcccggcacggtccgtcttcggtccggtctcctccgcggcgtctccggctcctcctcatccaccccagcaggaagtgacctcctcggctgctttcgtcacttccatcctcagcagagagggcgggggaggaggaggcgccctcccgccggttcccagcctcacctcgccgcacccagcagcgtctccctttcctttctcctttcagcagacgccgacttccgcccgcactcctccccctgcgcgctcctcccggcccgcatcccgcgcatccgccccggcacggcccgtgcgtcacgctgcgggggcacgttacgcacgctcgtggcgggcggccggcccggtccgctgctgggccagggtcctccagacgccgaggggtgacgcggcgcgagggggtgctgagctgctatacgcttcccccgccagtcctgcgccgtgaggcagaacggactttgcggggcgaggcgctgccccggggtcccacctcccgggggaggggacctcgcagaccccacaggaaggcccaggcgccgggaaacagtctctcccacacaacagagaggcggcccgtctttctccagaaatgggccctgcgacctcccagagtggggatccctcacaatgggaagacgggacccgcagacttcagacgcaatttccctaccctttaagaaagggccctttcatatacgtatgaaagaaaccgcaaagctttctctgaagcacgtcgctttggcatttcctccctgggaagactggggggcatgaccgcttccccgctagttcccaccccactgcatttagtcttaattcgtcccagtctaagcagcttgcaagtcctctccctaagtcattaaaacgcgtgtccccttttggttttaccttttgttcctgctcgggcaatttgtctgtccaaagcatgattttttcttcctttagaggctcattaaggataaagaatctcaagcagttcagctttatctgcagtcccacccctgtaaatctgagtggtgtccaggcatagtttcactccagaggcagaagaaagggagtagtgaggatcagtaaaggttaaagaatttagaataaatacgagcgtgggggaggtgaagaagagagatgggattgaaggagaattgaagatcaattttgatcaaatggatcaaaactttgtacctctgctctagtaagacctttgcaccgtctctgccacatgggacttggagatattagttgttacaaaaattgcttccagttttgaatgtgctactagtcactgtgtagctcttgataaattaattagtaaattggctccctctggcctaaaattaccttacctgttttttaaaaaagataacattgttgtgtcttttctagttagaacttcctactctgtaggtgaacaaaataaggagcagaacttaaacaccatagagagggttaccgatacctgcaactagtccactagctctttgtaggaactgtctatatattctttgcatcttgtgcatggtacctagaacggcaacttacatgtagatatcagatgtttgctagaacattcctttaaaatattggggttcggctaaacggaaattaagtccttgtgccttcatctactagctttgtgaccttagttaagtgacttaacttctctgtgtcagttcctcatctatgtgaacataatacctacagtatctactgatgtgattgttattagatgtgttaatacatgtagagtggttagaacagagaatggtatattttaaatatggcagatgaaaaatgttggcaaagataataatcataagaatcattcttatgagaatcctcaatttctcataccacccatgcaaatcttagtaattgttacaactcagaaaccagggtgatcgggaatgagtagtttcttctgaaagtctgaaattgctcatctttggctcatagctcaaatggtcatggttagagccagcatggttgactccaaggagcctgtgctctacaaagggccaggagtcagagtatagggactctttctgcatatttttactcaagccagactccta

SEQ ID NO: 667 - DNA, 4001 bp, Homo sapiens
gagggccctccctcctctggctaagatccccctgggccctcccagccttgagcactcacggtagacgctgctgctgctccccttcttatccccagaggtctctggtggccctcggggggtctgctgtcctgtcagctgctccaccatggcctgatgggcaaatagcatgctgtgcaggagctgaggggtgagaagtaggtgcgaggtgtgatgggctctccttggcatgtatcctccagtacaatctggtactgttagccagttgctaaaacaatgaaatactctcataccgatttttttttttttgagttggagtcttgctctgtcacccaggctggagtgcagtggcgccatcctggctcactgcaacctctgcctcctgggttcaagcgattctcctgcctcagcctccctagtagctgggattacagacatgtgccaccatgcccagctacttttatatttttattggagatggggttttgccacgttgtccaggctggtctcgaactcctgacctcaaatgatccgtccacctcgtcctcccaaagtgctgggattacaggtgtgagccaccacgcctggcctctcatacccattgttaaaagcccactgccacggctgcctacagtctcagatgccctgggcccttccctctgatccacccctaaaggagtggcgactaggacagaaggagccaccctttctcacaggtgggtcctgtaccacctggattgttaatacccctgcctctggggcactcagggtctaggatgcaggaggagaagaaaactggaggctgatgggccccagaggcaaagaggagggtggggagcctcctgggcagaggggtaggacctggtggagccctgagacaggggccacctccgctcttacctcactctgcacacccacgggcaccagcgctggccgacacagggcaggggcccccagcagcaagtggggggatggcggcgcccgcacttcccacaaaggatagttgactacgatgagcttgctgaagttgaacttgtatgtgaaccttttgcctttggtcttatgcaggatcctcttattgtagtaatatctggagaattcgaagttgagaatagagttggcccagcagtcagagaatagagtcagggacccagtcacattctcctccctagccgggctgaccctaagctgttccccgagaaccactaggctgctcaccacaggccaggacacttcccaagccttggaggggtgggagtcagcaggggtaccagaaaccacggcccttttccttgaaatcccccctctttggccatgtcagccgcctcctctcacctgagggcccggctcagcttgtcataattcatctgtggtttgcatttcctgcggccccagaggcgggccacctcatctggatccttgatgacaaattccccgtactctccctgctgccaggcgatgacatggcggaactcttccttctgcagcagctccaggatgaagtgccacagctggatctgccgggagcctggggacgactcggctttgtaggcccaatcagggaaggccaaccctgggtggagaggggagagtgagggctctggaggccctgccctaggccaccgttggagcagggggtaggcccggccaagaggctcacctgagatccagttgccggggttggctgggatgccctcagccaagcagctgcagtgcatggtccactccggcgagatgggctgtgtctgggccttggggaaatggtcaccacttaagaggaagggaaggaaggaggcagaggggaggacagtgaaagaggaaggaaaaatggagggaaagaaggaaggaagggagagggtcaggaaagaaagagagaaaagggaagggacaagaggttgccagtgaaggggagaaaagggaaccagaggcagcaagcttccccatacccagacagggcccagccccctctggggacctccccgctgcccagggctgactcggactcagggcttccggctgagctacttatatagatggagagaagtgcaaagggtcctatatcctgcccctgctgggggatttagacagagaatgagatctcttcttagggcttaacaggattggagtttttcccaagagaagacaaaaggaaatgtaattaatcatgggctcattctaaatcttgagtgggaaggaggtggcatatacacatacctgtgcctttacagtatttcttttttttctttctttctttctttttttattttttttgagacagagtctcaccctgtcgcccaggctggagtgcaatggggtgatctcggctcactgcaacctccgcctcctagattcaagcaattctcctgcctcagcctcccgagtagctgggattacaggtgcatgccatcacgcccagctaattttttttattttttatttttagtagagatggggtttcaccatgttggccaggctggtctcgaactcctgacctcgtgatccgcccacctcggcctcccaaagtgctgggattacaagtgtgagccactgcacctggccgcctttactgtatttcaaacaatttgacatttgagaagagcaggaatttggtttttttgtttgtttgtttgtttttttgagatggagtctcgctctgtcacccaggctggagtatagtggtgagatctcggcccactgcaacctctgcctcccaggttcaagcgattcttctgcctcagcctcctgagtagatgggattacatgtgcccaccaccatgcccagcgtatttttgtatttttagtagagacagggtttcgccctgttggctaggttggtctcaaactcctgacctcaggtgatccgcctgcctccgcctcccaaagtgctaggattacaggtgtgagccaccgtgcccagacgagcaggaatttttatgggcttttttttgccagtcccaagggcctggcgcaaaataggtgttcaataaatgattgctgatcgaatgaatgaatggtaatggacttatagatagtgtcttctttgttgaacatctgtatcccgctcagagtgtcagctccgagatcagcaaccctagctgtcttgttctcctctgctggctccccagatcccatcgtagcacaggacatcgtactcaaaggtgctttatagatatttgttgaattggtgaaccatggacaggaaccgggaatcttgtggttctccgctgagaagggtggggagtttatggaatgagccctagtgagatagacttgcctgatataggaaaagagaacaaaatatctaagctctaaagccttctggatggaacagaaagccttctggatggtgcaaaaggctggtttccactataactaatggaagatgaaacaatatgcaaagggactgggagaggctgccttggggatgcagcacatgggaactgctcctggtgggccagggcattgggaggttcctgggcgcttaggactgcctgtgaacagggttacgtgacccgggcctggctctccatctctggtggagttagtgtgcagtagtctcagtgagaacttattaggctgtgaggtctggagggcgtgtgaggatttgtctggagggcatgtgaggatttgtctggagttgcttcctcactttccagaggaggctcagacagggaaaatgacttgaccaaagacaggtggtgagttagctgccctgccccctgactcctaatccatagcactttctcatatactgagttgccttaagacttaaaaaaaaaaaaaatctatgttggtgattttcagactctaatgcgaataggaatgatctgaaggtctctttaaaatacggattctgattcagtgggatttgggggacctaagactctgtacttctattatttatttatttatttatttattttttgagacagagtctcactctgtcacccaggctgcagtgcagtggcatgatctcagctcactgcaacctccaggtacaggca

SEQ ID NO: 668 - DNA, 4001 bp, Homo sapiens
gagcctctcagggggtggcggtccacgcccagtagcacctgggagctgtgggggccgaggcagtccgaaggtgtggggtagctctgagctcatgtgcaggtccggtaccccgagcgccttgcagcgggagccggggcccatcagtaatagtgcatgcggcccagggtgcccgtggccgtggggctgggccccagcgtgcctgtgcccagcaggtccggctgcccggtgcgccagatctcccgcaggatccgttcgcgctcctccagccgctgcgcccgctccagctcctccgccgacgtgaagacgttgacgttgaggggcccgtccggctctgcggacagctcggggcccggcagcgtgtcgtcggggcccagccgagtcaccgtgtcctcctcgtcctcgtcgtcgtcctcgggctccagggtgctgctgcgggggtcccggcgctgagccgggccccggggccgcgggcggggcgcccacgagatgctgatgacgagcaggcagagggtgagcagcaggccgaagcagacgcccagcacgaagtagaggccgaagctctcggggttggctgcggggcacagggcgggggtcacggagaggcccggacgggtgggggttgtcccacttccgaaagaccccaggttctaggtgtgggggcgaggcctgtaacccctactcgaagggcattagggaaccgccagcgggcaagagggcggggagcggggcggaggggacggacaaggcgctggggagggaaggggatggtggtcagggaagggttcaggcccccagtcttccggcgcccgccctcaccgcggatgtgcgcgtaggcagccaggctgttgctgagcaactccatgtcccttcgcggggcatccatgctgctctggggggcagctcccctaccagcctgcgaggtcagcaaagtcagatccttctcccagcctggagcccaccccgaccccttccgcgggcagctcctctcccgggagccgcgggcccaggttccaccctggagagagcgcttccctaacttcgtggcggcccggggccctgtcggggggaacccctctcccgggcgcggacgcccctccagtcctgggagcagcgccggggaccgcgggaggccccgccccctggtgaggtccccagctgaggcccggttccgccgtcccggggcgggatggaggatagggacgctgagcctccacgccccaggcgggctccgggaagggaagctgcctctctcctcgcccggccgccccgcggggacccaccggcccggggccaggcccactcaccgtcagcgccccgcttcccggctgcccggccccagcgcgtcccgcggccgcatacactgggtccggccgcccccgcccgctcgggtcccgccgcccctccggccccgctgggctcccaggccgcggcagcacgggcgggacacggaccgagggaccagccggcggaaagtttcctccgaggaaagaggagggacggggcggggcggggcgggcggggaggcggggaggaaaagggctgggagaggaaggggagaggagcgggcagccgggaggagggagagcccggcccgcgggccgtccgtcccccacaggaaaccgccggggaggccgcggcagggacccgcccccaggccactaacagcaacaacagagaggctggagctctgcctgcgtgcgggccaagggctaaaccttggacaggttctttcacttactccgcctgacaaccctgcgacgtgataccattatccccacttcgcagatcaaataaacggagtcttggagagattgaattgactttaccaaaaccgtcaggatttgaatctgctgctctctgatcctaaagcctgagctagaaaccaccgctccccctcctaggaggccccttccaggcaaagctgcttctcttccccagacccatgctggactggaagggaggggactgtccacccctccttccagggcccaggcttgaatgtgtcccctggccgagctctggtctagtcacgcagggttaatgattgttggactccagctttgagccagggcccggccagcagtctcgcagaccccagcgtggggcctctgtgcctgcgagctcctgcgctcttgtgcaccaagcagcttgtggcggcttgtggcagatcccaccccatcccgtcccccaccccaaggctaaacctgcctgtgctcacacacgcatttcccacctgggcttgtgcatgcaatgtggtgtgtgatcagtgtgtgtggcggggggcttccttctgccctgtctccacggggcccccccatcatggacctcccctcccttgctggagctagaatgagggggaggccgccttggcgggagccttagagaggaggaggaaagggggagaggaaattgcagacatagctgaaggcgctgcctgaggcctgtgggccagcgaccctctccctgtccgggctgcagacccctactcccccagtcccgagactgggttcaagtagagggcagatctagatgggggaggactaggactgactcctatggggatggaaaagggactcctgggtgtctttgtgactgtttagtgtgttctgtgaatgtgcgggcaggtatttttgcccacatctgtatatttgtctattaatgtgatgtatttgagtattgttgtgggggcgggtatgtctgtatataaatctgtgcagccactagtcaacaaatactgtgtatgcctagcacttcctagtctagtccacagcatctgtgggtttaaccaactttgcatcaaaaatattcaaaaccaaaattgcatctgtgctgaacatgtacagactttttttcttatcattatttcctaaacaatagatatatttaattttttttctttgagacagggtctcactctgtcacccaggctggagtacagaggtgctatctcagctcattcacaacctttacctcctgggctcaagtgagcctcccatctcattctcccaagtagctgggagggaccacaggcgtgcaccaccatgcctggctaatttttgtagagatggggttttgccatgttgcccaggctggtcttgaactcctgggctcaagtgatccacccacctcagcctcccaaagtgctgggattacaagtgtgagccatcatgccggccaatagtgtattttcatagcggttacattatattagatattataagtaatcaagagatgatttaaagtatacaggaggatgtgtataggttaaatgcaaatactgaaccaatttattttacatcaaggacttgaggatccttggattttggtgtctatgggagggaggtcatggagccaatcccctgagaatactgagggacagttttttttttgttgtttgtttttgtttttgagacggagtctcgctctgtcacccaggctggagtgcagtggcgcgatctcggctcactgcaagctctgcctcccaggttcatgccattctcctgcctcagcttcccaagtagctgggactacaggcgcctgccaccacgcctggctaattttttgtatttttagtagagaccgggtttcaccatgttagccaggatggtctcgatctgctgacctcgtgatccacctgccttgacctcccaaagtgcagggattacgggcgtgagccaccgcgcccagccctgaggaatagttttaatggggatttaacaataaacagaacagacacaaatccttgccctcatggagctgacactaaattggagaaacaatagaagataatctcagatgcttctaagtgctggggggcatgacaggatagggtaatgcgatggacaacacctgggagtggctctcacagggacatccacagtgagacctgaatcctaaggaggaggcagctgtgccaggatctggggagagtgtctgggcaggagtaagaacatgcttgggatacctccctccaagggaagaaagccacgcagatggtgtgt

SEQ ID NO: 669 - DNA, 4001 bp, Homo sapiens
gcacaaatatagaacatttccactcatcagaaagtcctattggtagcactattaaagaaaaaggagacataacactccatttcaactcctactaatgttcaaaactggtttttttttttggtttttttttttaaatgaaggctcacaatgaaatagtgacagctattcattactaggctcattactttctacaatatgaatctgaaaggtactcaaataaaaagctatggcctccatgcactggagttataagaatagctttaacttagcagggcatggtggcgtgcacctgtagtcccagcaactagggaggctaaggtgggaagatcacttgagcccaggaggtggaggttgcagtgagctgacatcacgccaatgcactgcactgcaccctgggcaacagagcaagatcctgtctcaaaaaaaaaaaaaaggaaagaatagctttaacctcaccactttaccactttacctccaccgtatgcattctttagaagactctgacatcatcttaggaaagaacattattaagagacacacaattctgtttatctcttgatacttgtgcacaggtggagactagatctgccatgactatgggaaagaacaagctctctggatctacagctcagacatcatttctatatgtgatactacacattaacactgtcagcccaaaaaactttcgaaattgagtcaccagaatgggacatcaatagtgtgccagtttctagcctacccaccaaaaggagaaattcattcatttcttgactttgcaaaatacttgttttaaagcaagagaaaatttggtggaactagaggtagtaactccacttaaactatccaattatctaggaactagtaacttctacattcatgcaagtgactagactgtgacctaaaatttcaagtgttcttgccaaaaacgtgatcaacccctttgagctcttcaagctccaatcttctcattcataaactggagataataatatctacttaagcactgaagtgacagttaagtggaataatatatgccatgtgtataacaaatattcaaaaataatagctattgtaattgctattttccaaagccacaaaacaccaatgtgcaaaaacaaaaagacaaataaaaaagactgaattagaagaatcctgattttgacacctgctaatagtctggcttttaacctctgtaagcttcagtctcttcatcaagcaaataaaaataagagtcccaatcatagatgcgacgtgagatgtgttttgatttcgtgtgaaattgtctaattaaagccaggtacaaacattagctaatgttaattagcagtttctcccacctccaccaaaaaaaaaaaaaggatgaggtgaggaaactattttaggaacatgatactttacagaaaaatttatgtagcttttattatgaactgtgttcccaaacacgacgggaggcaacacttctgaaatcattgagaggccatgcaaccatcaacactgtcaccaaatagagtttgtgaacaaatgctatggtaaccagtcattttcttcttctccatatgagaaatgtgaagcccatacagacatgctaggtctcctctgtgaatgtgtatattcaaagaaacgtaaacagcagccaattacagctaggagagaattgcggcaagtgttgaattacaaaaagccaattactaaaatacctttcttgcaggtatggaattaaacctaacacttcataaattttgttcatcactcgaatggctgcagtacaatgagataacagtcttaaaataaaactgaagaaatgttaacaagctgttcctgtgttttgaagattaagcgaaatatacaaatcctaactcaataacaaattactttctgttacagcaattacatttttataagttttaatataaaatcaaacatcgttttacacatttacctgtttcccactagggtttctaaaggcagcagtcattttgttggtaaccatgataagcagagaagacagagagactggggatttgaattgaatttatagctgactcataggcagtgttaacaaagacattgccactgggatccacccatttaacaccctttcagttccaccttatacacttgttaggtagtagggagctgggaatgtggaggattaggaatgctgaaaccaaagcctttttgtcttaggtatgctaattgattttggtttttcattccttctttccttcttttctccccttcctccctcccttccttccttccttccctcttccatcttccttcttctgtccctccttccttccttctatgacttatctcagaatgacgttacaattgttattgtgtttgagtgccgacgctgaggcattggctagaaacttctataattaggtgttttctgacactagacaaaattattaatttggtagaactttcctctttgtctttttttttttttttctcattctttacctgaggttttggaattctgcaggctatgttgtgttctattaatggatattgcagtttgttactcagaggctattgagagtttactatgcagtacagaagcaagtgatatagcttgtgagaggtacctaaatagagagaaagccacttctccaattcttttctaggagatctgatatattggttttaaaggattacctctctcatgatggctcccattttgtttcattttttaaagacagggtctcgctatgtttctcaggctggccttgaactcctaggctccagtgaccctcctgcctcagcctcctgaatggctgggactgtaggtgaacacccccaagttgctgatggcttatgcttttaaagcacttaccatagctgggcactgtggaagcgcttttcatctatcatctcacttaatctttatcataatcctattgttatccccatttacaagtgaatccccaagccagtcgccaagaatgctgaatttatttactccttcatttattcacaaatatattaaaattattcaactatgtcagctactttcctaagaggaaggacagtaactaacattttcagctcctacagcatgtcagaaataatgttatgtgcttccacatgacacaactattatttggcccatttaaaagacagggaagctatgcctggtccaaagtcacattgttagtagaaggaaaaagcaaaaatgcaaccatgagtctctcttgactacaaaacctatatcatttggagctacaaaaatgtggtacctgtgttcacattctagtgtaagaatgtgtagtctagtatagaagacaaacatatgaacaagtaaatgaacaataacattatatgttctgttgtaccaagatataatggtgggaacatagagaaaggggagtacctagcatggctgagttgtactatttttattgtcaatacccccttccatctttttccattaacaggtatagatgcctgactcaaacaaagccagtcacattaccttaactccctgatcatactgattgattcaaggggttatgcctgggagaatcctgccctggggtttttcaaaccagagctggaaaagtaaaagccctgtgccctctcattataaagctctaaggatgaaactctaaggagatcctggctatactcagagaagctaaatgagatggagaatatcctgaggatattaaaatccccggttccagtaatcctgcctttcctaagcctttgctgttctaatctttctttaatgctgtgaccacccccataaccttcaaaggaaggagagaaggaggaagggaaaaaggaaagaaggaaggactcatgtacttatcaaacttttttttaacatattgtaccaggcattgttctaggcactggaaatatgtacaggtggtagccattctgatttgaccctgagtgatccttgcttttgacccccagtgatcctctttgcctggtattcatttatgtatccatgtgtaatccctcctacatcgaataaggcttgt

SEQ ID NO: 670 - DNA, 4001 bp, Homo sapiens
atttgggaatattctaaaacatacaacttttacttcctgataagttctggcattgagtgaaaacaatccgtttctgggggagaaaaaaaggcactgtaggtctcattcttaattgtcaaagaattaacataaggtccagacttacctatcagtaggttcacctttggctagtttttcagcacaagcaatagctcctttgtgaagccagcaatatgtatccacagctactacctgccctttatacttcctcacatggatgggttctgaagcttctttgataaattgtagcaatccctgtatccccatggtgccaaattaactacctgatatgaaaagagacagggagaacagtaatatttaaagaaaaatacatttattaaaacatcttagacaaatgaagagaaagcttggagtccaatgcagaaattggtttgttgtttttttttttttttgagacggagtctcgctctttcgcccaggagggactgcagtggcctatatcggctcactgcaagctccgcctcccgggttcacgccattctcctgcctcagccttcccagtagctgggactacaggcgcccgccaccgcgcccggctaattttttgtatttttagtagagacggggtttcaccatgttagccaggatggtctcgatctcctgaactcgtgatccgcccgcctcggcctcccaaagtgctgggattacaggcgtgagccaccgcgcccggccagaaattgttcagatattcaagaatcactgctctttaatattttagctgggctcctccctatcaaacaatttccatagggtagaatttacattaatcactaatactacctctaatgccacttgactgttgcttattgtttgtttagtctttccaaagtgcttttgcactttcactcctgacacatgcttcaaggagccaggcacaaacaaaaccatgcatgcgatggcatcgcattgcctctacaaagggcattaatcataagggtcaacgtgcaaattcaaataggagtagaaactcaaaacagtttgtaggaaggtaagtatttcaattaaaaaacaaaggaaaaattcaaaaagaattacagaaatgatcctgtacttttttaggactgaaattcactgctattagaacgcattattctaagcacgaacattctggtaataaacagtggtggcgcccaggggcaactccatcagcctctctgaaagctaccctaaagaactgtgaaactgcgtctgctatgcaaatacagcttcaagacaaatgctttaactttccacccccttccattccggttgcagccccctaagccctttctatacagagattctggaactgtcacaaccctttctgatgaaacgacctccccccactctacaataaaaagtcagtaatgggcactgagcagttgcttagcatttcataatacaaatctctcctatcaaacgttaagtttggaaggaaaggaagaaagaaagtacaggatcaggaggcagctttaccctgttgacaccttatcagagctctaaaggctctggtccagcagttctcaaatttcagaggttcttagactctcaactccactcagtgactgggattcactagttctgctgtgaatgaattttaaacaaagcagttaatctggatgcaggtggtcctcaagccacagtttcagaaaaacagtctcttacctctcagatgatatctaaaaagagttttctctcactccgaggaaaacggatataatagttcatgaaatttacataagtttcttctgggccaggcaaatatcctcgaataattatttcttctttagcgtagtaagaatggctgagtgcgatagtaagaatgactgtgtacatatctcagaggtcgcatgtggcactcgaggtaacaataacagcaccatcttcactttatccctctgtctcgcggagatgtgcaggcgtggcccccaagcccattccagacgacacgtttccttaggcctgcaaaatattatgggaaaatgtacttgtcaacatttaaaggtggagagattgcatgtaaaacctggactgccagcttctgcggaaaaatgaggtaagtctggcaaccctggcgcctgctccagcccggaatcgtctgctctcttatctccctccgttcactgaactgcagacctctggttgccagacgtcccctcggaacaaaacacatactccactcaggctaagggctccgctgttgggttgggaagatcacgccagaccctctccttcccttcctggaagacccgaatcccgagaggagggtcggaggtgacgcgcaggtcgacccccaagggaacccacccattagcctccgcacagcccgctcctctcaccttccgagaagggactctcctcctccccttgagcggagccgattgcggttggagaaacccgctccgacgcccctaactcactgtggccagagcacccacggccggcaacgcagaacacgggtaacttgcctacacagcgcgcgaaaggctgacctttcaatttgcgcgggttccttgcggccccgcccagaggatgtgacgtcaacgcgtatcccgcaacccggttccgcctcctgcggcttccaactcatagggttgcgtcctgagctctccgtctcgctgggtagacagcggctcactgccatacgactgcagccgctgctgccggcccgaactccgtgcggcttcttgagggcgcgagtggcactggcgctgatggccgatggtgagcaccgcctcggaagttgggagtgtttacacccgccggggctgctgggcgttgtagttccctcctggctgcagccccagttctggaggctgatgttgaaagagcgccgtcgcgcgttgatgttgaggcttttcaaacctgaaaaagttgctcagtccccctcggcgtcatcagtcccatcctaattccttcattctctttaaaacgcccggttgcctctacaaatcgaaattgaattcagttcacgctgggttcttttccccattgcagtagtagtagtgattaaaatctgcccctaccattttacctagaacccagcttcgtttatttttgacataagtcggggaaaaattagctatataacaagaccttgaaaatgggccttagagacaaagactttagaggcattttggactttcatggtcacttgtggctaggtttccaatcctcataacaccccagacctcgtcgctgtcctcttagggatattgtaatttaaaaaattggaagaaaccttaggccagaccacaaagtaatgttctgggctcaaagatcaataggaatgataatgcagactcaattcaaggaattgaaggggaagaagtgagcacattgttaaacatgctccccatttgattacgttctttacatcttttcctcttttaaagtctttttatgatcactctaacatctatcatgccaattttaaaggcatctatgatgccttaaatttgttactaaaattgttgaaaaggtgccacatttggggaatgtgtttggaaaagctgtgttgctttctccctggttctggtctttagagctgggactaggagagatgagaaaagttatcttccctccctcttccaaaggctatggtagacctaaccctaaactagcttggagtggactcttggagaaagtgggggacaatttcaaactgcagtagattaaagaggaacttcgatgtgggcagcatgtgtttgtagagaagccttcttacactcattggactatccagctgtagtaactgcttcagtacctagaatccaaccatgaatatatcacacatgggggtcttaggaaggaaccccaaaatcaaaaaggtgtccattccagtgtcactggatctgtcataaaactaacatgagagtttgctgcactgtgaacggctcatgtatttactgtgaatttgactcccaaggtttcaaactgtattcttggctgcagtgttcaaa

SEQ ID NO: 671 - DNA, 4001 bp, Homo sapiens
ctcctgcctcagccttcccagtagctgggactacaggcgcccgccaccgcgcccggctaattttttgtatttttagtagagacggggtttcaccatgttagccaggatggtctcgatctcctgaactcgtgatccgcccgcctcggcctcccaaagtgctgggattacaggcgtgagccaccgcgcccggccagaaattgttcagatattcaagaatcactgctctttaatattttagctgggctcctccctatcaaacaatttccatagggtagaatttacattaatcactaatactacctctaatgccacttgactgttgcttattgtttgtttagtctttccaaagtgcttttgcactttcactcctgacacatgcttcaaggagccaggcacaaacaaaaccatgcatgcgatggcatcgcattgcctctacaaagggcattaatcataagggtcaacgtgcaaattcaaataggagtagaaactcaaaacagtttgtaggaaggtaagtatttcaattaaaaaacaaaggaaaaattcaaaaagaattacagaaatgatcctgtacttttttaggactgaaattcactgctattagaacgcattattctaagcacgaacattctggtaataaacagtggtggcgcccaggggcaactccatcagcctctctgaaagctaccctaaagaactgtgaaactgcgtctgctatgcaaatacagcttcaagacaaatgctttaactttccacccccttccattccggttgcagccccctaagccctttctatacagagattctggaactgtcacaaccctttctgatgaaacgacctccccccactctacaataaaaagtcagtaatgggcactgagcagttgcttagcatttcataatacaaatctctcctatcaaacgttaagtttggaaggaaaggaagaaagaaagtacaggatcaggaggcagctttaccctgttgacaccttatcagagctctaaaggctctggtccagcagttctcaaatttcagaggttcttagactctcaactccactcagtgactgggattcactagttctgctgtgaatgaattttaaacaaagcagttaatctggatgcaggtggtcctcaagccacagtttcagaaaaacagtctcttacctctcagatgatatctaaaaagagttttctctcactccgaggaaaacggatataatagttcatgaaatttacataagtttcttctgggccaggcaaatatcctcgaataattatttcttctttagcgtagtaagaatggctgagtgcgatagtaagaatgactgtgtacatatctcagaggtcgcatgtggcactcgaggtaacaataacagcaccatcttcactttatccctctgtctcgcggagatgtgcaggcgtggcccccaagcccattccagacgacacgtttccttaggcctgcaaaatattatgggaaaatgtacttgtcaacatttaaaggtggagagattgcatgtaaaacctggactgccagcttctgcggaaaaatgaggtaagtctggcaaccctggcgcctgctccagcccggaatcgtctgctctcttatctccctccgttcactgaactgcagacctctggttgccagacgtcccctcggaacaaaacacatactccactcaggctaagggctccgctgttgggttgggaagatcacgccagaccctctccttcccttcctggaagacccgaatcccgagaggagggtcggaggtgacgcgcaggtcgacccccaagggaacccacccattagcctccgcacagcccgctcctctcaccttccgagaagggactctcctcctccccttgagcggagccgattgcggttggagaaacccgctccgacgcccctaactcactgtggccagagcacccacggccggcaacgcagaacacgggtaacttgcctacacagcgcgcgaaaggctgacctttcaatttgcgcgggttccttgcggccccgcccagaggatgtgacgtcaacgcgtatcccgcaacccggttccgcctcctgcggcttccaactcatagggttgcgtcctgagctctccgtctcgctgggtagacagcggctcactgccatacgactgcagccgctgctgccggcccgaactccgtgcggcttcttgagggcgcgagtggcactggcgctgatggccgatggtgagcaccgcctcggaagttgggagtgtttacacccgccggggctgctgggcgttgtagttccctcctggctgcagccccagttctggaggctgatgttgaaagagcgccgtcgcgcgttgatgttgaggcttttcaaacctgaaaaagttgctcagtccccctcggcgtcatcagtcccatcctaattccttcattctctttaaaacgcccggttgcctctacaaatcgaaattgaattcagttcacgctgggttcttttccccattgcagtagtagtagtgattaaaatctgcccctaccattttacctagaacccagcttcgtttatttttgacataagtcggggaaaaattagctatataacaagaccttgaaaatgggccttagagacaaagactttagaggcattttggactttcatggtcacttgtggctaggtttccaatcctcataacaccccagacctcgtcgctgtcctcttagggatattgtaatttaaaaaattggaagaaaccttaggccagaccacaaagtaatgttctgggctcaaagatcaataggaatgataatgcagactcaattcaaggaattgaaggggaagaagtgagcacattgttaaacatgctccccatttgattacgttctttacatcttttcctcttttaaagtctttttatgatcactctaacatctatcatgccaattttaaaggcatctatgatgccttaaatttgttactaaaattgttgaaaaggtgccacatttggggaatgtgtttggaaaagctgtgttgctttctccctggttctggtctttagagctgggactaggagagatgagaaaagttatcttccctccctcttccaaaggctatggtagacctaaccctaaactagcttggagtggactcttggagaaagtgggggacaatttcaaactgcagtagattaaagaggaacttcgatgtgggcagcatgtgtttgtagagaagccttcttacactcattggactatccagctgtagtaactgcttcagtacctagaatccaaccatgaatatatcacacatgggggtcttaggaaggaaccccaaaatcaaaaaggtgtccattccagtgtcactggatctgtcataaaactaacatgagagtttgctgcactgtgaacggctcatgtatttactgtgaatttgactcccaaggtttcaaactgtattcttggctgcagtgttcaaagactaaaattggaaaagaaaacactagttacaatacatttcactaacagaatatttttactctttgggaggacaaaaccatttgcatcaatgtgtgcagtaatttactactgccttaagtgtgcctgtcagttccaggtggcatggaggcataaagagatgtcctgtgtcttcaaggaacttaagatctagttctgtagacaaaacacatgtttatgagacagttaagtcacaaatcatgatggcatgttattaaatgctgaaataaatggtatatcccatatgtttccagcttaagactcagttccaatgttaccagtttccaaatgtcttccctaagttagatatttgtttgatatgcacaagcattctgtgatggctctttggtcctgacacttctcatattctcattgtgtttgaattgtctttgcccttcaatagactgaaaaccttttgaggtagggttgccagatttagcaaataataacgtaggacacccagaaatttgaatttcagatgaacaacagataaatttttaata

SEQ ID NO: 672 - DNA, 4001 bp, Homo sapiens
cagttgcactagccatatattaagtgctcagtagctacatctggctggtggatacagataaggcacagatacagaacattccctgatcacagaaagctctactgaacagcatagagttagactatttcctgtgtacacattaactccccaaagagagaggaagctcctgaaatgtatggagttcctacttgttttacatacaacattgagaacaggtagttctaaacagggaagtgaaatgtcttttggagaagatacaaagcagggcattctctgtgaaagtattcatctataagaataaaacagtacactagggatggatgactgatgctcagatgtgtctgggactttcctacgcagaaaagaatccagaagagagcataatgcagtgcattgtgtcccaaattgtagtttgtatgtctgacacgagacgattttacatagcacatggaccaacatttttagatacaccttagaataactatactgttattggagcagccatcaaatggctaatttcacagatattgtttcttaggacaagtttgatttttataaaaaaaaaaagtaagtaaaaacatagaataatacaggtagtacacaggtatggcaaaattgttaggtagtaagtgaatgggatgctgggaaacagcataatgccaagagtctgggagtcctacagatatggattctaaacctaatcctgagtagttcggtagcatttagtagtatgctacttgccttttgagtaagcttggacaaggttctagttttcctgaagttactgacacatttttaaaatacctactaaccctactgagatatccgaccattgagtgataacatatagtacgcatattagcactcgatgaagatagatctccttctttttccccaaggaagagatgagagagtgtatcgattccccctgacaaaggagatgaaactttagaagagaaactcctattcacctgtgacttcgttgatcttcctcctcatagggaaggccagaatgctgaaatgacaaggctagggaagagaaagaagttctgaaagaccaggtctgcattaaagaacctaaattagcaacttaggtccttgctatggtagaaccggaacttctggtcctttcttacctgaccattccctcacgttgggtgttttctcctctcacattgacactgcacagactgttacccaccccagatcctaggttacataacgctcgcctctctcctggggcaaactctctccatgatttcttcgttcccccgtactctagatgcaatgacttgatccaatccctgctccctgaaagtaaaagggtcagacataaccaagatccccaaggagctccgagatcagttccctcttccagctccattctcaacccagcagctcaagcaagagaccttatgacagcggctctttctctcagatgggttactgccttctgcagaattgccgatggcaacatcctgacttgttcagtgcggcccggacttgtgggctccgcgggcgtttgccttcagggaagatctttcctctggccctaaagcactgtctcccagggagtgccatgcatgccctaaagtgtactgagcacttcctacagttctggcagagccaggaataagaacagggagccgtccacctcgggaaggagtcccggccaacagcactgtgttccgagggcgaaggtccagaacgggaacccggcctgtgaggggagacgagacgagccgcttcccgggagccgcgcccaccaagggagggagacgcggcgatcgcagggacagaaccctaagctccgaaacgcagcctcccagcccattctccggccttcccctaacctctgatactcctccgaacctcggactccacctggtttcgccgcggcctcggagctgctcccggacgctcccggcgaggagactgaggaagccgggcagagcgcgctgccggagcggactacacagtcggcccgccactcgcaaaaaagccgcccagagcccagtcccagagtgccccgcggctgcccacggaccgccttcccagaggccctcgcggcgccgcctacctcgcgaggctgcggctggggcagaaatccgtctctgtgagcggaggagggtgtgcttatgcgagagcaggttttgggagctcactaaagcaggtcagtccctctgtttgcgccgttgtctgtgggtcgtttaattccgggcgcagctgatctgtaacttccctcactggcgaggtctcccagttaccaccgggacaatccgagcaaggtctgggcccctcgctgcccccggtgaagtgccgcgtctccgcttggccatccgtggattcagcatccccaccttagcacctcccgccggcttttccattgagagcaaaaccacgaactcacttttgagagatgctggcgctcccctcatcaatatttctttttttttttctgtttgcttacttttaactaaccttttattgataaatataacacaattttattctgaaatataaaccaaagataagtataattatgaacagccaagtcattagagcgaaaaaagaatagtgtcaggttcttcacagatacacttcctgagaaaaccactagcccgacttttataacactttgcttttcttatttatatttatttatttatttattttaccaaaagcagatacttgactctttgcttttctttacggtttatcacgcatacttgaaaactggatttatgacaaaggtggcatcatacagccatggagaaaagatggtctattcagtgaaggttctatgacaatatgaaggccgggcacggtggctcacgcctgtaatcccagcactttgggaggctgaggtgggcggatcacgaggttaagagatcgagaccatcctggccaacatggtgaaaccctgtctctactaaaaagtacaaaaattagctgggtgtggtggcacacacctgtagtcccagctattcaggaggctgaagcaggagaatcgcttgaaccgggaggcggaggttgcagtgagcggagatcacaccactgcacttcagcctgggcaacagagggagactccgtctcaaaaaaaaaaacaaaacagaaaacaggacctctatctctcatttcatcacaaaaatcaattgtagctggattaagacctaaatgtgaaatcctaaactataaagtcttcagaatataatataggaaaatatctttggacttcagaataggtaaatattttaaaacaaaaatagaaaaacattaaattggccaggcatggtggctcatgcctgtaataccaacactttgggaggcccaggtaggcggatcacttgaggtcaggagttgagaccagcctggccaacatagtgaaaccccgtttctagtaaaaatacaaaaaattagccaagtgtggtggcaggtgcctgtaatctcagctacttgggaggctgaggcaggagaatcacttgaacctgggaggcggagtttgcagtgagccgacaacaggccactgcactccagcctgggtgataaagtgagactctgtctcaaaaaaaaaaaggaaaaaaagaaagagaaaaaaggaaagaaaaagaaagaaagagaaagaaagaaaagaaaagaaagaaagagaaacattaaattaagacaactacaggctgagtgcagtggctcacacacctgtaatcctagaactctgggaggccgaagtgggtggatcccttgagctcagttcagaaaccagctggggtaacatggtgaaaacacgtctctacaaaaaatacaaaaattagctgggggtggtgatacgtgcctgtagtcccagctactctggtgcgtcagttgggaaaattttgaagtgacttgtgttttagataatattatcaatcaattataggtctcctgagtgtcataatgattttgtggttatgtaggaaaatgttctttttcttagaaatatgtaagttgaggccaggtacggtggc

SEQ ID NO: 673 - DNA, 4001 bp, Homo sapiens
tctgggaaatacagcttcagggcctcttccaagaagcccatggtctgtttggtgaaagcaaccactgtgtaacttaggttcacccagcagtcatcccctgtgtactgctcaaagttacttaccccacaacttttcatctcttctttgagcttacccagggcttctggcgtcatcaagttcatcctcctccacatctcttcagagttgcgatgtttagtggcttcaatgatgatttctttgtaactgtgcaaggccccttggatgtctttcaccagaagggcatggatgatgaaggtgagatccagtccgatatcacccagttgctggcaatgctccttagccacttttacacactcagctgctgtagagaggctctccttactatcaaacacctgcttgctaaaagcatccacgaacatgcccatggctgatcttgcccagaccacaaaggcagagtagcagccgctgtcagtgcctgcaaaatcgatctcaaattctcttgcagtctcgagaaggctggtaaagaagacatggcacagcttatgaatatagagtaaagtggcaccttcgatgcgaagctgacgaattgcagtatgaacagcggctgccctgtttctcaaaaatagctcacaggccttcgtgcactggcccagccggatcagttgcgaaactgctctgcgagtagccttcggaccacctctcagggaacgatctggggagagttcgaaaactagcacctcagtgagctgtcgaactcgctcctccactttggcccttagttcttttacaggaggtgggctaggtttatcttccaggtaatggttcaatttatccagcaggtcaaccgccccttcaaagtctctctgcgcaatgcagacatccaggtcttcaggtaactcctggatccattccatggagaggtccaccttctcttcctctacctcaggaacagctggttcttcttcttcgtcatcctcaaatgggttagtggccttggaagtcacttggggtggccctcgaggggccgctgcctcctcctgctcccttcgccttttctcactgagggccctcttggtgtcctccagcacttccagccactctcgtttgattttagcattttcggcctggaaaatacggctctcggggaacataagcagcttgaacatgtccttcatgggcgggttgtccttgacattgactacggccaaaccatctagggaatagagagcgttgtagcgatacatcccacgccgctgaggcagccaggtagccaccaacaagcaatcgttcatgagaaagccgtgcacccgctgcagttgggccatgtggtccgcatcgtattccactaggtccccattgtacaccaagtactgtcccggcgtctccagcagatgcctgcagccttccaccttctcaagcagggtggtgagagtgcgctgctttccttcctcgcctggaccggagccgtcgcgggaggcacccccgggggtggagaaaaagccggcctggcctcggaggtggtctcggccccccgccccaccgactccctcctcccctccagaggcggcggcggctccggcggcagcagcggcaggcagcaacgtaagcgggatgctctccaggctgcttttctgctcggtcagcaaatggctgagctggtacatctcgctctccaggtaggagatctcgcgggccgtctctatgaactgccggtagttctggtagacgttgcgcttcaggttctgcgccgtctcctccgccagcgcctggatgcgctgccggtgctcctggaggtcccggtccccatccgactgctgcgagagctgcttcacgtacagccgcgcctcaaaaccccctgactccagctgccgacgcaggcggctcgccccactgtccgacatcgccatcgccatttctctccgggtctcacgcactcactgtcactatcggcgccgcagccgccgcggctgtctagacccacccaaggccaaccgagctcctgggctgaggaagcaggaatgggaacgagacgagtacgcctgcgccgggtctgagcgtcagacactgcgcctgcgcaagtgggccgagcgcagacattgcgcctgcgcagcaatgccatcggttaaagcgcatgcgcaagatgagctattgcggaagtgaggggagggagaggccgagagaaatttcggtactgcgcatgaaccgagcgtgacgttgaggtttgaaataaccggcaaagagtaaaggctgaaactagcttcctgaaagcttcgtagggcccgagccctgtgagcccaggttctgcgcccactaggaggtgtcatgctgactgctttttttaaagccctagaatcttggcttcggcgtttggggtaagctccgttctcgttctcaagcgcgtttccgcgaactctcgcgggattgacgggccgtctcgagagccggcatctcctaggagctagtcctggtcctcggctaggcggcttggggtcgcggcgtaactggggagccagcctgacgccggcggaccccgcctgtgatcctggcaacgatggatgatgacttgatgttggcactgcggcttcaggaggagtggaacttgcaggaggcggagcgcgatcatgcccaggagtccctgtcgctagtggacgcgtcgtgggagttggtggaccccacaccggacttgcaggcactgtttgttcagtttaacgaccaattcttctggggccagctggaggccgtcgaggtgaagtggagcgtgcgaatgaccctgtgagttccgagccccgctggggaaagaggcgggactggcagctttcctgcagcccccggccctggttttctctcctttctctagtccgacggtcccagggggcgttaaatgaggggagtctggttttggacctggcaattcctgcctcggcgtgtttctgtcttccttaccttttctcccactcgaacaataagaaagctgtgtagaccacaccgccacggttggactcagggccgtaacaaaaaagagatttttatttgaatctcacttcacttgaaaataacaagttcctgatttgccttatgatagtgctgtaggacccagaagggagaagcaaccaaatctgcacctaagaaagtgctgaggacgcagagtaactgccaaaggatgtgtgttctcctcctctattcccgttaggaaacccactttagttagctcgtgtgttgcattggggatcttcagtgatgcttttaaaacgattctttttctacacgctaaatttcagaaatccctatttgaaataataatctactcctgcacgtgaacagggttaagtttaagatacagttgtatcccagcatgcttgtttttgagttgatagaaaacaacctactgtcaaacaaattaagatatgatattaaattgtgtttaaagtaccaatttcctttatacaggcgtctgttatgattttggagatatgctactggagatatctgcttgttaataacaccgaactgtaacttgtcggaaggagactgggagtagcagaataggattgcctttgagctgttgcagcctagctagggcaaggggagctgcagttgggccatgtggtccgcatcgtattccactaggtccccgttgtacaccaggtacggtcctggcgtctctagcaggtgcctgcagccttccaccttctcaagcagggtggtgagagcacgctgctttccttccttgcccggcggggatcggagccatcgcgggaggcgcccgcgggggttgtaactaattaattaggtgaaatgcaagtatctgctaaccaaggggggtatactttcatgaaagccatctgccaactgagttagtgtgaactgcccaagaatgtgtaaggacttgggcatatttggccaatgtaacacatttttatggtgattgttttctaggtgtgctgggatatgcagctatgaagggaagggtggaatgtgttccatccgtctcagcgaacccc

SEQ ID NO: 674 - DNA, 4001 bp, Homo sapiens
attgcttcaattttcacattttatagctcttcataccacagaaaatgtttaaggaaaaataaatttcaggaaaaatttatctacttctttgttttcatttcttttcactaacacaagaaaacaaagtacagtacttaccactgaagcaacctgtctccctgtgtttcgcaaaatgcttggaagccaggaaaacttcggtaaaaatcatactcatcgccaaactgtggtaggcccccagatgccttggtgactgccaccacggacccaagagcaaactgtcaaaaacaagaaaagatggcatgtttacacagggatccccattcatttggtatgtcatttttttgatctatcgtatacaaggtatctactcttcatccatcaaaaaaagcactcatttagtgccaaaccccaatctaatctaggccctgagaatacaatactgaacaggaaaccaagtttggagcttatattcttgggagagttgagagacagaatacatacgtatataatctgattaatattcacaaatacctggggttgaatcttgactctgctacgtattaactgagatcttggacaagtgattgctttatttggactttagtgttctcctctgagaaacaggaaaaataaaaagggcctgcaccacagagtttttgtgaggacagaatgaataagctaataaaagcacttaggacagttcttggcacataagcgttattattacgactcaagttcagatccaagagctttctacaggaatttgtttttgtgttttcatctggatgagcatctaaaaacaatacaagcttatcctagatccttggacgacaaatttataacagctactatctaaaactggatttgtgtttattgttcagttagtgtcaagtggttctctattttaactgttgtgaggtaacgaaaaaaagccgtgaagtgacataaatgatggctgatcatgtgaaggcctaaaacgtcattgtgagttttgtgaataaacatttcccaagaaaaaagcagagaaaggaggtgggaaattaagtcacggaggggaacatggtagcttatgagcatgaccgccacacaaccaggaccacagttagtggtccaggaactattgagagccatgttaatgaatcaatagcattagctaacagcaaattagataagatacaacgttagtggaatttctgtaaatttatagggttaatttacaaattattttagtttcattgctttgtaagagctatgcacaccttaagcctagttgtacgtttgctcatatttaagctaagttatacaaagatcttaagtgaacgccctgtataccttccaggagttactaataaacgtgcaatggggctttaacaggtgacatttaactcagggttaaaaattatgtaggactggacttcagaaacagaggaagagaagggccatactggccgcgggaggagacaactccaggcaagtgtggggagcgcgaagaagccgagcccctgcggagagctggtcgggtggctagggcgtggcgagcgcgacgtcgcaagggctagggacgtctgggtggcaaggaagcctttcccaggatgcgagacggctttccacatttgggcctccatggacttaggctcgcaagcgggacgcccctcagtgtccgtttccgaggccccatccccggagggtgcaggagagtctgcgcccagcgcggacaggggccccgcgaccctcgctcgggctccactacggcgggcgggcattggctgcccagagggcccagtcggcttccggcggccgcgggcgactcctggtacccccgaggccccgcgaactcaccttcacaaagctgtcggcgtccgggaagcctggcagcaccatctctccgtcggatttggttgcgctggtcgccgacaggaccctgggctcccgggtactgggtggcgccattttttcagcctgcacggctcgtctcgcgagagcttgtcggccgaggagacgggacgcgtgcgcaccacgcatgcgccaggtcgaagcggcgggcggggcgtctgattatagtgtggggagcctgcgattggggtggggcgcctgcgattaggttgggaagcctgcgtttagggtggggcacctgcgattaggttgggaagcctgcgattaggttgggaagcctgcgattagggtggcactttcgagcgctctggtgtgaatttcacgttcttttacctcatattgtatcatcccaacaaccctgtgatctagggtgcggcctggaggacctgactatcacatatatttttgacacgaggtttgcccaatctggtttcgaactcttgggctcaagagatcctcccaccttagcctgcgaagtagcagggaccccaggcgagggccacgatccccgcttatcctcgtgtttatttaaaaatttaaaaaacaaacaaaccgggattaccgggagtggtggtgcgcatctgtagtcccagctgctcgggaggctgaggtgggatggttgcttgagccgaggaggtggaggctccactgcactccagccggggtgacaggatgaaaccctgtctcaaaaatttctttttaaggttatgtttttgaggctgggcgccgtgactcacacctgtaatcccagcactttaggaggccgaggcgggtggatcacctgaggtcgggagttggagaccagcctggccaacatggtgaaactctgtctatactaaaaacacaaaaattagtcgggcgtggtggcacatgcctgtaatcccagctactcgggaggctgaggcttgagcccgggaggtggaggttacagtgagccgagatcgaaccactgcattccagcctgggcaacagagtgagaccttgtcacaaacaaacaaaaaaaaccatgtttttgggacaaagtttcactcttgctctcccaaagtgctgggattacagatacgagtcatcagcgtgcagcctatttttatttttattttttttgagatggagtctcactctgttgcccaggctggagtgcagtgacgcaatcttggctcactgcaacctcccgcctcccgggttcaacgaattctcttgcctcagcctcccgagtagctgggattacaggcgtgcaccaccacgctcggctaatttttttcgtatttttagtagaaacggggtttcaccatattggccaggctggtctcgaactcctcaccttgtgatcctcccgcctcgacctcccagagtgctgggattacaggcggagccaccgtgcctgccctgtttattttttttttttgagacagagtctcactctgctgcccaggctggagtgcagtggtgcaatctcagctcactgcaacctccgcttcctaggttcaagtagctgggattacaggcgtgtgccacaatgcccggctaattttttttttttttttgtatttttagtagagatggggtttcaccatgttggccaggctggtcttgaactcctgacctcaagtgatccacctgctttggcctcccgaagtgctgggattacaggtgtgcgccaccagcgcctggcttattttttttagactgcatcttaccaacctggtctcgaactcctgggctgaagccgtcctcccacctcactgggattacaggcaggaaccactgtgcccggcccagcctcatatttaaagtcacctcctcccaagctctggctggttctgtgttcccctcacccatttggtcttgactcctgtaattaattacacctcccctgccccctggatctatcttttccctctctattggttcattcctaacagcctacaagtacactgacatctttcccaactaaaagagaaaaggaaaaaacactggctcccacatctccttccaactgccatcatctctctcttgccctttacaggtaagctcctgaagaaagcgtctagctccaactgtgcttcctccctccagtaccctctgaactcctccaagcagacgttgtt

SEQ ID NO: 675 - DNA, 4001 bp, Homo sapiens
ttattataatcattatttatataagtgcttagcacagagtaagcactatacaactgtatgtggggaaaaaaaatattagggtaggaggtttggaatgagtcgtgttttatgttttgaaagatccccaggggagaattccaaaacctaccttagacaacccttgcttcaagtccccatcttaatggaagtgctctctgccatctaacctggctccctcctgctgctgcagctgaggcctaagtctaccaggactacctggttctcccatctcagtcctgccttctaccctcgtttttgggcttgcgtctattccagccccctcccatccagcccccaaggcaaaaggttcacttactgcccaggtccagggtcttgctcacagcgcccatcccaggggcaggcagaggagccagtgtctgctgtgcgccacccacccctctcctcttccagggctagcagggctaccccgggctgggggctgtgttgccgcagctggccaggagccccacctcgcaacgggtgggcttcagggagaaaagggagggccacatcaaagccgggccggaaggagtccaccgtggggctggcctcagccaccatagcctgtcccagctggaaggtcctggggcagggagccgggtggagacggaggaccagatggttcctgcccctgttccattgcagaggcattgagctgcactctccagtctgggcgtccaggctgaggaggaggaggaggcaggccccagcagggctgaatgtgtagaagcgagagccctcaatggaagccaggatcctgcgatgagtctcagagatggttccaaccgctgggtacacgaataccttaaggccatcgcccctgcactttgaggtatcaaagcaagattcccagttgcagctgccaccatgaggggcttgaggaggtgaaacggcatcttctgggagctctccaggctgggagaagctctgcaggagctctgcatccagccagcggggccagccttgggaagccccgggccgaggtctgggaggcaatgccaggcggagaagggagaagcctcccagcaggacaagcaggagccaggaggctgacagtgccagccacagggactttcttctcctccacgactgcatgtggccacccacagtcagggctagggaagctgggaggcctctgccagcaagcaggaagagcagggcctggggcgggagaccagagctgggaccgacctgctagtcctgtgctgtcattgtacagatgggaagactgaggcccatcgagaccaggccgcctgtctaaggtcagatagtgagtcaccagccaggcaggaggaggccaggtgggacccagcttgctggcctggcccccctgctctcaggactctgccttctcggcctttggacaaccaagccagccttttccctcccagcagggacccctgcccctgggcactgctctggctgacgcaacccctgtccagaatgcagggccgtgtccccctgccctcctggctgcaccccttgaccttgccctcaactgagaggagggctgtctgccaggccatggggaccagtcagagctcccacaggaggcggcttggccagggacaggctggagggagctgggctggtcttcccactcctccccttgcctgagcagccctggctgcccctgtgcccgctggcagacgcttctgggctgtggcccctgtggctggagctaaaattagaccctgcatcccatgtggatcatcggcgtcagctgaggtcacagcctgggtgcagccggtgtccccctgccttggagggccaggagggctcggggtcctgatccttatccactctgccgctgcaccagctcaggaagtgcagcccctcttccccgcagcccagcagctgccttgcaccatctggcttggagctatcacagtgcagaggccagggccgctgtgccaagccccccaaaccctatggtatctcctcccatccctctccagtcggcaactggcccatcctgatctctttccttagcagcagcctggctcctcccctcccagccctgattcgctcctggctgggaggcagggtctccatttaaccccttccaaaccagtttcctcaattgctaatccaaccagcaagtactgcaactcacagctggccatgagttatcacagcctctgtctctcagtcctccagccaccctccaaggcagagatttacctgtcatttcttacagatgaggaaagctcagagaggggatgaactcttcctaaggtgacccagctaagaagtggcagggtggggatttcaatcctgagctcctggtcgttggtcaccccagctgtgggccctgtggctggagaaaaactagaccctgcacctgctgtgggccatcagagtcagtggaggtcagagcctgagtgtgaggaatctctgaatcggcacatgagaaggtcaacaggtgagacaagtgaggagttaaggggcgggggtggaggaattgggtaaggtgcccccaactgtccccaggattggtctctcctccttcagcagccccacccccaatctcctccaattcccagccttttgctccagtccttatggaaagttcttcctgcacttgactcttccatagtccaggccccatggagggatttccccggtcagtgccctgtgaggggagtcaggagtgggtgatgtcagccactgaggaatctctggggtgacgggggagacacactctggccatgaggagttctgggctgatgagggaaggcacagggagtggacagacttgagtgggttctgcctcttcccctgactgcctcgggggtgttgggcctctgtccccttatctctgggatgggcataatgtcagccaggaatgggttgccaggttgacgcaggcctgtcccctgaggtccctcaacaagtggtggcctcctttcccctgcgtgcctccccttgatcttggagggctgctgatcagaccagggagccaccgtgggatgttttgccctcagtgagcagccagtgtgagagtcctaaaaatggcccacaaaggggacacttgcctcttggcactaatggctcagccactcggtgatgaactgcagttcctgcataactcagtcctcccacactgagaggcatccacaaaggccactggctgcttcgcacgccccccctttcactgtgcccagccaactcctcatcctgcaggagtcagctgaaagctccctccccacaagaagcttctccaatgctccgcaggctgggttagagcccccgtctaggtcctcatgtcattccttcatccctctatccccatacacagtcatccattcatctaacaaacacttatgagtgttgaatatgggccaggttctgagctaggccaggaacacaaccctgagtaagagtaatcatagctgacactcgtattgcacttacagcgtgccaagcatccctcttttgtatcagcttgtttcatcctttccccaaccctaggagggagaaactgtgatgatccacattttacagttgggaaaactgaggccgagggagcttaagtaatttgcctgaattctcacggcttagccaggacttggacccaggtagtgtgctcctatatccgctgcaccattccagctcccaacagggagggagacagacgcgtccccaccctccagagctcgctgtcctggagaagacaattatagaactaggcaattgcaggcaattacagaatgaggggaggggaccctgagagtacacagaggggctgcctagcccagggggccagagaaggcttccgaggaagtgatacctaccctaagacctgaaagacagcaatgtggtttttagaaaaatcgctgtggctgtctgtgtgggatcagacaggaaatggcaggactggaggcagggacagctttttgactggtctgtcaccccacaagtctctcattcattcaacagctatttactgaacccctatt

SEQ ID NO: 676 - DNA, 4001 bp, Homo sapiens
agtatatgtattttatgatcttataaaccgatttaatcttgtaacatacaaaggaattaagaattctgattggtgacttgcaagataccatttgaacagagttgaagaatcatttttgattttccaatacgacatattgaaagggcaaaaggaatggcttagtatttatggaaagacttactgagtgacagctgtcccttcacactgctccaagggcatcccttgtgtaaattttaaacatcacagagttctaaaagacgagactgatttgcctgtcacaacccccccctttcttcataactactcttttccataaaattcctccagggaaggaactttttatttatctggctttgtatccccagcacccagcacagagcctggcacatagaagacattcattaaatgactgttgaatgaatgaaagaaacaaatttgatatgacaacaaagataggttaacatatatgggacaaacattatttgacaatgacaaaagaagtgaggcacagcctgacgtttttcactcatagaacttttcctgatttaaatagtgtccacctacacttttatattgcaaataaaatgcctttagttttaaatttggtcattatgctctttaagactgaaagatgtgaagacatcaccatcactttttgaaaggagaaggtcctcatgggaatacctatcatatatcttgggggatggggagtgggggaatttgggagtctctggaaactgatgtaactgaaattaaacttcaatttctcgtacccatttcaaaactatttgaaaagaggtaatgtaggtttctccataaaccacttaagcgatttctgatttgtagcaatacagtataaaatataggacttattttcaaaggcagaatacaaaaaagttcaaaatgcagctgaccttgatgagttaggattatgctggaaatcagttgctgaaatttaattatttctattacttctcccgccttctcccaagttaaatcatattgaataagggcgttttggagaaaaatccaattaccatagaattatttatctttaaactatctagtttgcacccaattaatttttcctcagcagtgcagtagagtaaaattcaaggtctactgctaatacaaaaacttccttccaaaaaaagagtaaatgctactaattttaaatatttctacacttaaattaaaagaatgaaatatacgctaacaaaggcaaatacaaaatactcttcccagaacttacttctgaaacctagctgtttttacacagcagttttaattaacatttttcaaaattgtagaataagtacatattttcaaaaataaaaccaccgaatactccatacacacacacaaagttctcagaacgagagcaaaacatgcatatatcctcactacaaaaagaaaaatactaatactggagcattttgctgtgtctccttacctcgagtgcagtagattgcagtagggccagccgatttatttccctgcagcttagttatcataaaacggaaggggcgtctcgtttgctcatttttgtttttttttctaaaccaagtagcgtgcatctatccttctccattagctggattaacaacctggaaaaagtgccgcccgcaaagtgagcgcctggagcaagggacagtccccgagtggccgcccctccctttcggtgacgctccacttcctgtcggcctaaaaggcattcccaggaagctcggttttgtagtttccagcccacctccgaaagccaatcctttcctccatttcttctccaaggtaacaacttttaaacattcacgtgacggaccaccttccctcagccaaacaacttccctgaaaggcgcccgaaggagccttcccatccaccgcgggtgcccaggaaaggcctgtggggctctcctccccgcgctccacacgccctcgcatcccaccgaggggccagcttctgcctgcacgttgctgaaactggcctggaggttctgacaagaattagagcggcggccgttgccccggggatgacctggaagcgaaagagaccggcacgaattctagagtttcggggtttccgcgggttgagattgtacgggaaacaatgcattaaccaaacctaaaaatcaaacaaacacgtctggtagaacctaccattaaaaagcttctttcctatactacgtttaacagcctttattttgaaagacattgattgatgccaggcatggtggcgcacgcctgaggtctcagctactccggaggctgaggaggatcacttgcgtccgggagttccaggctgtagtgagcctcattgtgctccagcctaggtgacagggcgagaccttgtctcttaaaaaaataaagaaagaaaaacattgatcgcctcctgcgtggcagtccagaagggtcaagcgctgttttcggggtggcgtggaatggattcctaagatttgggcgcccatagagttaacgcagcaaaacgatcacttgcgtttcctgcggactggcggcaatagaacacgtggctgcctagactcttaatcactgatatctaccacaccaggatttaatgccagttgggaggaaatggcgaaagggcaggcgctggagcccatgcatccgggaacactggtggtaggcggtcgggtgggcgtgagcgggctctccatctcccagcccagtctgcaggtcgccacctcaggattttcttcctgagtccgggtggcaggattccatcccaggtcagcccctcacaccccctggtagttgccacctcctggcgtccctccaacagctccagcacctttctcatcccgcccccgccgcaagccacgccctccgccgcgcaggccccgcccgcgaccggcctccctcctttcctgtcccaggacgcgttgcgcggcccgggccggaagtaagcgaattcccgggtgtgtgtctgtgtctgtctgtgtctcgcagcggcgcgcggccccggacaagcgctggggattcccgtttgaggcgtcactactgtcactgccatcaccccacggagccacttctagaggggagtagacccggcccttcgccgggcagagaagatgttgcccctgtccatcaaagacgatgaatacaaaccacccaagttcaatttgttcggcaagatctcgggctggtttaggtgcggggtgctgtgtttgcggggagggggtgtccggcagaaagggagaaggcccagacctcaggatggcccgaggtccagtgagggagagtcaaaaactccccgtcaacccctagctgtgaagaaaggagcatgtgaactgggagggtcttgaagagggtacccagcctcggggtcccggcacctccttaactctcccggctcttttccacgtgtatcattcccaggtctatactgtccgacaagacttcccggaacctgtttttcttcctgtgcctgaacctctctttcgcttttgtggaactactctacggcatctggagcaactggtaaccaaaggggaaaatggtttgggcggaagctgggtgtgagggagacgaagcactgtttgcttaatgccacgtagctcctcactaggaggttcaggtcctacctttgttacctacctctgctgctgagttgctttctcatacccacaccaatctggtagggctacagttcttgagtaagatctgggcctatcctgtgcaacctctcttgtcacgctcccctccagttccatcagacaagactgacaagcccctccttattttagcagatgggcagaatctttcatttctaattgtaggccttaggtttacccactttgttggaattgggagaaacttgtttgctgcctctctcgggggggagtggcatttggatttcacccttaagattctgagagagtatatctgagatgttctacttagtttgttattggggcttggaatgggaggttttataaagtgatatcgggaggaatatgtgtcattctcttctctctttaatgccgaaa

SEQ ID NO: 677 - DNA, 4001 bp, Homo sapiens
tctgcattaattaagctggcattcccatggcttaaatgaagcccacaaacctgaaggtaaggaagcagctggagtaagccatacacattggggtttgttttgaaggatggaaaataggccaggttggacagaagctagagctaggtagtggggaggaggtacacataagaaactttcaaagaggcttcacttagcagttagataagtcctgaaagccaatcagaagggtccttctccgtggcttctaggactaacatggccaagctccaaagtcctttgctaaaaacagctgaagagagcccaattttggaataagccaaggactatacactcttatatgtatatgtatcatataatgaagatttttctatagctaattagccaaaagataagcaggtgctcaaagctgtatttaagttcatactgaagtactacattttaaagcacaatttatagattacagaaactgatgacacaaaaaccgctgcaatcaagtgctagatatacactataaacatcgggaaaaaataaagattacccaagcctatactctagatcacaaaatttgggaaagggagcactaaccattattaaatgcaattccttcatgttataaatgactttaaacctctagggaaatttaagaaaggtgccctaaatctcaaaatgagaaaatgatagttttactacaaaggtggaaatggtaaggaaaaaaaaatacaaaagttagaagaatattctaagtaatgtacttctaagtaatgtaattctaagtaaagtctggctaatgaaggaagaggaagacaaatagaaaacttaatacagtaaaaatgaaaaaatgcatatgtgcatactaagtttaaagattactttgaaattactatagtgaactcttcagcagaccacttttcggaaacaacacaataaattcataaatctggggctaatgatctctccacaaattctgtcctctatcatcacaagtgtcctgtaagaagcgtccatgccgaaaacagagctgaacgtcccaaaatattggcgtttttgcctcagctgtgcacatccattctcatgggaacacaaaactgacagaacttcttcatgacttgtcaattaacaagatcgcgccagcccaactgctagcagtaccgtgtgcctgccacctgttagctgctcttgagagagccccaaaactgaggtaaagcgaagaactaggaacgcctttgttgtaccctaactatggaagctaccagagttcagtctaacccggcgccttaaggcaaaacttcccccaggctggggaagtcttcccatttcggggctttggcaaagctctcctctagctaaggacaggcagaagaaccccaggagaagcactgtcacctactggtcccaggaggaaggatcaaagctgaagaaagttgggggacaaggaactaggaccctagggagaggctcagtttctcgtggtgaagagtgagcacaatgagaagctgggccgtctcgctaggtgaaagaacgctgagatcccagatcaggggtaggggaaaagaggttctaaaagaagggaggaggagaaaaaaggagaggcagtggctgagagaagcgctgaggcgtaaggcaagaaaccgaggttggaaaaggactgatgaggctgaggaaaaacagcgaggcgacagaggcacggaagcgcgagaaggctaagctgaggtgaataaggcgaggccagcgtgaaggaaagggctgaggtgagtgaagcactgcagtgacaagggacaggcgaagagactcccacccacaaggaccgaggcagaactctagacccatcccccttcacgctgtgctcgcccggctgcgctcagaccctgttggcagctgagactcacccaaaggctgtaaaagccccacaacaggacatggagatcagtccagacccacagtagaaccaatcgagcggaggaaaccgcggcgttagcgtgacccggatgcgcatcgctaggaaccggaagtaagcggccagagtcacctcacaatccacacctcgttccactagaaacctctgggcgcatgtgttgagtctgaccgggcggggaagcttttaggctccgcccactccgccggcccggcgagccacgcccatggccacgcccctcttagtgcctcggagacaagcagcttctgggtgagcgctaggcagtcctgacggtactacagccttcacttttaaggaggtctttaaaaatgcgcgtaatccctacctggctaaaaggaacgtaagaagtgttgggtgcatttggtagatttagaaaaactgggaaggagaatgagtgggaagttttggaagacatttgggaggctagcccaaggtgatctttttttttttttttttttgagacggagtttcgctcttgttgcccaggctggagtgcaatggcgcgatctcggctcactgcaacctccgcctcccgggttcaagcgatcctcctgcctcagcctttcgagtagctgggattacaggcatgtgccaccacgcccggctaattttgtagttttagtagagacggggtttctccatgttggtcaggctggtcttgaactcccgacctcaggtgatccgcccgcctgggcctcccaaagtgctgagattacaggcgtgagccaccgcgcccatccctttttttttttctttttttgagacagagtcttgctctgtcgcccaggctggagtgcagtggcgcgatctcggctcactgcaacccccgcctcctgggttcaagtgatcctcccacctcagcctcccgagtagctaagactaccggcgcgcaccaccacgcccggctaatttttgtatttttcggtagagacggggtttcgccatgttgcccaggctggtctccaactctggagctcggttgatcccttggcctcccaaagtgctgggattacaggcgtgagccccaaggtgatctttttatccccaaatttagtttattcttaatattatattaggcttacaattcacttcgtgcacactgttttcggaagcaaaattcttaaatgtttcgttaattttaaattacaacccaagtatgggctagaagcaaggttgaattcaggctttgtggagacttgacgtttattcaatttgggggccctctttaaaataatcaaggccaggcacagtggctcatgcctgaaatcctagcactttgggacgccgaggtcgaccggttgcttgagccccggagttggagatcacctgggcaacaaaattagaccctgtctctacaaaacaaacaaagcaaaacaacaacaaaaaaaacccagaaaaattagccaggtgtggtggcacgcacctaactgagcccaggaggtagaggctgcggtgagttatgattatgccactgcactccagcctgggcaacagagcgagactgtctaaaaaaaaaaaaaatccaaaattacaaatacaatattagatataaaagtgaaccttttataatgagaaaaattacaaacatttttattagctcacaaataccacgaataacaaaatccagaaaaaaaactattttttctacattttttgactgtatatttgatcacctcttccgatgacaacaatgtactaagcaacatcatttactaagatccttaactcctctctcatatcccacatgtactccatcagcaagttctgcaagatttgccttcaaaatctgtccagaacctgaccatttactgcctccgttggtataaaccagtcagtcagtgactgtgagtgccctatttatactcttgccttcccacaatctttttttttttttttttttcagacagagcctccctctgtcacccaggctggagtgtactggcctgatcttggctcagtgcaacctctgcctcctgggttctcctgcctcagcctcctgaatagctgggattacaggggcccgccagcacgcgcggctaattgttatatttttagtagagacggggtt

SEQ ID NO: 678 - DNA, 4001 bp, Homo sapiens
ccagcacgttgggaggccgaggcgggtggatcacctgagagcaggaattcaagaccagcccgaccaacatggtgaaaccccatctctactaaaaacaaaaaattagccgggcgtgatggtgcatgcctgtaattccagctactcgggaggctgaggcaggagaatcgcttaaacccggaaggcggaggttgcggtgggccaagatggcaccattgcactcgagcctgggcaacaagcgaaactctaactcaaaaaaaaaaaaaaaaaaagagggagacatgaatgaagaagctagtgggaaagtaagtttaaaggtaagtaagacagtagattctgaagcagtatcccaaacagttcttgtgctatagggtgcctgagatgctggatcaaagaatggaaaaaggaaaagcaagtcaagagggtttggttccattcccaggttccacccctaactctattgtcattgaagtcatttccccttttggacttgtttccttatcagtaaaatagaaagaggatgatatatgcctctggtccaatctctcccaagggtttatgttgtgataaggtagaaatgagcagtcaatccatctaagggcagggaatctacatacaccaaactgattgtaatcattcatttaacactttctaaaacaagaaccttgggggtggggggagactcatgtagaacacatactgacacaactactcacacaacgacacgcacactcaagaatcagataaacacacaggtactgccacaggttgactaacgcacaaaccaaccgactaaacgctcagccccacacaaacacatctagagacagaggcatgccctagcaagtgagcctcattgttcctcaggaaagggagtttacaaaggaaacaaaaactctcatacacagccagagggagggcagagctctggctctgatgagaatccagccaaccaacagatacactctccccctgggaagagtcactcaatcaacaacacgtattaaggactcctgaggtagttattccataaaggaacttcgctggaacctctgctgcgcttagagaaatttcaggtttctattgcatttcctctttagactgtgcacccagacattttcccagagcaaccgccgcaattcaaagattcagaagagccagagactccttcagcaaaagctaggggaagagacttccaccccagaccacctccatttgattttcttcgaagaccgttaaaggagccaaggctcccggctgcgcagcggggttcgtggatgctgggtggccgttggaggggcaggctggcccttcccaggtgcgtgtggagcgcgcgctgggtagatgagtgtggaagggtccttggcccgacggccctctccagtgaggacgaggagtgtacctctggtgtgtgcagatgggtcagctccctcctggtggccgtgaggggtgcggtcacaactcaccagtgtgggggaggggagccagccactcacccagctgtgagagtggtgaaagagggaccagccaggggtggaaaagataattcgcagaacgatataggaaggtttctgagctcctcccctcccgcgggctaggggcgtggggagagccttcctccaacctctgacccgaccaaccgattcctcccgaaactctgggaacttacacaacaggatcgccaatatgaagaggcacaacagtttcctctcgacttgcgcctttgtccccatcgcgatcaggctcccgacacaacagccgccgaaggactcctgggaacagacacagctccgcgactacagcgaggggactgagagccagccgccaggtggaaccccgcccggccccgccctccgcgcctgattggccagctccccacccctgcacgttccgattggtgtaaggaaccgctgctcttcagaacgagtcacctcggccaggtgttaccccgccgccactccccgcctcggcgcactggcgcctttccccacaggagctgcctcagattggcccaggagactgtcgcgtcaggagacgaattccgcaccttcagcaggtgacggccccctgattggttggtgttcccgaagtagcgacttcctgactggctgggttctcagttggagctagagggctgagaagtacctctaaggaggaagtaggaaaggcagtcgtggtgtgggatttacggagaccggcttggcttggggttttgtgtttgtttgaatgtaagttgcttggtgcaactgcacctgcagtttggtcctgcagaaactttggtcctgcctcttggcaagtaaaaaacaaatattaatatgggagggtaggggagaagacccggagagaaatggaatgttactttggcaccacctccaaactgttcctctgtccaccccaccggctttgagagatgagctacgctgggaggaagaaaggggaaaaaaaagggaaagggagcactcaactggaaaatgggagcctgggcagtatagtcccagctacttgggaggctgaggtgggaggatggcttgagcccggaggcggaggttgcagtgagcctagatcgcgccactgaactacagcctgggcgacagagccagaccctgtctcaaaaaacaaacaacaacaacaaaaatttaaaaacccacaacaacacaacttgggaagagcagaattacgttatctcaagaagaaagttaaacagatgtacacaaaacacacccagatgatacaaactgagctgaacatgctctagaaacatctctgggtgactggatatgtcctttacacatatttgatctgtgaacaggtccctacatttcagaattgtttgttttctcactgtgactaatagttgtgtgctgactaagccaccttttttctatagacaatgttgatactcaaactttctgttaatatttatattgctacatcatttttaattgaaattcatgctcaacacctttgctagttgtagtttctattttacgatgatttaattttaactgtactaagcatatgcagactgtggggaaaaaacttccttagcattacctcattgcaagggaaaagaccacatttttatccaaaagaatgatattgtttgacattttgcctttttcacctttgctctcattcctttgtccccatctctttggccaaagttctgcttctggttccattcaatttaaaccacctactgggtgcttaatagtcttggccgggtgcgtggcacacgcctataatcccagcactttgggaggccgaggtgggtggatcacctgaggtcagtctgactaacgtggtgaaaccctgtctctactaaatacaaaaaaaattagccgggcgtggtggcacatgcctgtaatctgagctacttgggaggctgagacaggaaaatcgcttgtacctgggaggaggaggttgcagtgagctgaaatcgcgccattgcactccagcctgctgggcatcaagagcgaaactccgtctcaaaaaaaaaagaaaagaaaagaaagaaatttaaagtcttggagaaaggtatatacactgacagctgggctctgtgacgtgtgcctgtaatcccagctactcaggaggctgaggcaggaggggaggatcacttaaggccaggagtttgaaaccaaccagggcaacatagggaaaagactctgtgtctaagaaattttatttatttatttatttttgagacggagtcttgctctgtcgcccaggctgtagtgcagtggcgcgatctctgctcactgcaagctccgcctcccgggttcacgccattctcctgcctcagcctccggagtagctgggactacaggcgcccgccaccatgcctggctaatttttttttgtatttttagtaagacgggatttcaccgtgttagccaggatggtctcaatctcctgaccttgtgatccgcccgcctcggcctcccaaagtgctgggattacaggcgtgagccaccgcgcccagcctatttatttatttttat

SEQ ID NO: 679 - DNA, 4001 bp, Homo sapiens
ccctccaccaccaggataggcacattatttgttaaggtagctggaatgccttggagaatatgaattcctgacaaaaaattaatgagaaatgtgaggaatatactaatcacatataaaccaggaaatcacagatgtctgaacatattaaaaaaagtacatgaagcgatggacacacttactactgatcagagaatggtaaataaataaaaatgggatatcactttatgaataaccatatagcaaccagtacaaaaatggacaatatgaggtgttggtgagaatgatgaggagcaacaatttacatcctctctcagagatgatatacttcaaaactgccattctgcaaaagtaatctctcattacagaaatcaagtacaagaatagactcaataatgctatctgtgagtgaatacagactgatgacattcttacagaaagataagttggttatattacaatattcattccagagctatttgtggttgagagagctagagtaacatgttaaaacattgtagtaggtcccaggggaaatggacttcaagattaggaataaggggataaaatgtgtaagtaaagcaagagtgagacctttcataggccaataatacttgcataccatgaaatgagaaacacaattaattcaattcttgtccctgaagtgcacaatgggagttgagagaagcatgcaaaaataaaatcattgtcttggtcttcaagcagcttacttttttttttgttgtgtaaaatagcattataaccttataataattagaaaattaactagaatattgcaatgtctttatggtatagataacagacaattatatctgctggtatttccctatttagacagaaaaataaaatcaaaagaaattcatgcaaaaatcatcctattatagaattaaaagtataaaataagattaattctgtgtctttcacttttataattttaattatagatgttttggtagaaaatttatagttaactattcaactaaaacacagttaaaacttatgtatttaatttcaacaaattcccaaaaatgtttattttagaaaagctgtattgctgtagcttccttctttgtatgttcactcttgctaatgctaagtgtcctccctggattcttcatcctatggcctgataatattgataatgttcctgaacaacatacccatgtacactgcctagcttccactcgcacactaatcttacacattgggcaatctgactataaagctttctaatagggagtccataggtattggtttgtttggaaagtcctgatttacatgtgttgtccaaacagttattaatagagcccctcttttactctctaagtgtccctgtttgtacaagcaattatatggttcacctactaatcactacttaatgtctccaacaaatgaataattcattgtgataaaaatcaaagtctcaaaagtaaaaaatatttatggctatttccttttcaaatttcccacattaaactctcaccttatgaacagaattaaaattgtacaagttttgtcagtattaggaatggattctagcataaatttagaattaaagttaacatgtgacttcgaaatggacatattgttaacctgaaaaccttttcgaagtatttagatcctggtctcctatgccccctagagatacaagggtttttgttttgttttgcttttctgacttatgctactgtaagaacactttactaattttgctcaaaggaaaaggtctaaatattataaaaagttatatttataaaatatgttataaaattgataatgaaaatagaagagtatattaaaacttgagttgtataaatattagaatctccatttgtatgttttagagaataaagaatattaagaattaattttaccttctgcatagagttctcctgagattatcaatatgatgataaaagtcaggtttttcaacctcatcttcagtggtgtgcttcacaaagattttaacaattctaagcactaggaacttgtcattaagtacacaatacttctcttgaggaaaaagttaataatttataacctctgtctaagtccttttgtaacgagtcttatatttcacttaaaatattttgaaataatgttaaaataacacaactatattaattgacattacttaccatgtcagagtccagtaagagcatgataactgattagggcaacaatagcagcagaataaataataaattatagcagcagaataaataatactaggtaaattttcaacctaagttcccaattgtaaattcatagagtaaagttcacttgaggccatagatctttactaatattgatcaggtaaaaagatgaacttaggaacatgagataacagatacctgatgttgaaatatgttgttgcctagactgcactccttaaagagatacagaaccatagttgtctcaatgatagaatagtattacttataatagtagtgtttgacatttagagagtttttactttgtggcaggtggtgagatcagcactgtgctatatcaacattcattcatgagaaatgtttagaacgtccatgataatggcagcacatgtaacagttttgaggtatttagcagtgaaaaaactggattaaaattattgccctcatggagtttacattctaatgagttttaatttaaaatacaaaataggaaaaaatggtggataggaggcaggactaacttgcagctcccacttggatggacagagcaggatgtggagactcgcattgtgaacttttgctccaagaactgctgcaaggatataacaggaaagccaagataatccacagaccctctgaagaaagtatattgctcctgcatgacccagaaaatagcccacatactgtgaatgcccaaactgtgaaaagtgtgaaaggggtattgtccacccctgaacacacacccttggggaacctgaaggtctagatcacaggagaaggatttgaccttacctggagctcagacaatttagagagctgagcgaaatacaggggtagaggaagcaaagggtaaagccccatcgtctctgtgggtccccagagaagccatttctgacttgtctcacaggggctgccggaggaactgggaaaagaccacagggagaaggaaacctccagctgaacttagtaacaattccaaccgaacacaaactttcctgtccagaactcaggaaagggcgtgaatctggtgtgcagacttaacaggtagggaggcacaaaagtctggcttgcattctcagctgggaggctagtagcctggggcaagttctcaatcctgctcccctactgcctggaaacaaattcggtgctttttgggggaacacagtagaagtgagatttgcttgttgggttgtgtgagagctgggtgaggtctgtaactgccagctttcccccacttccctgacaacctgcatgacacagaagaggcagccataatcctcctgggaaggtaactccattaacctgggaatcacacccccattccccacagagccacaacaagccccacccaagaagactctgagctcagacatgcctaaccctgcccccacctgatggtccttccctacccaccctggtagctgaagacaaaggtcatattctcttggaagttctagtgtcccacccaccacctgatcctcccctatataccacagctgatgctctcatgaaagcactacctcatggcagtgtgtctggaattggttccttccaatgggttcttggtcttgctgacttcaagaatgaagctgcggacgcttgcggtgagcattacagtttttaaagatggtgtgtccggagtttgttcctctgatgttcagatgtgtccagagtttcttccttctggtgggttcctggtcttgctgacttcaggagtgaagccgcagaccttcacagtgagtgttacagctctaaaagatggtgcgtccggagttgtttcttcctcctggtgggttcgaggtcttgctg

SEQ ID NO: 680 - DNA, 4001 bp, Homo sapiens
ccacctcttccctaaggtgttagacattgttcacagtctagacagcaacagaaaaagacatcaatgtttagatgagattaattaatctatcatgacccaaagcacacttcagtgcctactcaagatggttcatctctccacagtttatactccacttaggaactctcccatcatttccaaaaacaattaaaacaattaaaatgttctatcagtttaaggtctggaaatgttgcaggcctaatagagtatgacaccggccagcgaattgccaagaatcccttcttcttcgtcatctgttaaataatttcatccagtaatcagctttaaagacattcttgttcagcataggacagtagaaacatcaaagaccttaattttctttttctgtacccagcttaccttatttgaacagtgtagacttgattgacgggtttgggttcccactccaaaattgtcttgaaattagttgatttccaagttaaattatatgctgccacagtatttgtagtgcctttaaacaacagagaaacagctattattacatgcacttcagagcactcgaatgtattgatgtataaaacaccttcccacctgacatcaccataaacctcactttttatttttcaaccacaaaagcttcattagtgaattatcaagagaaaaagaatcttcaaattttttctagacctagaatttcttcatgacaagattcaccttgtaatcccaggacaccggcaaggatcttgacattttcgtttgaaattattcatgggcaaagccttgttataacttgaccgggaagagcccagagccatcagtgtgccagtccaggactcagctcaggaagagtcaggttcagcccgccaggaagggttttcagtaagttatggaaaaagataaatcccacacgtgtgacaagagttaggactgcatacaaatgaaaaaagccaaacttcactttttccacttttatctgaaatgtcgctacactgaaacttccacagagacccacggggacgtgtggcctgtcacaccgtcggctgtattggatcaggattatttcttatgaaggtctgctttgccagtacgcagcaggtcccagtctctacgccgtcccgaacacctcgtagaaatacggggcatgcacaacgttgtacctgctccaatctaagcagcaatccagcccttttggattgcctctacccaaacctagaacaaagatggccaggaaaagaccagggacgctctttattaagggaagatgcacatataatgaaagataatatccaaacctctgcacgccaacacgtgcagacgcaggcacaagtcctatcatattgaaggtcgcaactcactgggaagccctttccccagagttaaagcgggagctaaaagtccgcttatgcaacaacagtccaattactcggacaccccgagcaaaactctccagcggaaggggcagcggggtctggggcgccaactccctccctgcaactcccgccggcgcccgacggactcggttcattcaagccgggctgggtgagcgcagccgagtcccgtaggcgcgggggacaacatgggcgccccggggaaccagggcgagcccgctgccagccaggactgtcgcctccctcctgcgtgtggcgcgccccgggcttccaggggctggtgccactcacctgaagcgccggccacctgggcgaagacccagccgagcaggagcgtccgagcgacggcggtctcggggcgcgggacccggggccaggcaggggtctccatgtctaccagttggcggcgagatcgagcgggttccgtggcgcccgtggggctggggaggttgggctgaaggcgccctgggccggccagagggagtgcgagggggtgcggggagctcgcagtcttggggagccggtgccccgcgcgctataaagggccggcggcgcgctctcccgcgcctctgcccgcccccggcgcccgcccccgccgctcctcccgactccccgcccccggcccgggtcacttgccgtcgcggtgggcggcccccggcgagtccacacccctgccccgcctcctcccggtaggaaactccgggaccctgcaagggatgactcaccccagtgattcaaccgcgccaccgagcgcggagctgccctggaggacgcaggcgggtctagttgcccgggtcccccaaggcccccggattcacccaggcccgcgactccgacgtgcagcttaggtgggttgcaggtctatggcaggaaagggagggcgccttggaagaattcttcccttccatttggtgataaagtgggagaggcggcatttacaacatttaatagaaagcacgggctctgggctcccctcgggcagcggagggcatttcccggatgctttgcccacctggggcagaagctcgggacctgcagcgaagtaaacgtgtggctgtgagcagggccctctcccagccacggtggcttcttctaccccacgaaggtcaagaatacctggcctgcccacctcgcggggcccttagcgggtcgcacaggagaaaggcggtgggaatgccggtgtcagccacggtgtgaccggctcggctcacaggtctgagggtcagttggctcaggcatcgcccggtacgaccagagatagtgactgaggaagagcagcctcacatctggcagtttgcctctgggagaattccagcgtgacatctgcagctctgtggttccagaaaggatggttcccacattgaagaagacatctgtgggactgagttccaccgaaatgcagaggaaccaaaaatgaaaatgaaaaatgtaaccagagttgtgtgccactagttttaagctttggtttttctaaattattttctggcttctccttctgggctttgctgtaaacttgccaagcatgagaacaactcttcatctattgagtggcattttaagccatcctgtcaaagtatctcctgtcatttttattattattactctatattgcctgcaagacacgactggagaattcttagtgtaagaattgtttgtttcctctctccttctttcccacgttttcccagggaagtcagtcttgcattttaatgcatactatatacatatctcgtttagcttactgaaccacttgttttaacagaataaaactgtgcaaaattttaattttcctcctttgcctgaactgaaatagcacatccaggtttagcccttgtagactttccttcctcgaagcagaaagttgcccttgatgatttcctctttgagctctctgccagctctgaaacccacaaaatttatgtttgcaaaactaagccatgcaatcctctttttatgcaggctctagcctgagtcattttccctaagagatcttcagctccacctgggatgtgattctttgctctctgggattgaaggtagctgaagagaaatagttacacttcaggtttgttacaagacccaagaaattgttgcaattccacttggagtcactgacttttctgaaatcatatagggctttaaacaatgtcaagatcagccatttgataagaaaaatgtttaccattggattgtgatacacaatgtgccttaaatattgataaattagatgaatatttattttgtatatccattaaaatagacaggaaagagaagatgttgggtgtttgcacaggctttttagtcagtacggaatgacattcttcaagatttaaaaatgctaaaatcattactattttcaagaagagggaggaagaaaacgtggtaaataatatttcattgcgaagtgtttttccctgactgatctaattgtggccagatctactttttgacggtgcgaagtgtactttttaatggtgccaaacagcagttgatctataataactgctgcttggcaccattaaaaagtacatatctaaaatttcactgttgaaatttgttcacaagaacaaattgactgttaaaattattccctaaccttaacacaattttttt

SEQ ID NO: 681 - DNA, 4001 bp, Homo sapiens
acctttaaaaggcattgtcctgctaatattatatgaaataagtagatagatgtctgctttgtgctaaaatacactttgccaaaagatggagttggctatgttgatattcacctagtgagtatcatagctctaggggcaggacaagttagaacaagttcttagtttaagcagccagatatatggattagatttttcataagaaaatgctagagagaaatgatatgatttagggttaaacaatatgacagtttgtctgggttgtgtttctatggttttgactcaacaattcctaccagaggaacgaatctccagaactttggaaacttacccacaggatgaggggacagaatgaccagtcatggttccctgtgtactcaccatgtgaatcagacctttgccctatctggttctgcctccggtattttgcttgttattttcaacgctaactacagacaagagaaaaaactcccaagcatgaacccagcatgctacaagaaagccaacaaccaagtctgcattctactcatgagcaggcaagattagtgttagaaggactgttattttccttggggttttagcttacggcagttcccaaagggtgtgggtgtgacctagattatcactttgaagtacgatatttaaaatgattatttttgagaaggagggatctcttcttattataagaccaagatggtatgtaataccctccaaaataacccagttacaatgagagttttaaaaaggttaatattatacactaaaagatctcaaaatattacattattttttggcagattactttggttttgtaattgtaaaagaggaacacatctttcataatgaagtgtgatgtaaggaaaaaaagtgagtcacactagcaggtttaccatttaaaaaataactaactggaaatattgaatagactgtatgatttagttaatttctgagaagtcttatttttaacatttcaattagaaaaaatagtttgcaactcaaggatagtattttatctgaattaaacctcctctcagttacatatgcctttaagtagccaaggtaaaccatatcccaggacatgatgaacagagagaaaaaaaaatgaagagtcacattcaataggataaataagtcaaatatgaagcagaaaaaaggtgaaagtacaaaaacatacaagaactgatgatattttgaaagtcatttataaggcagcaataaaattatatgacaaaaagcacaaggtgttcatttttagttttagaagatgaagctatgtagacaatggaataaataatatgtaactaggagtctcataaaaatactatacaactaaaaatctggaacaggagtttgcaggaagggctaatgagggagcaagtgcctggtgcctttgaattaaccaatatataagccaacacaaacatactaacaaaactgtattgaaaataaacttgaaaagaaggtagcatctaaccaatcaaatagggtgctttctaaaccctcagaatgataaactacattgttggatgcaaaattagcatttgcccagtttatttaattcagtatactctcctattagttatatttacttacctgaagttaaaaaaaaaaaaagccatgacattgcaaagggaatgttctctaaaagaaatagattttcctctctagagaagcccacccggactccacacctgagttaccttgagtttgtgggctcaggtcggtagctccaactgatgccctgagcagccacgtagaactgccttagctgtgccgcttctgtcccttggctcccccagcctacccagctggtgcccaagaccaccaggacccagaggcgtgggcagcctgggaacatgcttcctttcctgctcccgctggctgccaccaccccaggacctgggcagcgcttgccgagctgctaaccacactccgggctgtcccagctgcaatgagctctagaggctgtgggtggcagcgtcctcctcccctgcagttcttgcaaacggcagcagcagcctctggctctcactccctccgctttttctggggcttttcctggcaggggtttggtgagatcacagctcccagtgaccagaggtattagggagagcaaccaaactagtgactgttttactgcaggtgaagaaggggcagagatcagaggctctagcaggcgggacaatgcccagggattcatgagccggacaaagctgtatccctccatttccacctgccaacaccacggaagcagtcgtccgttaccactgacctgaggcctgcctgggtccaagctcacacttggagaaccttctgtgcagtgcagtggcacccaaccaccttaagcagatggctccccttttaatctgaggaaaagagtattgtgccctgttactgggcactgaaacactattttcaagtggtgaagaagcagggaacaaacacatggacaaggcctactgctctgaatcgccttcctggcctctatcaaggcacagttctgccttgataagggcctgtcgccagctaagctgcagcatagcagcgggcttgaagagcttggctgaaaaaaatcagttgtccagatttcagtttcacttactagctgtgttgtcttgggcaagttactgtacctctctgttcagttttgacatctgtgaaataaggatgacaataataatttttcctgatagggtatgttgggaggataaaatgctactgtaaactatagttccagcacttaacacacagaggctaggcgcagtggctcacgcctgtaatcccagtactttgggaggccaaggcgggtgaatcacctgaggtcaggagttcaagaccagcctggccaacatggtgaaacccttctctactaaaaatataaaaaattagccgggcgttgtggtggacacctgtaatcccacctactcgagagattgaggcaagagaattgcttgaacctggaaggtggagtttgcagtgagctgatatcatgccattttactccagcctgggcaacgagagcaaaactccatcaaaaaaaaaaaagaaagaaagaaaaagaaagaaagagaaaaagagagaaagaaggaatcacaaatttattattatgatcatattttcctgtctccaggaccccttgtattcttgtttttcttgaaggatctgactgtttcacagcaccttaaatcttactttgctattgatagagaatctgcgaattatattgtctgaggcatcataatgacttgtcctgggttccctgtatctgcatggctccaggtttctgtcttatgctttatgcattcagtacattcaataaattgtaatctggcacctcacatgaggtctctgttaatgatatcaggctcatcaacagcctcttcctccctccccactccccccaatattctgtcttttctcctgtgctgatattattgcaccaacttagaatgcccattttcttcctctttgctgggccattctttacagtccagagttctgcctatctcccagattctgggctcaaattggcttttccattttatgaactattacaacactattcaaattatataatcatgttaattaccttttgttattccatgcaggtatctattgtctccctaactgaacagttgcttacacttctttatctacaatattatcagtgtctcccaaagttggcagaccatcagaattcccaggggaacttttacaaaatgtagattctgactcaggaaacagggttgagaccaaagtcctagaacacctagcctactgattgacatttaaataagcagtcagagatgctactggcagtgtatcagagaaacgttttgaaagcactgtgtccctaaatcccaaggttactaccagaattgttgcaacattattgtaacctttgagtaggctgcttttttatttgcatgtttgcttatgtatatacagtgtacatgacatatttatttaattacattttacagagacaagatgactactataat

SEQ ID NO: 682 - DNA, 4001 bp, Homo sapiens
gctggaggtgagacatgctggtgacaatactgttgtttactgcactgagatgcttgtataaagtcaaacataaatctggcctacatacacatcaaggcacagcacctttccttaaacttatgacacagagtcctttgctcacatgttttcctgttgaccctttccccaccattaccctatagtcctgccacatccccctcaccgagatggtagagatagtgatcaataaatactgacggaactcagagaccagtgctggcgcgggtcctccctatactgagcggtggtcccctgggcccactgttctttctctatactttgtctctgtgtcttatttcttttctcagtctcttgtcccacctgaggagaaatacccacaggtgtggaggggctggcccccttcaacatgcagggctacaccctgggctggcatgcaaggtgccttcctcatatctctctcctgttcctctccacgaaagtgtggctgcagagtgcagcgggcacctaggttctagttccagctctgccccaactcaaaaatcacttgcggaacatctgctgaacacaattttctgtgactctttctgtctcccacccaggcacaccctcctgagtcctgcggttcccaacctgtaaagccttcccacctgtcaggtcccacagatacagcaagccctccctctctcagcacataagaaggctttaactggggtcagtgtttcacacacccagaggaaaagcccctcttcaagccacatcttccaaaccctcagccaggcccttccacgcctccaaacccacatactgaggtgatccaaaggcagcgcagggagaaaagcttgttgacagaccacccacggagggctggaactaaacctgctcatggaaagggcttgccaggggttggacaccacagcaggagccagagagacttcccttctagcctggctttgccaagatctccctgtgcacttggcaggtttctttctggctccctcttaggatccaaatgcacaaatcaagaagcttgaactcagccaggcgcggtggctcacgcccagcactttgggaggccgaggcaggtgtatcaactgaggtcaggcgtttgagatcagcctggccaacatggtgaaacccagtctctactaaaaatgcaaaaattagccaggcgtagtggcgggcccctgtaatcccagctactggggatgctgaggcagcaagaatcgcttgcacccgggaggcggaggttgcagtgagccgagatcgcaccactgcactcttgcctgggagtcagagcgagactccgtctcaaaacaaaacaaaaaaaaacaaaaaacaaaactctaagctctccagatccccttggccattacactctgcgattccaaagtcctcaacccctggcatcccactggttgtcacgcttgcgttttcgcattccaataggcagcaatcgtgagattctttggcacaaagcaaaactcctctttgacccagtgagggaaaggccttccaccacctgccttgacactaccgtttcctttcttcccccgtgctctacctggctcagaaagtgcggaatatcttagggcaaggagagattctggagagttacacatctgctctgcccgccccatcccctgtccctcggcgggtccggcggctgaaagtgccgctgcgagtaccctcaggccgcgcccatcccactacgctccggcagtcacctggagccggaagcgctgcgccgccctgtccatgttctccaggcccgctcgctgcctctgtcgcgcccggaccaccgcgccccgcgccgtccggcgcccggaccagcgcagggccacggccgccgccacgaagcagcaggccagggcgaccccggaggcgccaggcagcgcggcccacagctcgtactgcaccatgatcccttcagcctgctgctgcctaccgcgacagttgaagccgccgcacgcgcagcccgcccgctccgccgcaaaacccggactggatcagccgggatcccacgcccgcctgcgcgggaggggcggggaagcgcgccagagcctagaggctatcagaggcggcccgcctggcatcgcccccagcgacatcccgctccccgccaagccgagcaggcgggtggggaagggcgactgtttctcgtgggcgacctcccaagcttgagtttagcaccggttgggcaccacagccccggccgtcctctgccccctgcaccccagagccccaaatgctgaagactgcgccccagccggagccccatgccagacatgccagctgttagatatgagttctaaatttatcttaaaagaatcaatatgtcagtatcttcaattctttgccttctacttttaaacttaacttcctcataaagcaacatttttcgattacctgctcctccctcactcattcttcaccgtggttcattccgatttcctgctctgcggtaaccatttttcccgccaaaccactcaccccctcactgtctttaaattagccaatcggaattagtttagcctataggtctaaccctagccaacaggggaaggacacagcatcaggaatcacgtgggtcaggcataagaaccaccttcccctcccttgtccaggtgtgcgctcacctttgctccgtctgtgagggcgcacccttctatagaagtaaattgccttgctgagaagaaaaaaaagaaaattttatattcgagtgctatttcttttgcggcactggggggaaactttatttataacaatttgggggcttgctcgtgattacattccccttcaggggcagtctctggttctctctcctgaggaggtatgccccaccctcttgtgatggcctcaggggtgagaaatcaggactcacccagtgcaagaaataacctgagctctcagcaatgtgaaaagaaaccagcaggcaacctagggtaaagcatcctcacacactgcagagacaactctgtgcacagacaaaggaagaagccgagggagccggtaaggtacttccttggtggtcaaattctggagggctaaatgtgtgtgtgcgtgaatgatcacaaacaaccctacctgtggtgttgttcgtgtggatgatgacaagtcctactgctggacggagtgagtgggtcctctccacgtttccgtagctacctcatatggcttagggaggatcctgcggtgggatttctactggaatgccaatgctgaggggggcctaattctcccttgggggagcagccagagaggacaacacgagtgggaagtgtgcaaaggaccttcagagggggaaagggaggaaacaggtcaaccttccagggaagcaaggcaagacacctcctagtttgagggattgagccttccagggcagcaaggcaaaacaccccctggtttgaggggttgagccttccaggtcaggcaaggcaagataccccctggtttgaggtgttgagccttccacaaatttcaggggatcaaaaacctcacacaaacctccggtagtaagaaaaatattcagaattcccctttcctttcttctcggggaagaaaaagtagctgcactcctgacggtcccttccctaggggaaggggaaggagaggggagaacagcagcataagcagctggcagaggcagggaaagaccagcagagaggaaagagaaactgggagaggaagttggagagaaagagagaggcaaagagagagaaagagaggcagagagagaaagagacagaaagacagaagccaggcgtggtggctcatgcctgtaatcccagcactttgggaggccaaggccggtggatcacgaggtcaggagatcaagaccatcctggctaacaccgtgaaaccccatctctactaaaaatacaaaaaaattagccaggcgtggtggcgggcgcctgtagtcccagctactcaggaggctgaggcaggagaatggcgtgaacctgggaggcggagcttgcagtgagccgagatcgcgccactgc

SEQ ID NO: 683 - DNA, 4001 bp, Homo sapiens
gtccagcacatactcaatccaggccagcagttgtgcctgtggtcactggtactagacgggacctctttgccccttgagagccctaggtctacagcaggaggggcaggggctgcctctgctgttatgctgtcagcccacccttgcttggccagtgaggaacttggcattgccccttggtatcaggatgagtcaggccaatcacactcccttgcacagagcaggaccttgtcacggcactgggagctctgttcacttaggatctacccagaggtatggagtgtttgaaaaggaaaccactgcgggatgagtgagggtctgaaccaagagaaactaagaatattgagctgacagaatttaggagactcagggagatctgggttctacttagaaatgaagccagcactacttactgagagctgaggagggtattttcccaggctttccattcctacgatgagaatgctggctgccttaacataagctgctgaaagataacaggacttcagggagaccagcccgctgacccaactcggggcagaataagggaacaagaatggtaaagttgttgcagctcaattcaagactcagctctggcccagctttggaaggaggaactaaatctgggcattccaacttcccaatagctgctgggctgtgttcgtgggggctgggggctgctcctctaagaatgactgcctgcctagaattactgggcatagcgcccaagatagggtagaggccgttgagagctttgacctctccatctaagcccaaagcagtagaagaagggctgaggtcaatcattagctaagcagtttctacttttcttcccactcgcagggcctgtagggtagtgggaagagctctgggttacagatctagaaaccttagattttcatattggctctgctgtggaattgttataatacatttctactctcctggtttcagtttccctgttgaactagatggtatgggaatctccaagttcctcacctgtgagattctttgaatcctgattcttctccatcccaacaccacagcagttctccacatcctcctaaaccagtgatcctccctcccaggtcttgaccttgccttgggaccctctactgcacatcagaagtccaatggctttctctgcctacccctcgcacagataggtgagccttgggttgcaggaaaggcccagctgatcatgggcctcttgccccaccctaccacgaggctcacagacagtgatgaaggcctggatacatagactgcaggacaaggtcagactggctggtgagaaagggcattctccagcaagaattctcttccctaaccaagcagagatggggattgctgcttactgcaggttcctgtcttacgtccttctcatatctgattcactgatccacagttttttccccactaatctttttcctcctaggtatttcctacttgtttacatcattgtacactccctggctgccccattccctttctgggttcagtctcctccaatttctaaactacccatgcccctgttctttttctcccctggctacactccctttcctgtgatcagtgttctttatccaaaccctcctcctacctccaaatcacatatccctcttcctggaaagagcctcccacacagctgcctccttccaccacctccctaccgtggtctctaaccagatttggaccaccaaagccccctctgaacaggccccacctgctctaggccaggctgccatctccgcgctcccctattccccagtcttaaccaggagggatgcggcaggagtgctgcgtggggctaggcacgccaccagccagtccccaagccaacatcctgagccccgcggcttgctcaccgagtgacttcatgtagtcatcgaaattcttgctgtccactagcttccaggtgcccaggaaagcgtccaccatagtgatgctgggctaggctgagagaagctacaagagagcaggcgtgcaagggctccgacggcggctccctgcccgggctgccgctttaaatagccctcgcatcacatgaggagacgtggcccacgcccccggctcccgaaataggaagccccaggctagggctcacccaggaggggctggtgcgcccatcccccaacccaccgaggtgggtggggaccagccagtggcgccctgctagcctgcgtcagcgccagtgcctggcccccgagtccctaccccaggctggtaggaccttctccctttcctggcctctaggcactctggaatctgagaaggaagcagccaacaccagcccgagagctagggcgcatgccatggtggatatcttcccgtcccccagtccctctttgagcttagcgtcagagcagagatgagactagaaaagcaaaacgcccttgggctggtgcccacgccggggaaagctctggttgacttctggcacgggcatctgtcctcgttttacaagtgaggagtccgaggctcacaggggaactgacaaggtctcaagaaataggagggggtgaatggagctcagattgcaagcttagtctagcgggcttcagagctcgcgctctcccttcactctcactgcctggtggcggagacagtcaccagcggctcggtctgcggctgagctgaccttgtcctctgcctgttttgagcaaaagcctgacccttcgcgccccgcccgcctcacacgtgcttgcccctccctgcggaatgtctcctgctggccctcctccgtccccaccccaccccaccatctagctccccacccgcccctgcaagtgctctgggcttttccggtttcttcgcacagctccgagctttagctcaggtcgttcccagctcccctcctgcagaaattctgccaattcggtcagctcttcaaggcccatggctgccttccccacctgccgccctttctttggcctgtgcacactagcaagccgcctgcacttttgggtaatttgctgcctcctttcgagagcctgttgtgcggtggtttgtcactgtatagtttactaagcactttcagtaaaaataagacctgccttgtcttgctatttattgcatgctgagggctttgggtgtattgtttcattgaactttttattttattattattttttagagacaaagtctctcgctgtgtctcccaggctggagtactgtgacgccatcatagctcactgcagcctcaaactccggggctcaggggatcctcctaccttagcctccccagcagctgggactataggcacacgccaccacacctggcctcattggacttttaaagcaaaatccatgaagtaggtgttactgtattattttctctttttaaaaaggtgaacaagttgaagctctgaggagctcactcattaattcagcagttaataaagcacctactttgtgccaggccctgctttggagagagacaacagggaacaagacacacattcacctctgggcagccagacataaaactagcgtggtgcctctaaagggagtcctgtcctgtcctgacctgagggcccaatgtagacttctcaaaggaagtgaggtataaatgaatttctgagggatggcaggaggccctgcacaccaaggagtagtgccgaactgaatttcagccagcagcagcctgtccagggtgggcctgcaggagccaacacaggagcccagaggcctgccacgtgcgtagagtatggcaggccctccttcctgggactctgtttctccatgtgcaaaccctgcctcccttccctggactgttctgagaacaaggccagggaggaagagccctctccccaccctaagatcttgattcctttggacggtccagttgccagaagactcagaggctcatttctgccaaagctatagggacaggcttcagggctgggcatggagccttggtgatctcactgttggaacaggtgccaggagaggaggagggggaaaagatgatttctgactcaaggtcgcagccctcacacata

SEQ ID NO: 684 - DNA, 4001 bp, Homo sapiens
ttggaggttatggtttaatcaaactgtagatatatgcatattcctaatacctgtatatcagatttcactgggtaaccaaaacagcaaactctgaaaatggttatctgaacgttaatttgtaaaaataagggccgggagcagtgtggctcacgcctgtaatcccagcactttgggaggccgaggagggtggatcacgaggtcaggagatcaagaccatcctgactaacacggcgaaaccctgtctctactaaaaatacaaaaatattagccaggcgtggtggccggcgcctgtagtcccagctactcgggaggctgaggcaggagaatggcgtgaacctgggaggcggagcttgcaatgagccgagatcgcgccactgcactccagcctgggcgacagagcgagactccgtctcaaaaaaaaaaaaaaattaattaattttaaaaaaaataaggaacttaatagaacagagagagagaaaagcccaacaaaatttcagcaaggaaaaatactgcctactaagctagtgttagaacctgtgcaatgtgagtattaaaaaagagggaaaagtctgcctatacttgacagtagcttctaagttgatgccaaaatggccaaaaatatctcactaaaataattccttcaccaaacatcaaaaggcaaaggtagcactcacaggatattagttctagctccaagtctttcacaatgcatacagttctactttcaaagggccttcctaagatacttacatgtcagtggcactacgactgggtttattaagagaacagcctttacttatcctttaaagtattcctggagaaaggacaccaaccaagcaattcaagtctgtaggggaggggaatccgcaaatatgaataggtaatttattaagcttgtgaattcattgcagagatactctggaatatatagtcttatctgtctccttgttatcttcttaccctccaaagattccaattaggcaaagtctcaaatgtttactcctctttgaaaaggacctcagtaccccattgtcattgccctcgccatctcatcattctgcttttttactcttcccttaatacaatataaatacaccacgcccataacaccacacgctccacgctcacactccatacatctctccccacagaaccacccaaaacatcccatacttaatggtccaacaccaattaaaacaaaaactctacacgtccccccatataatacaggaaacactacacattccacacacattgtaacccaagtcattaatacctccaatcccattcaacccgtacttaacacattctacacactcatgatagcatataaattatacgcttctccatagctcgccacacacacacacacacgccacgcaccgtataaaagcctaaatgacacaccactgcagcgttcaaacgctgggaagaagactcccttgtggcaccggaaacccacgaggttggaagtgggaggggaagagggccagatacttcacctgaaaatccgccaggatcatctcccggtccatgttggacgccatggcggccgccgagttccgcggctccgggagcgaagcgcgcacctgggaggcagacggcacctcctgcgaccgtcgccgccaccgccgccgccgccgccgggcgccgaggggctggcgggcgagccggcgggcgggtcggcgggccagcgggcggggcagcgcgggaagcgctaggcgctcatgcactcggtaaccttcaggcgccccggccgcccgcctgcaacctgcggagcccgcgtcgcagcagcccggacaggaagattggtctggatgtgggtccggtcttacagtcgcgggccaggatgagggcaggttgcgacagcgcgcacccggataccttcagcggcgttaagcccggcgggggcggggaaaccgagcgagcgagcgggcgggcgaacgccgcggccgcctccgcctcctccgcttcctccctggccgccgcctccgcccctggttggccagcgccacggctgtcgcacattttgcctgtcatcgaggtcgcaaagcgccgctttgcggctccacgtgaccaccctcctgtcaagcgctgagcgcgcgactacccggccaggatctctgcgctggcggcagagactgcaacctgcagctgcggaagcttcaagtctcgcaacaggttattccagtttggatttaagcaaaggcctcaggatagcgcctccccctagctgaggcggggaccagattgtgcacctcacgtggttagtcacacaaatacacaccaccctcacaaaccaactaaacacactgttacaactcgtctaacaaacagcatttcagaaatatatgtttttctctacaatgtttcagcaaaatacagcttcatatagtctctcacgctcaacctgtcaaaaccgaatccacactgtcacacccagtcccaagctccctgacgtctgcatcctcagactccgtaacacagaagtaaccagactgccatggtagacatgggagagacgaggaagctgagaaaggtaaaaatctcgttccagagaagaggaggagcattttttttaattgataaggtagttatgagaaataacaacctcgagttaatagggttgctccaaagggggaaaaaagggaaaacctttctactgctgcagttatatttgtttttttaagctgagacatcttacaaatgggataaaacttgaatccagctttgaatatagtcagtctatttttatttatttatttatttatttatttatttattattttgagacggagtctcgcactgtggcccgggctggagtgcagtggcgcgatctcggctcgctgcgacctccgctttctgggttcaagcgattctcctgcctcagcctccatagtagctgggattacaggctcccgccaccaagcccggctaagttttttttgtatttttagtagagacggggtttcactatgttgggcaagctgatctcgaactcctgtcctcgtgatccgccctcctcggcctcccaaagtgttgggattacaggcgtgagccactgcacccggcctattcattttcataagaaattattttggaatattcaccaaatattgaaagtttcaacccatggtcagaaattgacaacctctgtaactaaaacagccaaagactatgtacaatgaagtgtgacagtttgtaattgtcgtccaggttagagaaagtgtgacagtggaagttgttcatccttgacttgggaaaatatcagcttctggattgtcatggggcatttacttgctttggaaagtatgtaaaagcttgaaaatgtgaagtaagattgctgattttatcctgtagagctaaaataactagtgaaatcatcatgtagcatgaaggcctaggcttcccttaagaactttttaaacttgtatcatttatttacttttttagagacagggcctcactatgttgcccaggctggcttccaactcctgtgctcaagccatcctcccacctcagcctcctgagagtggggattacaggtgtgagccataccaccacacccagcaaggcctaggctccataaactgggaatatattcatgagaaatcagaaatatgacctaattgttcagtttcactgaatataaagaagtgcactgtattatgatctgagtttattctgtgtgtttccttaaatgaaaataggctggcctacagttcttaagtactaatctgtgtttagaccagaattagctagataatagaaccctccacagtcacatgaatcaaaatgtcttgcttaattttcagccgtaagaaaataattccatggccagggcagtggcttatgcctataatcccaacactttgggaggccgaggcaggcagatcacttgaggtcaggagttcaagaccagcctggccaacatagtgaaatcccatctctgctaaaaataatacaaaaattagctgggcatggtggcatatgcctgtagt

SEQ ID NO: 685 - DNA, 4001 bp, Homo sapiens
gaataaaccaaattaagatggacacacattgaacataatacaaggcagccattgggctcagaagagggggctcaggaatgtctacaataaggaggtgaagtttgagatggactttgaagaacccataaaaagtgaaggtggccaggtgcagtggctcaagcctgtaatcccagcactttgggaggccgaggcgggtggatcatctgaggtcaggagttcaagaccagcctggccaacatgggaaaaccccgtctctactaaaaatacaaaatttagcctgtcacgatagtgcgcacctgtaatcccagctacttgggaagctaaggcaggagaatcgcttgaacccaggaggcggaggttgcagtgtgatgagattgtgccactgcactccagtcggggcaacagagagagactctgtctcaaaaaaaaaaaaaaaaaggtgaaggtgagaggaagggtgttcctggcagaaggcacagcatgggcaaagacatggtggcaggagtgtgtggcttgtgttcaaggaggagtcctgttggccgaaggttaggaaagtgttggggagtatggttggctcagagtatgaaaggggatacagggaggagtgtatattgacttcagtaggcagtaggagtcattagaggttcttgggagaggtaatcctgtgattagaagtcaagtttaagaaaattaatctggcactgcaggcatcctgagttagaggaagtgggaaagatagttaagaggggattgtgtgttcttttcccgtccatttcctctgttaccttcctagtatcaattgctgctgcttcttatcccagtagacatggatctagaaactgcaatgatttggccattgactggatcaaggtctgaatgaggatacatgggaagaggtggtaattagccattctggcattttgtggctgatgatcagcgatacttcagacaggtgaaatagctggtttggatggtgatcaatgaagaattgaggtaaggttaggcagtttacatttcaaatcttggtggaatattgaagcagaggttgcccaggagacagttgtaagttgagatatggaattcaggaaatagattagagctactgaatggattacggaattttcatttagggttgaaagttggaaattcgggactgaaaaagatctatagaaagagtgtagaggtaagaagaaagaagtacggagacacttgctttaagatcccatattaataggctaatatgtttaggagagatgacaccttcagctcttaagagttaacacctggctgggcacagtggctcacacctgtaatcccagcgctttgtgaagctgagccaggaggatcacttaaggccacaagttcaagaccatcctgggcaacacagcaagactccatctctacaaaaaaattaaaaattagctgggcatggtggcatgcacttgtagtcctagctactagagagtctggggtggtaggatcactcgaacccaggagtacaagactgcagtgagccatgatcacaccactgcactccagcctgggtgatagagttaacacctgactgaaacaggagagtgtctggagtggagaaaggagcattaccatggagtgaggaaggcatccaacacctcacatggcctccattcttgtcctgccctaggtgttggttcacaactgaatccatccagaaacatcagagctagagctaccaggcaattattctacttgtggccaattcaagcctcattcagaggtctgaagtgtttccccacggtacttacctggcaggaagtaaagtggccaaagccagaagtccattgtcccttctagagtgcaaggtccatccaagagcccctagagagggggatggagacacgctgcttactcaggaacccttcacaatctggaactggaaagagatttctagcccccacgaggaacaaagcttgacgatgaggaaatgacaacctcccttgtttgctaactattctcaggctaaaaagagagtgctgacaaaccacagcggaagtcaggagctgagaaaacatgttgtgtggagtaagaaagggtcaccctgttcaaaaggcatctaagaagttcctccagactattagcagtgaccaggcctgatattcctttgtcttggtgctttttcttagcagggcctcccgtgctttatgtatactcattggcttccgtgctggggtcatttgctttcattctgccttcaggataaaagagccttatcaccaattttccctgcctgagaaaggctgtatgggcagacgcttgggcctgaagtcagaagatgctgactgtagtccttaccagtcaccagttaactcacctttacaatagtttttgagcaccttctatgtgggggtactaactaaggactttgagcaatccattacttttctctgagcctgaatttcttcatctaggaaataaacgaagctgggactagatgatccctgccattccctcctgcagaacacagttcctgaggacttcacatagctccccagcacctcagccaaccttcacccttaatctccccaaagtgtccccacaaggtgctgccctgtggcaagggctcaggcctctgtccagtgaccaccaaggcaatgccagaactggggtgtgacaggtcatgcagccactttgcctgaagtcacagcaccctggtagagctctccttcaggaccccaagggcccaagggtaaggcccatgactgatggagagagatgctgaggccacagggcatcttgggaagagttttggatgcaagtcagaagacctcaggtcttgtactggcttggcactttctagctttgggcaaatttccctgggcctcggttttttccttgataaagtagggattgcccctaccctgcccacctcacatggcttttctgaggcccagcagaactcacaggcatggaagtgctttaagaagccttcactgtgagctgcgcaggggtattacttatgagggcattctcagggctctgttcctggaagtttcatccctggaggtcagttctcagggccccaaccccaggtgaaaggacctcttgtgcccctggaggatccgggctatactcacactgtttctggggggatgtgcctgacagacccgggctccacagtggttgtgtcagccactccctgctcgcccccacacagcagatttgtcacatgttctctaaaacaacaacatccgtggtggaagttgaatgtgaggctcagagcaggtgcagaggaagtgtgtgggggggtgggcagcctgccctgccccatccctatctgaatctcccctggcccggagcagctgtggttgtgatgtcctccagccctgaaatgggccaagatggcagagggcagcctcgggcctctccttagtgccagagctcccagctgggattagccccacccttccctacttagcgggctcttcccaatgccccagagctgtcacacagctgggctccaccatgcactgggcttgaggcctggggctgtcttggagagacagagaaggggaatatgagtgaatgaacgtgatgtgtgtgggggcaagagtgtgtgagtatgaatatatgtatgaatgaatgtgtgagtgtatgatgtgtgttgtatgactctgatgtttgagcgtgtgaagtatgtgtggtgtgtgtctgaggtgtgtgtaagggtgcaatgtatgttgtgtgatacgtgtgtggtgtgtgtgtggtgtgtggctacagtgtgagtgtgtgtagtgagtgtgaacatgtagtgtgtggctatgagagtgtgagtgtgttatgtgtaatgtgtctgtgtgaatgtatgatgtgtggctatgagtgtgtatgtgctgtgtggtatgtgtgtgaatgtaggatgcgtggctgtgtgatgtatgtgtgtgtgtgaatgtgtggtgtgcggctatgtgtgtgtgctatgtgttgtgtgtggtatgtagttatgagtgtgtgtcact

SEQ ID NO: 686 - DNA, 4001 bp, Homo sapiens
ttcacgtaaactccattccgttggacttttagagattttcaatcttcagcttaacaaatatctgagtttctttcatactcaagacatcacaaagaaagcaaacataataggaagccactttaatccacaaggaacttatcactgaataaaccaaattaagatggacacacattgaacataatacaaggcagccattgggctcagaagagggggctcaggaatgtctacaataaggaggtgaagtttgagatggactttgaagaacccataaaaagtgaaggtggccaggtgcagtggctcaagcctgtaatcccagcactttgggaggccgaggcgggtggatcatctgaggtcaggagttcaagaccagcctggccaacatgggaaaaccccgtctctactaaaaatacaaaatttagcctgtcacgatagtgcgcacctgtaatcccagctacttgggaagctaaggcaggagaatcgcttgaacccaggaggcggaggttgcagtgtgatgagattgtgccactgcactccagtcggggcaacagagagagactctgtctcaaaaaaaaaaaaaaaaaggtgaaggtgagaggaagggtgttcctggcagaaggcacagcatgggcaaagacatggtggcaggagtgtgtggcttgtgttcaaggaggagtcctgttggccgaaggttaggaaagtgttggggagtatggttggctcagagtatgaaaggggatacagggaggagtgtatattgacttcagtaggcagtaggagtcattagaggttcttgggagaggtaatcctgtgattagaagtcaagtttaagaaaattaatctggcactgcaggcatcctgagttagaggaagtgggaaagatagttaagaggggattgtgtgttcttttcccgtccatttcctctgttaccttcctagtatcaattgctgctgcttcttatcccagtagacatggatctagaaactgcaatgatttggccattgactggatcaaggtctgaatgaggatacatgggaagaggtggtaattagccattctggcattttgtggctgatgatcagcgatacttcagacaggtgaaatagctggtttggatggtgatcaatgaagaattgaggtaaggttaggcagtttacatttcaaatcttggtggaatattgaagcagaggttgcccaggagacagttgtaagttgagatatggaattcaggaaatagattagagctactgaatggattacggaattttcatttagggttgaaagttggaaattcgggactgaaaaagatctatagaaagagtgtagaggtaagaagaaagaagtacggagacacttgctttaagatcccatattaataggctaatatgtttaggagagatgacaccttcagctcttaagagttaacacctggctgggcacagtggctcacacctgtaatcccagcgctttgtgaagctgagccaggaggatcacttaaggccacaagttcaagaccatcctgggcaacacagcaagactccatctctacaaaaaaattaaaaattagctgggcatggtggcatgcacttgtagtcctagctactagagagtctggggtggtaggatcactcgaacccaggagtacaagactgcagtgagccatgatcacaccactgcactccagcctgggtgatagagttaacacctgactgaaacaggagagtgtctggagtggagaaaggagcattaccatggagtgaggaaggcatccaacacctcacatggcctccattcttgtcctgccctaggtgttggttcacaactgaatccatccagaaacatcagagctagagctaccaggcaattattctacttgtggccaattcaagcctcattcagaggtctgaagtgtttccccacggtacttacctggcaggaagtaaagtggccaaagccagaagtccattgtcccttctagagtgcaaggtccatccaagagcccctagagagggggatggagacacgctgcttactcaggaacccttcacaatctggaactggaaagagatttctagcccccacgaggaacaaagcttgacgatgaggaaatgacaacctcccttgtttgctaactattctcaggctaaaaagagagtgctgacaaaccacagcggaagtcaggagctgagaaaacatgttgtgtggagtaagaaagggtcaccctgttcaaaaggcatctaagaagttcctccagactattagcagtgaccaggcctgatattcctttgtcttggtgctttttcttagcagggcctcccgtgctttatgtatactcattggcttccgtgctggggtcatttgctttcattctgccttcaggataaaagagccttatcaccaattttccctgcctgagaaaggctgtatgggcagacgcttgggcctgaagtcagaagatgctgactgtagtccttaccagtcaccagttaactcacctttacaatagtttttgagcaccttctatgtgggggtactaactaaggactttgagcaatccattacttttctctgagcctgaatttcttcatctaggaaataaacgaagctgggactagatgatccctgccattccctcctgcagaacacagttcctgaggacttcacatagctccccagcacctcagccaaccttcacccttaatctccccaaagtgtccccacaaggtgctgccctgtggcaagggctcaggcctctgtccagtgaccaccaaggcaatgccagaactggggtgtgacaggtcatgcagccactttgcctgaagtcacagcaccctggtagagctctccttcaggaccccaagggcccaagggtaaggcccatgactgatggagagagatgctgaggccacagggcatcttgggaagagttttggatgcaagtcagaagacctcaggtcttgtactggcttggcactttctagctttgggcaaatttccctgggcctcggttttttccttgataaagtagggattgcccctaccctgcccacctcacatggcttttctgaggcccagcagaactcacaggcatggaagtgctttaagaagccttcactgtgagctgcgcaggggtattacttatgagggcattctcagggctctgttcctggaagtttcatccctggaggtcagttctcagggccccaaccccaggtgaaaggacctcttgtgcccctggaggatccgggctatactcacactgtttctggggggatgtgcctgacagacccgggctccacagtggttgtgtcagccactccctgctcgcccccacacagcagatttgtcacatgttctctaaaacaacaacatccgtggtggaagttgaatgtgaggctcagagcaggtgcagaggaagtgtgtgggggggtgggcagcctgccctgccccatccctatctgaatctcccctggcccggagcagctgtggttgtgatgtcctccagccctgaaatgggccaagatggcagagggcagcctcgggcctctccttagtgccagagctcccagctgggattagccccacccttccctacttagcgggctcttcccaatgccccagagctgtcacacagctgggctccaccatgcactgggcttgaggcctggggctgtcttggagagacagagaaggggaatatgagtgaatgaacgtgatgtgtgtgggggcaagagtgtgtgagtatgaatatatgtatgaatgaatgtgtgagtgtatgatgtgtgttgtatgactctgatgtttgagcgtgtgaagtatgtgtggtgtgtgtctgaggtgtgtgtaagggtgcaatgtatgttgtgtgatacgtgtgtggtgtgtgtgtggtgtgtggctacagtgtgagtgtgtgtagtgagtgtgaacatgtagtgtgtggctatgagagtgtgagtgtgttatgtgtaatgtgtctgtgtgaatgtatgatgtgtggcta

SEQ ID NO: 687 - DNA, 4001 bp, Homo sapiens
tcaactttttcatttctaagtcttgcggagtataccccttgctcattaaagtcattaggaagctccctattcagaaactttcatatatggcacacgatttattcctttatctggcaccaccctgtttgaagttacacagacctgatcagaatcttggcatcgcacttaccagctgaggggaccttaggaaagttagttatgctttctgagcctcagtttatttatctacgaaatggaacccctaccttatagacttgctatgagaattaaataagataatatatttagaagccaacacatatttgctgaataaatgactgcctacaacgaaagaataagtgacttgtgggaagtaagccaaataaacataactgaggtaggaaggaagccccgtagacaagtgccctgaccaccaggtgtcaccactggcccaggagcgccagtctaactgcctggcgtcgggggtggcaccctgcagcaaaacagtctaggcctcagggcaagactgtcacctgcaccaacaggaccttcacgaatcggcttaggcttttcaacaagtaagagatggtccaatattttttttgcaccaaaataggttacattcttctcttacaggtgtttaaaatacttagctgaatatccactgatgtgtcaccacagtttaattttaaaaactgtcttcggcaaactattaatttcatatatcctttggtttagccaactagacattttctggcttccataggcttcaatattgccccaaagacaagtttctagccccaattccacaatccagtgacattatttcctttatactataaatgggatgacggaattttttttaagtagaatatttttagggcagaaataaagcctaagaccagtatatatgggcaaaataacattaacttttaacccttcttgatctcaggaactcaaaagttcatttaaaaaattgttttctctctctatgtatatattttaaagaaagcaccttagggtacatctgtcaacctgtgagtagctctgaaattactcaagaaacactgccacacctattattaatgccacacctattatttaatagcttcattctgtaacctgctaatgcctctctctgggagtgcccaggggctcattttaaaatgagggcagggcctgggctccccatctggctctaagccctcccacaaggagacctactagtggccacttcaagactaattcatccagcattagcgcctaactggagacgccgctctctgatgaggcacagaccgttgtctcgtctgccaggagcacttgactcaagtcaagcctggccaggcctaccccagcctcagagtgggtggccaagtccccttgtaatctacaagggagaaggaattgtgctaagcacaggtttctgttcagagctgggctcttggaactcctgcagtttgggttattttagtttttaacagctcaagttctactttgcatttcacaaatatggaaatgtcttaagagaaaacagaagcatcctccctctctggccattgctcccattcctagaggatttgggagggaagagcagataccaggcaccatctggagtcaggagcgcaggaaccaaggccagctgagaagaacccatttgcaaagcactttgcagatcaataaattcgactgattttagagcggtccctagggaaaggcgagcaaatgggccaaggagagatgctgcccatccaacaagccctggccaagcagaaaggggcgaggcggcgcgggaggcgagttacctggaggactcggcggtgaagctgccgccgtccagcagccgcatcttgcagaagaggaccccattgacgaagggcactgaggagagctcctcgagctcgaagtccaccttaaacttaaacttcttcttcttcatcatcgtgagagccaggcgcctgcaagctgggcgcacggccgggcgccgccgcctcagcttggccgagccccggatcagcccagccccatggccggggccgcgagctgtgcgcgggggcgcggccggggggcgccgcaggccggccgcggccggggccgctgccgccgcctctcgcggcagcctgggccggaacgcggcggcagctgcggcgcggaccccgaccgcccgcggggagcggtcgtgctgcagctcgcccggggaggtgagcgcccttttggtgctcagctcgccgccgccgccgccgccgcctccgccgccgctgccgcccgtctgggagtcgggagaggcgaggctcgaggaaccgccgcctcagcgcctcgggggtcgggggcgcccccagcggccgcggcctgcagcgcacggcggggcggaagccggagggagggcggggactttgtgggcgggcgcgggcttggccgcggactctaacccgcgacggcagttagcacgtcacgcctttctggggttaaaaaaagacaaacccgacagagaaagcttccttctaccgcttcctctccgcctttcttttcagtttttgcaccgcctcctttctcccccaccccctccagtggtttctttcctttgggtttgagagccatgggttaatagaggcaattaaaatctcagcgttgttttggtcaaattgaaatcctaaaactaaaatttccgttaggtactctaaattcacgagccttcaaatataaaaggaagataaggtaggaaaaaggaaaatgatgtgctgagggactatcaagggcccaggcaccgtactgctgcaggcgctttctctggggtatagcttatctagttcctgtcacccaggacaaaagataaaagagcaaagaagcagttaaaataataccctccctttaaaaatttgtctgtctatactgagaactgaaatgcttaaaatcaaattctgcaggcagtctggcatggctacgctgtaatcccagctactcgggaggctgaggagggaggttagcctgagccggggaagcggagcttgcaatgatcggagatcgcgccactgcactctagcctgggcaacagaacaagcccctgtcttaaaaacaaaacaaaatcttcagagcaggcttaaaaaaaaatctccctaggggaataacaattacctgccttctgtaatcatgcatgtattgttacaatgaatgttacaaagttggttacgtgatgttcatgtttttaaactgagttattgtcattttcactcagattctgccacagtaattctgaaagggtttaattgaaaatattttctttctcagtttactcgtttactcattcattcatataaaaaaattgcttaaaatgtcaatcatcggctagaccccataaccaaaagccaataactgccctcaagaattttacaatctagtgaggaagacatgtttagacaggtcattaaaaaaacacaacctagcaccaagctatgtagaactcagagaagcaattaattgaagttaatcagttttctgaatttcaaaggatgaaaatgatttgggacaaagtggggtaagttgttctaggagaaataaattaaaaaaaaaaaaagattcagaggcaggttcgggggtggggatttggtaatggataaagcttcttaccctgcaggacagggggcaaagacagtgagatgcatttggggactttgagatttgtcatttagagcactggatgaatgttaatttcattgactgaacattgaaagcaagaggagggcaggttgggaatggaagagataatgagtctttatgggatctgcttgcagtacatctagggagagagaggcagccttagctcataaaaatgcattggcaattgaaaatatacatttgggaattgaggtaatcgctgatggctgaagcccaaaaggtggataaggatgagttactctgaagaatatttaaagggtaggcaaagaggagatcgtgaaggtgcctaagaacaagcagtcaagagaaaaaggagatgaagaaagagatggcctggaagcccagacggt

SEQ ID NO: 688 - DNA, 4001 bp, Homo sapiens
actcagaaacatattcccctttgaaggtgccccaatctggccacagggtcgtgcaagcaggccttagcaagcaggacacttggaaaaggaaacagggctggtcccggcccaattcctgaaagtggcttcaaccggaaaaaatacctcttcccaacccagcagctttgagcccaagacaagaaggctcccagccacaggctggctccagcagggcccacccttcccgcccccaaacaccgaggtcggggatataaccacagggtaggagcctccagtaattgcagccaactgccctgcccaggcccagcagggccatcggggcaggagagggaggtggtccccaggccctatcagctactgccagctactctgcccctgccaaggggatcgcagaatgccaaactgtaaacatcaccttgtttaacctttgcatttccatttcatgaagaggaaactggcttggagaggaggggggcttgctcaggtcctattgagagttaggagccaggactggaacccaggtttcttttttttttttctttagacggagtcttgctttgtcacccaggtttcttgccttgcagttcagattggatctctcacttgcctatcagaacttcccactgaggccaggcgcgatggctcatgcctgtaatcccagcactttgggaggccgaggtgggtgaattaccttaggtgaggagttccagaccagcctggccaacatggcaaaaccccatctctactgaaaatacaaaaattagccaggcggggtggcgcacacctgtaatcccagctacttgggaagctgaggcaggagaatcgcttgaagctgggaggcggaggttgcagtgagccgagatcgcgcaccactgcactccagcctgggcaacagagcgagactccgtctcaaaaaaaaaaaaagaaaaaaaaaaagaactcactgatattttgcgtgtattcccgctgctataaaaccaagcaatttccgttagaaatgggccccttgcctcactaaaaagttccttccactaattcttcctaataacctgcgctcccactcccagaaatttgcccccagggtccttgtcccttttttatcctaagacctcatgacccttttccacctcccttctgctggggcaaggagcgaggaggggttgtaaatcaagagctgacagttctcttggcagtaacagaatgggccacccacatggccctgcacacccgaccccacccctatcttcccctactccccctgagtcctggaggctgagggaccttggatctggggacaacaaaggaacagaattagccagggaagtggggaaggagtctgtgagaggccttggggcagagaccctgccaggtccagcccacccctgcacccagcatctagtgtgtagtcagtctgctcataggtagttgaggcctgggaaccaaggagagtctggcagtgtccccctccctgtctcccagggagtctccttggcagtgggtcagattccaaggtcccaggaaggcactgcttgtctgaccccatgggtgccctctgtcctctcctcttctccccagccctgagcagggagactataaaaagttcctaatcacaaggaccaaaatagtctgtcatccacagcctcttccctgccttctgggctagcctggaggccggacctcagacatcccgccctagaagcctggcaggcagcctcgggccctccattcctttgcctgccttctcccagtcctgaaacttgtggtctcaactctgcccaaggcttctgctctgggcatgggccatcttttaggctcactagtttggcaccagtctccctgccctcaggcccctgggttccttcttaccccagccctgggctcagggtacactcacctctgcatgggaggcctaattgcaggggtccttgggcaggtccagactgagggcaggagtggacagcaaggactagaagtaactttggtggcagccaaacctcactctccacaggaaaagcagagaaagcctccaccccccgccccccaaattaaccctcgccttcctgaggcagatcctggcctccattaactctttcctgatcacagtcctgcgctgtggagacctgtgaaccaagtccagctccttttattttacagatggtcaaacagtcccagcccggttaggtgattggctgtggaagcactgtgagcttgggcagagccaggactccaaacaaggcctcctgatccccaggcttcctccaaaggcctggggtgggggctccgtatgtgggatcagccccctccctgggctgtggcagatgctctgacagtctgaatgggaaggcagaacagggttctagtcaacttgcttttttccctctgtagcaggctgagacctgtcttggtctgggtgctgggtggtgtcaagcctgctttccctgggggcgagaccaggaatctgcagcctaagggtgggggcattggtgctatagatgtgcaggtgagcctgtggcggcaagtcttgtcatgaaggtgaccctggagcccactggagctgcctctgccaaggtcctttcatggcagatgggattgcctgggaagacagtgatgaggggctgattccagggccaagcccaggtcctttggcccgcttccttctctgcccacacttggagcctcttagagcttcttccatcagagtttcttctctgacaccttatgtctcaaggtgaaaccctacctcataggagacacctcccctctccccagcaggcaaactaaactctccagcccagactaagaccagtgctcaggccaaaggttcctttccccccttggctggccaccttccccaagtccctcctcctcctttctagccctctttcatgtttgcaaagcacattcccgtctgtgctctctgatctcctttgaccgcccccaaacaaggaccctagacaggcgtccagcaggaatgaccccccacttaatgagtaaggaaacaggagctgaggggggagagagatgcccaaagcccagctccaaatccacatttggaactgcatcctctgcctgtcaagtcagtagtgggtctgaaaacccaaggcccatctcccggtaaaaggtttttattacctaaaggggggattttgttggtgatagttccatattttgttgctacagcacttttcaaaatgccattagctgctttgtcataatccccatgacaatctttgggggaggttttattatttttcacacttacggctgaagagactgaggctcagagaggagaaatgacttatccaagctcaccaaactctgtcacccaggctggagtgccgtgacgtgatcttggctcactgcaacctccgcctcctgggttcaagcgattatcctgcctcagcctcccgagtagctgggataacaggcaagtgcctggctaattttgtgtttttagtagagacagggttttaccatgttgctcaggctgatcttgaacttctgaccttgcgatctgccggcctcggcctcccaaagtgctgggattacaggtgtgagccacctctcccggccaatagctaacttttattgagagattaatatatgttaggggctattctaagtacctcacataaggattaacatatttaatcctcaaaacaacccgatgaaatggcactttcgggccgggcgaggtggctcacacctgtaatcccagcactttgggaggtgaaggcgggccgatcacttgaggccaggagctggagaccagcctggccaacacggcgaaaccctgtctctactaaaaatacaaaaattagctgggcgtggtggtgcgctcctgtaatctcagctactagggaggctggggcaggagaatcacttgaacccaggaggcggaggttgcagtgagccaagatcacaccactgcactccagcctgggtgacaaagctgcaaaaaagaaaaacaaaaaaagtcactttcattctcctaactttct

SEQ ID NO: 689 - DNA, 4001 bp, Homo sapiens
atgaagagagaaagctgaacaagactgggaaatgtaatgactgtcacaccatatgctataggtttactcattcaaacacttgcattacaagttcttcatctgccctaactccctcgtacttttgtatatgtaataatttaatagctttcagaataaagaaattaatagcattttcttattatctgagtacaatgtttgcatcaatagcaacaaatggcacggccaggaagtcttctttaagcatgttaatccttcacattgcttaacttcaaatgattagtgtacttggccatgcgtccacattaggtgctcctaagctttccagtgaaataaagtcttatataaatgccttaaacacaactttgctaacattcaaatgcaagccctttctcactacgttctgttgattgccctttcagtccctatacactggtaacacaagcatgtagccacatttttaagactaaggcaggcttcatttatttcttttaagcttagttcagctcttttactaatataaataaatcatccgtcttttcccctttaacaaacaaaagcaaagagatacttgaccaagtgttatcccctgacagtacaggttgttgaggatcttttacctccaaaagcaccagagcaggaatctgtaaaatcagctccgttgctcttcacgtaccctgatttgatatctttttaaaacggtcttaaatgttgtggtgactgaaaacaaatgtggaataagaacaccaaataaatgatttcctcttaggaaaggattcaagggccaaataaacctagagtttaatacatagtctggaagatatttctgaagccgagggtgggggatctggcggcggggcgggggaaagacagtaaattggtaagataaccaaatgttaggtagcggttgaaggcaagtttggggtggggggtgagaagaggggaggccaaatacgcccaggaaataaaggagataacgagtcaggacttcctgcagtttcagttcggtttgggttttgttttgtttgttttgcagcctcacgctctctactgagtccccacatctctgagggtctccctaaatgagtttctccccatctgtaactttcgggcagttacaaagcacgccagtgttcctcttttgcttcgcccctctccggggcgggaagggaacggcatgacattgtcctttttgccgctgatgaaatcatcctgcaagtgctaggatgaagtgcgagcgaagctgcggccaacgccgcgctttccaaagccaggccaacattactaagagggaaattctgctttagctgccgggaatccccaggggtatctctagaaacgcgggatatccccgctgctctcttggcggccagttcagaaaccgctcagaactcagtccagggcaggtactggagggcgaagtgcgccgggcgggggcggcactgaccccgaggcggcgggagcggcgaaggcgccggcgtccccacccgcatcctgcacctgcctcgctcccaagccctcccggtccccggtccacacccgcgccggagcgcgccggctggggcaggaaacccgactcgcgcgggcgggctgcggtcggggatccccgcgcgctacagggagagggcccggggcgcgccccttggggccccgaccgcggcagccagcctggtgcacgggtcagggtgctccccaggcccccgggcgggcgggcgtacctcggatgtaagcgcacttgccctcgtccagctggctggaggctgagccgcccatgaccgcgagctgcctgtgctgagcgcggaaactgcccggtccgcgcccgctgctagctcctggaggttgatccgacggcgaacccggctctgaaattaagagcaaacttccttcgagaggcgagagacaggaggcaagaggcgtcgccttctggggcgcctcctccaggtccgcgccttctgatgatccgtgggccggcccgggggctgtcttcccgccctcgcctagctggtgagctccgacgggctggcaaccgaggaggtcggccagctcctcctcctcgcccacggtcacttcttgttttcatccctttggggcatccaagaaacaccttggaggaagtggaccatttctcaagtgactaaatctctgtgagctggaactttcccagctcacatccttcgaggtggagctcaagatcacgttgccttgtaagtgttgctgtccaagaagcaacagttcttcccaagcattacctgggagcctgttagaaatacaaaatctcagcgctttcgtccaccacccctctacacacacacagacacacacacacttagaatctgtgggagtggagcccagcaatctgtgtttgcacaaaccctccagggaattctgatgcccgctgaagtttgagaactagaggtaaactatacctttctgcaggcgagaacctggaccaaggagggagtggggaaatgaggaaaaaaggaaagagaaaaaaaaatggaaagacagggaaaaactaaggcttggtcctgcaatatactcccagccctgaaacttcctaagacttgatgaacgtctgtccttacccctttactttccattcctctccttaactggaaatcaatcattagaaaagatatttgttcttttcccacaaccactatttagcttggcagcctctcggaacaagacccacttgggcagaggggtcaccgctgatttcatcctattcttagtagtcagttattttgcgactcctattgacttaacctcaaggtcaaatggtctgtatacactagaaccaggcctgaggaggactttgaaggctttcccacacacccccgccttccctattagctaacttgcactttaacacaattatttcatcacactcacacccaatctctcacactctacattccaatctgtcagtaaatcctgtcaattcagcttttaaatatgtccaatagccaaccaattctcatcccctctactgacatcccatatcattcctcaccttattcattacactagctgcctaactgatctaccttcttcagagaaaagccacgacgtctatcagggcctaggtggagtttcctctgtgatcttctctaccaccactccttgttctctctgttccagccctactagcctttttttttactctttctgagacacatcaagctcagggcctttgcacttgtttttcatttctgtaggatgctcttccttcagatattcacataggttactctctcagtcatttcattcaagcctccactttaatgctagtaattcagagaggttctccttgacccaggaacaccagccatcacctctctctgccacttgctcttcattatttctgtttcatatcacttagtatcatctaacacatatttctttgtctatcttcccccactgcgatgtaaactctataagatcagggattttctttgttgttattgttgtttcttggggctttttccctcaaaatttctgtttccttttttattattatttttcctcttatggcagggatttttttgtctattctgtcctctgctgtatttcaaatgcctagaagagcacctagcatgtagtaggtgtccagtagataaccactgaataagtgaatgaatgaaaaataaaatgtaaaaatctgtactcaacaaaaactgtgatctcaagcatttccagataacaactcaatgatttaaaatatttagtgttgaactcttctctcaatactctagttggctcctagaattaagtgtatcttcttggagaagtaatttctttgactatataaattgctataactgtgcctcagaatactgttattgttattgaagaaaactagcttggatctcctgccagaagtgtagttttagcttgtcacctctacttcaggaatactctgagaaaggactgattatcctcatctacccttatccactcatttgtaaatattcacggatgaaacagagtacaaagatgga

SEQ ID NO: 690 - DNA, 4001 bp, Homo sapiens
caaggctggactatacaattagatctggggggcgctgaggaagcccaggctgcagaaggaagggtggagagagcgtatcttggctgctgtggccccaaagagccctggcagagggggcggtggagggagccccaggtgtggggtcagaggacctgggccccagcctctcagggtgaccttagcaggcgtctcttcctccccggcctctgtcccatgctcagtgggttctcagctcaaaggccagtccttctgggctgggaccccaaggtgcctgatatggggtggccaagtgaaggggaagggacactgaggaaacactcagatcccctccacctggagctggccccagccagagactgcctagaacctttggggtttctggagcctggtgctcctaaagaaccctcagcactcctcactcttcaaacttccttcccctcccgctaggctgcaggcctcccgtaccaggtgctgtgctgggttccttgctgctggatgcccagcatgcacacggtgcctggcacacggcagctatcatgttaatatcagcttaatgcatggataagtaaaggaaccccacacagcctgaccctgtaccttccccttccccagccgggattccaccccgatacctcccagagacatcctgagccacttacctgaatgcccacaggaactcctgagcagaagcccttcgagtccagaggatgggggaaggtcattgtgctccttgctcaatacccccaggacaaggtcccctctattctgggtaagctactaggggtgatgggtgtggtggtggtcagtgggtttggcctcagcctgcagagcctgaaccaaggccaaagccacccccactcccagtcacacccccctgatcccactgtggggtgaacagaccaaggtgggagaagggctcagcccaatcgcttgtctaaaatgttgcccaacagcctgttggaaagctggtggtgatgggtgggggtggaggtagggggctccaaagaccaaactgcccatcccccaatctctgtgcaagactgtgtgtcccctcctcacagatagaagaggctggggcctgccctgggcccccaggcaagggcaggtcccctccacctccttgggtaccacgtgggggagagtggagggtgacaggtcagacacagagagaaaggcccaggggtaactgggaacatcagctgtgctctggcccttctgtcccctgtccaaggatgggggtggggaggaggattagggggcaggggaaccttctttataacctgtgccccaccattaaccctttcctgccaacagggttcaggggctctgcagatgggggcacccggtaagacgtgggaaggggctgtgggggtgagctggtaagacctgtgtcttggggaggggtgggaaagggagggtctgctagttctcccggtgcccgcagttcctccgggaagccaggaagaaccagagctggttcccaggcacccggcagggggtgtgtggctgtagggatgagagcgcggcacggcacgggaccctgcttcgtgtcacctgcggggctgcaaactggggcggggatgcggtgacctctgcacgtgcgctctctgcgctgcccccgccccctaccgtccctagctctgtccccctcaggacgccgcgtccccaggggtgcggcggggccgtgaagggcgggtcgccagccccatcccccaggtctccgagcggcgaggggactgcgcgggtccccggcacccgatccccccgcccccggccgggccccctcacctcgcgacacgcaggagcccatcacggggccgcggggccgggccgctgcgcccggggtgcgtggggccgcggggcgttcatgtctccgcgggcccggggctgagcgctgcggagccagaggacgggcggggcggggggctcgggcgccctcagctcggcctcagctccagcctgggtcgtccctgctgccgccgcgcccggctcgcctcgcgccgccgcctcccgcgcagtgcccgccgctgccaggggagggcgacaccgcggggcgcggcgggcggggcccgggggagcgcagccgggaggctcgggcacacctgtggccgcagcgcgcgggagggccatctctgtcccttcggggctcccccacctcctggggttgcccgggctgaaggtcagggaaggggacagagggggcggggagactcctggcatttggggcacaaagtaaacaacatgaatttaaccacaccaacgacgactgggcacgaaggcttgggagcgaggaggggtgcgcgcaagaacaacagttccattgggcctatttttagaggatgaaagtgaggctcgcagaagttagaggccttgcctgagagccctaagctgtgagttcagcgacttttgactgtcagcgcctcattcagagctattgaaattaacatatgcaaaataatatatgcccagaggtggggtagagagagtgcgggtagatagtgcgctggtggcctggcggcgggatgaagggtctccagcgatggttgaagaggggggcaaggctgcctctcagggcttgtctagggcagagtaaactgaggcacaggtttttttccccagccctggacggcctctgtagtcattcacacttactcgcacgtacctacacacacactctcccatgtgtacatacccctcattcacacactgatggtcatacacacacatatatatgcacacttgcatttacatacacgcacacacactcacatacctacacatgaatacacagtctcccatgtgtacatacccactcacacccacacaatgacagttatacactcacattgaagcacgcttgcatttacacacacacacacacacacacatcccagctcctgaggtgtgaagatcctttagcaaaatttcccatgcacacagcactcaatgtcagtgtctgagaccctcactcacacatagcatctcgctctctccttcatgcccacctgtgcatcaggcagggcaggcactcttgtgtctgttttccagttgaggcagccaggttcactggtggcagcagagaaatgttttgaagaatgaataaggaggggccaggcgcggtggcccacgcctgtaatcccagcactttgggaggccaaggcaggcagatcacttgaggtcaggagttcgagaccagcctggccaatatggtgaaactccgtctctaccaaaaatataaaaaattagctgggtgtgggcttggcacagtagttcatgcctgtaatcacaccactttgggaggccgaggtgggcggatcacctgaggtcaggagtttgagaccagcctagccaacatggtgaaaccccgtctctactaaaaatacaaaaattagccaggcatggtggtggtgggcgcctgtaatcccagctactcaggaggctgaggcaggagagttgcttgaacccagggtacagtgagccaagaccatgccactgcactccagcctgggctacaagagagaaactccatctcaaaataaataaataaataaaaagctaggtgtggtggcacaagcctgtaatcccagctactcgggaggctgaggcaggagaattgcttgaacccgggaaagtggaggttgcagtgagccgaaatcgtgccactacactccagcctggtcggcagagtgagactctgtttcaaaaaaaaaaaaaaaaaaaaaaaagaatgaataaggtttgaggcagcagcgtgggatagggctggaggcctctcaaggggcaggatctgggccagggcgcactgccagagcagctgagccagggagtgggtgctgacttctttctctttctctaagctaggtgctctctgcccagtaaagtccgggtggagagcggttctgtgcctggccctggtgtcagcagacctgggtgaatgagggcttagctcacacaagctgtgcgaccttgggtaagttgcttcgcctctctgagtctcagat

SEQ ID NO: 691 - DNA, 4001 bp, Homo sapiens
cctcactcctcccccactcctccccctcctccccccactcctcatcccactccttcccccactcatctccctcctcccccactcctcatcccactccttcccccactcatctccctcctccccccactcctcatcccactccttcccccactcatctccctcctctcccctcctttcccacctccccctcctcctcctcttccccctcttccccccactcctccccattcctctcccctcctcccccactccttcccccactcatctccctcctcccccactcctctgccctcctctcccactcctccccctcctccccccactcctcatccccctcctcccccactcccccctcctccccctactcctcatcccactccttccccccactcctcatcccactccttcccccactcatctccctcctcccccactccccctcctcccccacttttcaccctcctccccccactcttccccctcctccccgcactcttctcccctcctcccccacacctctcccctcctccccccaccctaccctctcctccccccattcctcccccactcctcaggcatccgctatccgcttgctgtcctgttgaccaccaccgcaatgtgctgaagggacccggcgccctggaggggcctgtacctcagcctatctgggggctgagagccagaggcaacagagagcaggctgcaggagaaccgcccaaccctggaagcctggagggccagcctgagcacacacctcacagccctccagccggcaccctttgagggaggcccgccaccctgcagggtctctggaggagtggccctgggcagtggggtgccccctcccttccagggggactggcccggactgctgaagacccccccactgccccgcccctgccagcactgccagcctggccctagcgccgggaaccagcccactcttcctgagctggcagagccgcggcctcaaccctcctcagccttcccatctgggaaacgggacctcgggctccagcggggccgcgtgggctgagaggcagccgggctggctgcagcagagacgccctcgggaggagggagaccagcatcaaaggtgtgagggccggggatgggggctgctctggcaactgcggctcccctcccagtcctggggcccacgacggcggcagcaagacctgccctccaagacccctggagagaccctgagcaggagagaggaagcccagggttgaggtgggcttggggccttctgtctttgtgaggacgcccggcctgactggggccccaggacttaacccgcaagagggggtgctagctacacaggacccccagaaagcacaagggacaggctcgccatggcgtctccagccgcaggagtcatggggcgctggactcccaaggggtctggtgaaccatccagcaagcagccggaaccaccccacccccgcccccaaatcagcaattaacctaatagcaacaggttcctcagagcgcggcaggcccacgcttcaaagggttaactgcggcccccaaccgcgggaagcccccttcacccacccaccccaggccagctgggggccaggtctccgctgcagaggaggagagggcttcccagaggccggcctggctgggctgcagcagattctcaaggcgggaccgtggccgaggcctcgaaaagggcgacccggaggcagagccggcagggacagagcctgctgggggaggacgccccagagccccagctccgaagctgccccgcgagggcccacgtgcgtcccggccgcgtaccttgggggcctcgggcagcccctcgcgggaggacgcgctggcggtggcgttggggggatctgcgcgctggccaggctgctgcgtcctctgtgcctcccgccgggccccgacgcccccgaggagcacgagctgcggcccgaggaggaccacgaccgcggcccaggcccagcgccgcatggctccgtcccgaggcggctcagcgcggcgagtctcggcgccagggcgcagtcatggggacggccggcgctcagagcccccgcgcgggggcgaggcccaggggcgcgcccggcctccgccgctgcatgtctgcgcggacctgcccggaacggcggcgcgacggcgctcaggtccccccggggtcccgctccagcccccgctcccagcccccgtcctctctggcctcctcactccgccgcccagtaaatcctcccctcgcctcctcctccccagacctcgcaggctccagggtgggggctcacactcggacgatcagccagccgcccgggcgccccgacggccagggacggagacggggcggagacccccactgaccccggccgctgcttcttgcctcccgtccccagaccccaccctgcccccattgcttccccaaaggtccacctcattctgggaaccgtgaagacagcagcctacctcctcgccctccctgccagctgaactcaacctggctcccctcacagcagcctctgcagccagccaccggagggcagctaccagccagccaaagccccagccccttcccacgacctcctcacccaggctcccccgggtgccccgccctgactcacggccccggcccagggtcctgggggtgctggccggcctcgctggggccccactcgggggaaaggtgaggccagatcatggcgacaggccccttgggctcagtggctggaggaatggggtggccaggtggggctggaagaccctccagccgctggtcctggccgaggctaacagtggcccaaggtcaacatgccggccctgatggacagctcggaacactccagaccctcccctcttgccagacacgaaggtagccacgccgagaccccagcgtcaaccccagccccaggccacatccacaggcagagccacgggagaccaggctgggatggggatgacgcttgggaacccaccagggaccccggctgccccctcgccctccgggctctcaggcactgactggcatctccagagagcactgtggaagcctcccggccccgtgtccgctcgtgaaggtggtggaggaccctggggacacggcacagcgcccacacagtaccagccctgctggacccccgcaggtgagccctggatgtggcctgcatctagcatgggtcgggaaaggcagccccaacacccctcaatccaggcttggggcaaagggaggggtgggcaggtgccctggccaaggagaccccccgcccagggctaccagacccctcctcacaggcagggcatccaaattttctctgtcacccactggcaatgagctcccctgtgactctagacagaacaggctggatctccaactctgacctacaggcaggaaagtgggcagccctgggaggctggactgagggaggctggacttcccactcaggcctacacgcaggaaaatgggcagccctgggaggctggaccgagggaggctgggcctcccactccaccctacaggccaggacacgggcagccctgggaggctagaccgagggaggctgggcctcccatctaccctacaggccgggacacaggcagccctgggaggctgtaccgagggaggctgggcctccccctctgccctacaggcaggaaaacgggcagccctgggaggctggaccaagggaggctggacttcccactctaccctacaggcaggaaaacaggcagccctgggaggctggaccgagggaggctgggcctcccactctgccctataggccgggacacaggcagccctgggaggctagaccgagggaggctgggcctcccactctgccctacaggcaggaaaacgggcagccctgggaggctggaccaagggaggctggacttcccaatctaccctacaggcaggaaaacaggcagccctgggaggctggaccgagggaggctgggcctcccactctgccctacaggccgggacacaggcagccctgggaggctggagcaagggaggctgggcc

SEQ ID NO: 692 - DNA, 4001 bp, Homo sapiens
gaatggcctcgaactttagcaaaggagttgctgtgtgctgagggcagtgagcgagggttgcttggaaagatctgggctgcagagctaacaggagctgacaaaagcaggcagagggaccttgtaagaggggtccaggaggagacttcgaagcttctcacagggcagggctggagggctggagggcagagggcagaaaggcagagcccttgaggctcaggactgaggaacacaggcatgaggtgggggcatggtggctactccaggtacctgtgtgaatggaggagcccttcactgagaggctgcaggggtgagcagctgttggggggaagagatgagctcagcctagtctgctgagtttgagattgcttgtgtgactcccaagaagggcacaggaggaaggtctgggctgaaagccaagatctgatggtcttcaggcaagtgaagtagtaaaaaaagttaaagggggccaggcacagtggctcatgcctgtaatcccagcactttgggaggccaaggtgggcagatcacctgaggtcaggagttcaagaccatcctggccaacatggtgaaaccccgtctctagtaaaaatacaaaaaatttagtctggtgtggtggtgcccacctgtaatcccagctacttgggaggctgaggtggaagaattgcttgagcccagggggtggaggttgcagtgagccgatatcatgtcaccgcactctaggctgagtgacagagtgagactctgtctcaaaaaaaaaaaaaaaaaaaaaaaggccaggtatggtggctcatgcctgtaatcccagaactttgggaggccaagatgggcagatcaggaggtcaagagatcaagaccatcctggccaacatggtgaaacccgtctgtactaaaaatacaaaaattagctgagcgtggtggcgcacgcctgtagtcccagctactccggaggctgaagcaggagaatatcttgaacctgggaggcggaggttgcagtgagccaagatcacactccagcctggcgacagagagagactccgtttcaaaaaaaaaaaccacaaaaaattagctgggtatggttgcacacgcctgtgatcccagctacttgtggggctgaggcaggaaaaccacttagatccaggaggccgaggctgcagtgagttgagattgcaccattgcactccagcctgggggacaagagtgaaaactccgtctcaaaaaaaatagttaacgggactttctgctggggaagtcaacgggactttctgctggggatgaagtcatgtagggttgggggatggaagagagaaagagctgtggatgggggaatgaggcttggtggggacgagggctcaagaagagctggttggccaggcatgatgactcacacctgtaatcccagcactttgagaggctgaggcaggtggatcacctgaggtcaggagttcgagaccagcctggccaacatggtgaaaccccatctctactaaaattacaaaaaattagctgggcgtggtggcgggtgcctgtaatcccagctactcgggaggctgaggcaggagaatcgcttgaacctgggaggcggaggttgcagtgagccgagaatcgtgccattgtactccagcctgggcaacaagagcaaaactccgtctaaaaaaaaaaaagggactggtcagagctgtaagtgagaagtggggataaggagcgagcgatgagggaagccactcaggatgacatggggggaggcacctacctggccgccgcagggtgatggcaaggactattgcggcaatgaccaccacagacacacaggtaatgccggcaaacacccacttgacctgattctttgataactgctccctgcagaccatggcgacgctctctggggaatgcccccaactccgtgcggcccagagtccctgaggctccctgcagctggaatcctgtgggaggcaggagctcccagcagcacctaattctccaccgggcctggtctgctctgcagccctgtaatatcccctctggagataacccctgaagcccctcctccctccccgccccaatcctcttccccacaccctcccaggatcttaacaggctaaccagaatatctaccatatctaaaatgacctttgagcacagtaagaggcagcagagaatgttggaccgagccccgacccctggctgtctgcccctgcttgggagtcaggagaccaatcccagcccctgttgcttttctggagtcctggagcaagtgtctgccggtctctgggcatcatttccttccgtgtaaaaggaggcactagactgggtgatcccgaacattctgttctttccctttctaactccaggctttctgccctgccctcagggaatcctgcattatcaggcaagggtggtgacaaagacagattagatctgcgtaaggggcaataatcttcctttcatctgagattatggttaacagattatctacctgggatagaaatggatagtcctggcatgctggcatgggttactgcaggccggttctggggcagcgagtccatggggaaggggctgagtcaccacttcatgcagagggagttctgggggccctggtatgggaagcaagttagaggctgcccctattctgaggaccccagaatttaaacgagtccaggaatcacctgtaatgtgcacagagacttcagcgtctacacattggggctcacagagagatctggaatgtgaggctgtgataggccacccgaggcagagccgggcagttggtggctttgattgtgtgtgtgaaagggtgtctagaatgatgcccaggtgggcagatggtcgggactgaggggtggaggggcagggtgggagggattttggtcatggggcttgtcgtgggtcattcctgagtccattttcctgcctcggccttcccgaggagggaactggatatagaggctgtgggctcaggactgagatcagggccaaagacaagggcatgagcatcattttctggccaaagcaaagagagaaagggatggaggctgacttctggggaccactgacaggcggagagttggaggaagaggcattagtagaggaaaggggacagcagagggcggtgaggggtgtcaatgggaaggtcaagaagaaaggagtggtcagccaggctgggagatggagccctgtaaggacagcaaggcccccgatgctggccaggacagtttccctggatcagtggggagggcagaggtcagagcagagcctgtttagaggggccaggaaagaccagagaggctgaaggtacaggagggagaggcactgggacaaagtgaggatgggagcaggaggacctggtgctcagggggtgctattctgtaggatgtggggaacggtgggcattgtgagtggtgagtctgggggtgctggttgggaggtgatgtggtgaagggggacaatgagggagaggtttgaggacagggaggttctgttggctggtcggggcatgtgtggtatgcctacagggatccaacgagacccaagctgtgggctgctagatggacaggaccccattcaacaccccctccccaccactgtgtatatccggaaatgtgagactgtgatgggccacctgaggcagagccagccctggagcccaggctcaattctcagttcttggaacctctggagagagggagatctagtctgtctgggcttctggctcattctccaaatcaactcaacaaactcagcagctgccaggagccaggccctggtgaggtgtcagggctgctggctggaatggagcagggtcagtgctctggggtctgctcaggagacagtaagggggctgtagacaagcaggaacatttttgtgagtcccctttcttattggggctgctctctcaggccacccactccggactccaggatccaaatgctaactgggcctcacccagatcccttctgtaataaggcatggaagggtgtgttaactgggatattatgatagc

SEQ ID NO: 693 - DNA, 4001 bp, Homo sapiens
aaaccatagtctccgaattctctggtggggtggggggtggggaatgagggtgtggatttgagaattatgtcctattttgccacttggttggccctgtgattattaaactctttctttgctgcaaaacctgttgttctcagtgcattggtttttttgggcagcaagcaaaatgaacttgtcaagtgaataccattgtatctctaaataaactgtgagttcctcaggggcagggaataattgatttttgtgtctccaataccttgcaaagtgcctggcacaaagtaaaggctagaatgaatgaatgaatgaatgaatatatggatgaacagaaaatacattaatataattccctgggttatagatagcacaaatatgtaggatctgataacctggccatctgaaaatcatttagaattgtggatcgagtcacctagaaaaagcaataatatttgtaattgtcattggcatatgtcaagttgatttcagctctgttatgtatgtcatttgaccgttaccactgccttagtcagaaatcagggcaatgattgatcatcctactgcccgtttgatagatgaaaagccagagacttgagaagttttcgtggcataggacactgtcctttcccacccagagggcagcagcctctgctcatatacctccagggacaggaaaatcactaactactgagatggcccactcaatttttgctgatgcctgtttcccaaagtaggctgaggatcaagttccattctccaggtaaggcctttggagacccagggggattgagacctattaccctctcaagccaacacttaggctccaggaatgcaacctcttccctgaacaaatggggaaactgaggtcctatgggtggagagtcaacacttctatgaatatggcctgagctagcttctgcactatgccattgtctcatgatgaacttggaggcagctctgactcccgagtcttctgccttagcttgaggatggggtacatccccagcactcaccacagggcttggcacacaccaagtgctcagtagagagtgcccgaaagaatgactaaatacaaaagggaaccaagggttgacgctgggctgaggctggggttggggtgtagcaccaggcgagggttaagtctggaggttgaggtttggatgtagatctagatattaataatatttggagtcaggatgtgggagaagagctgaggtgggactgcaggcaggacagaagaggaggttggggctggtgatagaataaggtctggggtcagtactggggagtgtggaaagtcaggaataaggctggtgttgatattaggaagggcaccttggtgggatgatgattggggtggagttgggctgcctgtgaatgtttgaagatggaagttgctgttagggggaggcttgatatgtgatttggggttgggatgagggtggtgatggaatgaagtttggggtggggatagagtgaggattgttttggattagaggagggggaggtccgagcatggctctaaataatggttggggtcaggatgaggaaatcgagctgagatggggtttcacggggtggttgatgctgtgggcatgaggacggtaaggactagagcttgctgctgatgttcaggtggacactcgggtgggggctgaggctggggtgaaggcgctgagactggagtggggttcaaggtagggtgagggccagggacggtacctgagccaccacatgtagctgtgctcgtaggggaagaagctgtgcgggtcgtcgcagcagtacttgtggtcgcggaagccgcagcagaagacagcggccgcctcgccccccggccgcgggcagctgaagccgcgcaccacctcctgctctgcgctcacgtagctcgtgcaggcgccgctcatcgcgccccgcgcccagcccgccgccacctcgggccaccagacggccggctagagcccggcggggaagcgagggaccgagcgagacggagctgagcctgagaacggcagagacgaagagacccaggggccgagagaagccgagacagagacagcagcgcggggccccgaggaccgagcggcggccaggtgcccggcccgcgcggaggggtaggggcaggcggggcgggcggcgggggccggcggcgggagtgacggctgctggaacgcggcaggagccggagcggacgcggggagctgggccgggagccgcgtgctcgcctggctctgcctgcgcttcctgccccctccccactgcgctccccctgcctgcacgagggcgctgggtgcgcaacgacagcacgacgcggccagagtggcggggcgggaattcgaggccagggcgcgggcgccttacctgcaccgagccggcgccgggagtctcggggcattcggggctggggcagacagacaaggcaccagccggcgaccacacggcggggtcagtgaggagagtgaacacaacctcacccaacctccgcaaaaacccaggggcccggggatgttcgcatccgtgttaaaggtgagagctgagggccagagagaagccatttcccggagttcctaagcccacgagattttaaccgggggcggcctagtaggaagtccttgctctttctgcggctttcatggtgcctcttttctagcgggcttttagatgtcctcatcatctggagtccctgctagtctcgctgagagctagctcgtgcacggacaatgtccacactcttctgttcatactgcctgccactggcctgggacaaggagccgaatatgggtgtggatgggcccagacggtaacctccttccccacactgaccagcaaagaaagtcagcagacctgtccattttgaaaaattacttccagagaacaagggcagtgttctcactagcatcagagaaccacagtctgaaggggctctcagtgccttggcttcccccatgtaccctgttgccttacgccatctggaagggcttcatacagcaccttcagtgccttagctctacatttttcacagcagtgggtagggtaggaaatagttactgtggtgcctcgggcacccccgattccttcgcccttggtttggacgtgtggggaacgggccgtgggtatcaggggatctgggctccagcccagctctaccccttccctgctgtttctctctgagctttgggttccttgtcctcacccaggccagctcctcagatgctgattgtgccgctgccctgacctgggtgggccctagggcccctgagagggatcagatctgggcctgccgttgagaaacacacagtctgatggaggagtcagactgactgacgatcacagcacagggcagtaaaaagggaaatgcaaggacctggacacagaggggcaccatctgaggaagcaggggagggctctgagggaggcggtgtcctcaagagtcactgtaaggtcaaatatgaaagctggagggaactgttattatcctccagaacattcctcccctgagctgtgggtctgagcagactgggagctggagagcctacactaatgagggtgcacttcagcctctttatcagatggagagtacaggggaggaatcctctgggagggagaggcttcctggaggcctggagatcagctgggaggaagaaagcgctctgccctggcttttggcaaaactagaaagcctccaacaatttccaaaaccctctcccagccaagaattaatttgttcctcccaacagccctctggggtgagccacgcaggggtgaatgtgcctgaaataacaagtccaataccacacagcgatcaatggcccaggcagggctgatacccatgtctgtctccatgtcccccttggcagtctgatgaagcctatgaacccctattcagaatagtgggtttttttttgtttttgttttttgtgttttgttttgagatggagtctcactttgtcatccaggctggaatctcggctcactgcaacctctgtctccagggttcaagtgattct

SEQ ID NO: 694 - DNA, 4001 bp, Homo sapiens
acttcccctctggacgccagcatgaccctgtctgtacctgctggtttagattctcttaggcatgggaactgaaacctccctagagaaggctaagaaaatctgttttcagagcatgtacctttactgttccttccccggggtccacctctttcagggtctgaacgtctgttacatgcaagtatttcattagggcagaaggaaagctgcctttcccctcaggacacagactccagcgaatcttaggcaaagcgaacatgcgggattgaagcccgcagttattgtttgtctcccacacgacataaaacatgtgtctggctcagctgctagaggaccaagcaggacacagacgcaactgcgcagacgtcggtcctgccagccacgctgcggccccctcggaatctcaggatggggccccctgggcgccctgggggagggcccaggtgggcgaaatgacaggagaaagtgcctgcgggcctccgcctgcaggttggatgactgcgtccccgtcacgtcaaacttgccaggactagcaaacttccagggccccacagttccactcagaggaaaggaacccccagtgtgacaggaaaacacggctggtgtgtgtcggccaaagggcgctgaccgagggaacagatctgcacccctgacttccctcgcggccttcggagccgcagagaaccaggatgccacccacccagggccccggcgcgcggctctcggcctctacccgccccacccaggccaggccgggtggcggggtcccagcagcccaatgcgggcctcgtccccacactgccttctgcttgcccgctctgctctctgcttggccaggcccccctctgggccgcggggcggaggcttccgtgtggccggcgccttgagcgcgcagggccctctggaatcggagtgcggtcgcccgctctggggcctcgggagcaaggacaccgcggccccacgggcacgtccggcttctccgtcctacccccgctgtcctggccccagactcgctggccgagacgccggctcccacaggccctgccgcctgcatgcccacgccgcgccgcgaaggcacttcgccctctttattttgtaaaacttcggaaaaatcaccagcaaaccgagccccggtctcaaggctgcccacagttgccggcacgaatccggactcactgaccgacggcggcgcattggcccagcagaccccgccggtcggcccccaccctacccgggtcccctgccccggcctcatgctccccgggtggcggcgggcgcgaggcgcagcagcagcagcggcgtccgcgtgaggtccggcccggctgaaagcgcagagaagcgggtcgctgcagacacgctgagtagagcgccttcggcacggcccgggggcagggacccggcaagtccggccccgaggcgcgagcaccgccacccgcggtctggccacgaggccggagatgcccccgagtcgccgcgcccctcggagcgagaggcccctggcgcggagagggagagccagggcgcagacccagacccagtggggaactgctacgctgaaggcggcgcggtgggcagagggaggcagccggggcgcgcttacccgggtgttgaggcgccctcgaaagtacgcggtggccagacacatccccgcgcggagcccgagcccggcggctcctcagcccgcccgcgccccgccccgcccctccgctcgctcccctgcacgatgaggccccgacccgttaccgcggctgagcagctccgctcgggcagcgactcccgcgttcggctcccacggggtcgcagcgcgtccttccgggcgccagcggctggggcggcacacgtgaggctccgcggcctccccggcgctccgaggactgccctgctccgggcgtggagcctcatcgcccctccaggtggccagggctgggggcaggtaccgcgcgacctgattggcgctggccggagtccggggagaatcccccgccagagaggctgatgcacgcgggccaagtgaagccacgcagtcaaacagcgcaacgggcgccttccaaacacccctgcttagctccgctgcctttttgcctaagaaatgtaaacgcgggaggcgggcgccctgggaacgcctcagtacaggggactttgcgccctacagatcgggtccaggacggaaaattcggagagcatgagaatcttagggaccagggtgtgtcgctatccactggaaagagactgcctcgagagcctcccgaagggctcctctgtgttcctatttccggcccgcactgtgccctggaaatccagggacacctggatgtccccgccgctgaggggtacccgggcctcgtggcagggcgggatcagatcagtcagggtgtgattagagctgtgacggtgaagtctggcaggaagaggcaggaagggagagaagcaatgcctcgacacgaggagaaacctgaatggtgcgctagatttcttgtctgaaatcaccttcttttaatgtcttaaaactctaggagttgcttatgtgctgtagcccagccaataagttctgacatcagtaattcagagggtctgctgagagaacatgacggcctgagaggggataagctgtcacttctccgcacttccgaagcatctctatatggaacgtttacctgttccggtctgatcatctttctcttgatcctgctttccgatcttgattggactgaagacagcgaggacagaggggtggggtcaacccggttaatgctcgaggagggagcgttcccactacatcaacagttttcctctcttcttaggcaggttagttctggggattcaaggcaaaggtgatcagggaatccatttgaaaaacaaaaacagaaaactccaaaacatttaaaaactgtggaccctcagcctaggtccaacttctaaagaaggggagtaagaaatttagcacctggagcaaccttattattcctaatacactgttaaaaaacaaaaatcccaaggcaagccaccacctcatcattccagcaagtctactgttgttgcagcacactccactttttactctaactctactcacaggttttacattttgagctcagattttcatgtgccgtcttttctcagcacagttaaggctcgtgcctacattcttcctcatctcaaaggcaaaacaatgaaatatgaagaggacgtgtgattttgttataaactgtaacacagaaaagtgaaaacaacgtaccttcatagcctaatgaatcataaaccaaacaccacccaggtcattgctaccaccccagaggttcccctgctccaccaattcccttccacaagtccttcccttccccctaaagcaactatcctgactttatggtaattacttccttacgtatctttatagtttctaccaatttgtaatgtatccctaaccactacagtttagttttgcttggttttgaactttctataaattgaataatattgcatgcatatttttgtgtgtgcctggcctcttcttccatttggttgtaagagtcatctacttttgtggcatgtagttgtagttcattcattttcattgctacttaatattcccttgtatggacatatcacaatttctttgtccattctggcactttagatatttgggtttttcccattggggctattacaagtgctattgctaatgacatttttgtgtatatctcctggtatgcaagtgcaatctttaggatgtataccttggggtgaaattactggactatagggtatgcatatatttagttttattagatcatgccaaattgttttccaaagtggccacaaaatttagactcccatcagagatgtacggtaattgccattgctccgcatccttgccaaaatataatattattagacttcttatgttttgccagtctggcggagatgtaatggtgtctcactgtgatcttcgtttcatatccctaattaccaatgaaattgggcacttctacatatgtttataggct

SEQ ID NO: 695 - DNA, 4001 bp, Homo sapiens
gaggtggtggccgcctgtaatcccagctacttgggaggctgaggcaggagaatcgcttgatccccggaggcggaggttgcagtgagctgagattgtgctactgcattccagcctgggtgacagagtgagactctgcctcaaaaaaaaaaaaaaaaaaagaagcagaagaaataacaacaacaaaaagaaataaacggggtagctggctttgaacccatgtctctcagattctgcattcttcaggagcccaatttacctaagtcacctcccatgggcctgcagtgaactagggtggtcccagtgacaggcgacattcagatagcggccttgggcctgaataaacgactgcaagagaccttgatgggaaccagagaaagcgtttattgaggagtttgagggtgtgagctcctcctcctccccctcccagctgggtcagcagaggaaacaggatgctggggttttgcactcttggaattcagctctcagaaacctgaatgttcctcctcccccgccaggagctggtgcctctggggcacccctccctttcctcttcccaggcaggcaggggaagcggcattgggagagggggcggggagtcggggggcacaggtgttcctcagcagagggtgaagcgccgggcgctgatgttcatgcgcgtgaggcccaggtgccgcagcagcggggccagggctaggccggccccgggctccagctccagctccagctcggcctcatccagcagctcctggtgcaggtgacaggcttggtccatcttcagtcggtgcagctgggcccgcagccgcagcagctgccctgccagctgcctgtcctgcgcctgcatctcccgctgcggccgagagggggcgtgagcctactggacaggccctcggccgcgcgccgtttctcccttcctggcaacgctgggcctttgcactgactgtgtcctccccagccccctctcacctcagcttgatctctccctatctcccaatctggcttcacctggtggttctcaaacccagctaaggagtcattattaagcaaatccaactgcctgggccccatcccaaatcaactaagcagaatctctgtgttggagcctgggtatctttatatttgcacatgttgagttgggagccacctactgaaacttcacctcttcagaatctgcctgcagcatggccagtgcctccttttgcacttcgctgtatctttaggccatagaaagtcccagagtaggggaggctgtgtatttccctatttataatggtgccccacaccccccaacaccagtgctctgtcccctaagcaacaggagcacaaggtcagtagattggatggaatccttcttcagcaagcctccctgaatacaacactggacaagtccattcccggctcctcagcccaggacaccggagcgggcggttgctggaggcagggtccattctcatcccttccccatgcctgtggtcttggaccctaaggaggaccagcctgaaggccctgggcaaagctgcccaccccaccagactcaccagctcccgtcggagccactcaagggcggagtccattgagtcgaaaccacagatgtccccaggtccccctggtccaggtttggcttgggccctgcgccaggcctggctctggacctgggctgtccactccagatatgagggccgccgagtctgcagctgcagcttggctgtcagtgccttcacagagtccaggctctccccctcctcatcctcctcgtcctcttcacccactgcctggaatttcagtagccccagggacatggcaggtttgaggtgagtgacagggcagggctgcagctctgagattagggaaaggctggcagtattgcccagggagaggtggcagaagttgagggtgagaagagcgtgccagggagtgtgtggtggtcaatgttcaaggtgggttaggggggctgaatgtgccagggtgagtgagcagatgggtgtgtgaggccaagtatgcaagggctggaattttcctggactgctaacttgggagccacgtgatgcccatctgggtgggggccggaggaaccctgctcctctggccctttggatgaattttattgtctttgcccagaaggagacacccaattcccagaaaggaagttgctccaggatgagaaaagcatcattcataccagagtcttggccctcctcccaagactcatgttaagggagctgagatcaggaaggaggctgcctagccaccccttgtccttactcgtgacaccagcccttcaggaaaggactagcctccagggccctggcctgggagtcaggagacctgagttctagtgctggctctgcagaaccttgggcaagtcactgaccttctcagagctctgttgggacagatgaaggatttcaagctaatactctaaggagccctcaagggctgcctgcaggagaaggacagagctgtggatgggctccttgccttccatctccctgcccctcccagggcttcaaccagagcagttcccttttttaaactttgttttcaaacataacatacacacagaaggacaggtgcagtggctcacgcctgtaatccctgcactttgggaagccgaggtgggcggatcacgaagtcaggagtttaagaccatcctggctaacacggtgaaaccccgtctctactaaaaatacaaaaaattagccgagtgtggtagcatgcatctgtagtcccagctacttgggaggctgaggcaagagaatcgcttgaacccgggaggcagaggttgcagtgagccgagatcgagccattgcattccagcctgggtgacaaagcaagactctgtcaaaagaaagaaagaaggaaagagagagagagagagagagaagggagggagggaggaaggaaggaaggaaggaaggaaggggaaagaagtgtaacatacacacagaaaaactgtacatatcataaatgcatggagacacggtggctcacgcctgtaatcccaacattttgggaggctgaggcgggcagatcacctgaggtcaggagtttaagaccagcctggccaacatggtgaaaccctatctctactaaaaatacaaaatgagctgggcgtggtggtgcatgcctgtaatcccagctacccaggaggatgaggcaggagaatcactggagcctggaggcggaggttgcagtgagccaagatcacaccactgcactctagcctgggcaaaaagagcgaaactccatctcaaaaaataagtaaataagtaaataaatgaatgtatggctcgatgaattctcccaaactgaacacatccatgtaaccagcacccagatcaagcaacagagtattaccagcacccaggaaccgctgttagcctcccatgtgctcctggcctgtcactaatctaagggtaacaccaccctcattctaacagcatagttttctctgtttatatgccttctagtggttcacaaactttagcatgcatcagaatcacctagaaagcttgctaagatggctaggccccaccacccagagtttcagattcagtatgtatggggtggggcctggtaatctgcatttctaccaaattcccatcccagctgctgctgctggtctggaattttacaatttatgctttttttttttttcgagacagggtcttgctttgttgccaggctggagtgcagtggtgggattacagctcactgcaaccttgaactcttggactcaggtgattctcttgcttgacctcctcagtagctgggacttacagggccaagaccccacacccagctaattttttttttttttaagtttttgatagagatgaggtcttcctctgttgctcataatggttttgaactcagccaggcgcggtggttcacgcctgtaatcccagcactttgggaggccaaggtgggtggatcacgaggtcaggagatcgagaccatcctggctaacatggtgaaaccccatctctactaaaaaaatacaa

SEQ ID NO: 696 - DNA, 4001 bp, Homo sapiens
aaaagtttaaaaataaggcctaatagtctcattatagtcaatttactcctcttaagactgtccaaattcatacatttccaaaccaaatgaaacatacgcacaccctcatcccctgtacacctggcttgcctctattatcttacagactgatgatatctgttggctctctgaagaaaataccagtcttcgttctttatgattatggtgttgtgcattaatagccatatacatctttaagttcagagggctctttgggaggttggaggggagtggagagagagaccgtgaatgagcacaagagtgagcactagctagctcacagttggtttactgaatgtttttctgccacctaatgggcattttagaatatgctatgcaaaattcatctttgtaatcggtacatgtcacacagaggggtctcaatagtgaacagtttggaatcaacttatttacaaaaaccttgggaacattgccagcttcacacctagatgtcggtattttgtaagtgatcttcttttggctttggtttaattttttttttcttttttttgagacacggtcttgcttttgcccaggctggagtggtgcagtggtgcaacctcgacctcccacaggcacgtgccacacgcccagcctttttttttttttttttgcagtttttgtagagacggagtctccctatattgcccaggctggtcttgaacttctggactcaagcgatcctcctgcctcagcctcccaaagtgctgggattacaggcatgagccactgcgcccggctcagtttaattcttgggagcacctctaccttttgtttcttaaaaaccccaaatacagactatgaaggatagttcctaagtatataatgtaattaacaggccatataatctctctgaccttttaaatattgtattaccccagggctcagtgattggacctcttctctttcctatctgctttcttgatgatctcctttggccctgtggctttcaatactatccacacacagatgattgtaacatttatattctccaggtcagactttttccctgagtctcacagatccaactacctgcttgacatctcttcttagttgtctaatggacatctcaatcctaatttgtctaaatctttgctcatgctttcagtgcaactctccctccatccccccaacacacacatactcacacatttacctctactcttctggcagccttctcatctcaataaatggcaactctgttcttccagttgctcaggccaacaacactaaagtcattcttggttcttctttaatcacacctcacatcaaatctgccaggaaattgtcttggatatttctggaatcatacttttcattactccactgctaccaccctggtctatcatctctcacccttgccgtcgtctctcacctagattattgcagcagcctcctaattggccccctccagtctacgctcgaaaaggagccagaattgttaaatcctaagtgagaccatgtcatgtctttgcttaaaactctccagtgggttcccgtctcacctagagtaaaagccaaactcctcataatggcctacaaggctgtatacctaacccctacgagctttctgacgccatcttgtactactctcccaccactgacatcactctaaccccacgggccttcttcctgcaattccctgaccacacaggtccgccctctctctctgcagagagctctctgctggctgctctattagtctttctttccttagactgtttccttgctcatttccagtctttaactcaaatggagactacactgagctccgctttcaaggcaacctcccattgccttcaccaccaccctctgcatcttacctcctgtttcattttttctccttagcacttaccaacactgaacactccatattccacctgtctctgtcttccctttcctccctgtcctgccccttggcagagggggagggttttacctgttatgttcactgctgtatcttctgcccctatgatgccttacacgtagctggaactcagtatttgtttaacaaatgaatcatacatttagttaaggttaatgggtgggaggagttatataacagattggaaaaataagaacagacttgtaactgtctttatttcctgctttagaaattactatcttcatttaatatttttctgattacatctatctactaatcatttcaattagctccttcactgaaacacagcattgtaatctgtaccaagaaaataacacactagttctacatcttggcatttaacttcaataagtaaatatactattttaagtatgtaacacttaaacattttctagagctctttccattttcatttatctagaaaatgttttcaaatggactgttaaaattcagctaagaactgatgttgggtcattacgctggagctaattagcattgcttgcctggagctgctggtcccccttcctgcttccacctttccttttttctgaggtggttgaaaggtcaaacccctggtgagaggagagaaccaaagccccactgcgtgcctcagatgcagagtttcacagcgtggtattcactgggtattcaccgacatttctctaggccccttcacctgaaggaactggcctgctccaatcagtgacttgcagtgtgtgtgtcaggggcaaggatagagtgaggaaaaatgtgaaataacaaatcactgccgctccttgagaattacaggagcatcacctggcaggatttttgtatccttattttcagtattaaaccacatacatgcaccccactgcctgcatgcctgtccatgcctgtcccactgtggtgtttcacagcattttttacatcatggcagatagagaaaattagttgtttggaattctggaggcgaccagcctgggagctccagccaccttaagtgctgcccagctagacacccagaaggcttcgatcaatagcttgagacaaactacttgagaagctctgcattagagaagcaaattcaagtcttgacattttctcaggggagtgctctgaaagtgactatataagcttctaccgacctcaagcaaatcacaggcattagatacattaaattgctgaagtgatagctctggctttttggatatgcacaatcaaatatagttttctgttttataatttgtcaactccccttccagattaactattttgatccctttattactataacattcttaaatatttaaattttaagcaaattattcaaatgtcaaataaaatctttagatacaaacttatggtaacccaaagtgacattccaagtttattttacacacattaagagataagaaacccagtattttctaaagcatgagtactctaattctgaaagaattctgaatatggtattatttctgcatgcatttatacaacgctaaaagtgctgcctcaagtttgcaaggaatagagttttctacagattattgtacagcgataatgatacactctttagcttagcgtaccatagtacaaatactgtatcatgttggctattactaagcacgagacataaacaggccaatcaaaatcctttgagattaagaagtgataggtgccaataaacataagtagaaactgaacaaggagcgttgaatatttaatgaacccatgaagcataaaacaattgatgcaaatgtttgtcattttattttttttgagacagggcctcactgtgtcgcccaggctggagtgcagtggcatgactgtggttcactgcacgtgccaccatacccagctaattttttattttttacagagacagggtttcaccacgttgtccaggctggtctcaactcctgggctcaagcaatcttcctgcccaagcctcctaaaatgctaggattataggcgtaagccaccatgcctggttatctgtcattttaaaacattactgtgaagaataattttgcactgttttaactgctactggcttagtaagtataaaaatatt

SEQ ID NO: 697 - DNA, 4001 bp, Homo sapiens
tgggaaatgagcagacaccagtagaaaccagtggtctccaagctgcttgtctcaaactcctatcagtaaaagaactttagagcatgcgcccttaaaatatgtataattatatagtttttatggactattatcagtatattagcaaataaaatttctatctttataaataaaagtaatcaatacaagttgtaatattttctcactttattccaatggctcacatgctcaagggacatgagctgggaggcagcattttccctagagagcatgaaggttgcctgaagagattatttccattatttggaatggaccgagtttgaacggctttggacactaatttgctttcctgaaactagtggttggggactccagaagaaaaccaagttagttagaaggaaagtgaagacagtacattttctctatagagccaggcaacaaagtggactttacatattaggcacagagttgggagaggcattcaggaagaagcaacaatgtttatgcaggtaaagtgggaaatgacatgatgcatttaggaaatccatgtatttagaaatggcaggggggaaaggagtgtgtgtgggattcgtcagcaatggctggtgcagagtaggcaccaaagtatttcttaaaggagcagggtaaagtgggggagaggagtatggcatgaagctggcaggaaccagagccagatccaatgcgccttatgtcgtgattgatttaaactttacctcagaggctatgagaaggattttaggtgggattgatgtgatctaattgtcctcctagcatagtgctaagctagcaaaggtgtaggggtttggtcggaggggccagcttggagggaaagagaataaggagttgggagcccatcagaccaatccaggcggcaaggactagggccctgcagaggcttcaggagtgaggatgcaggcagaggctgtttgaggtgctacttagagcatgaaagtacctgagcagaggcagagaggaatccatatgcatgatggtgtctttcactgaagcaggaacaagtgggtcaggggagaggaatgttaataaacaggacttgtgcctttttttaagtgtgtggagggagagagaccttgaggaggactccgaggcttctaatgatcatgagatcattagatgatgagagtgaatgattctgatcatgagagtgaatcatccggggccttttgcagagacagggtattctggagcagcagagagtggggaaggtgggaatgagcctggctttcctcctgctgggtctgaggtgcctgtgggttgtccagggaggggagctgtgaggtggttgggcgtgtggatctgaagctccatttcaggcccagtggcattcaggggaagctggtgtgacaggacagaacaaactgcccaaggagagtgctcagtgacaagagtggagggtagggatgttttatcagggggcaccccagaactttccgaagggcaatatcagaagcctgaagaaaaacctttcacttgttaaaaacaacccaaaatacaaacaaaaacaaaacacaaacagcctgcaaaatataattatttcaaaagtaaaataataaaaagccctacaacttttttttttctacaacgaaaagatttaatcgtgttgcgcatgaactttaatacagcgaatacatctgatatgatgtggcctctccaaagtcatggttcctgaaatctaggaaagggggcgggtgctggggaaagagtttttgctgggaccgcgttcccaccccgcaacccggagggctcctccttccccggcgccctcccgctctcgcccttcccccaccccgccgtgcctctcactcttgcggaggggattcacgtgatactgcgtgtagagtttctgggttcgtagctccttgaggtacagttcccgcaagatctggttctgatggacctcatctggaatcaccttctcttttgggtgtcccgccatggccttgggctgccacgcgccctcttgcctgggccttccacagtctccaggcaacgcgtccccgctgtctccaggcaacggcgtcccgtggtctccaggcaacagcgctcgggtagtgctgcccggtcggggcgggtctcactctgccagccccttaccctgcctgcatcgccccgccccgcgcccgccggtcgggatcttatttcgcgccccgccctattctggcactgtactcacttgccccagctcctcaggcccggctggttactagaaggtcccctggataccgccaggaaagggcttcccggcaaggggcagacccaggaggtaagggacagatgattggacctcaccttggccaatcatttcctaaaaaagcttttggaaggagtcagaaacctctcccaccttaaagcagatgcccagaatcaaaacctcacaaaaaaaccggaggtttcctctctgagaaaacgttctggccagtgtgaccaagattaccaatgtgataatattgacagaataaacctttcctaattaaggaacttgttgactttatagtttatttttaatgtttgtgtttaaaatgcacgtaatataattttaccatcttagccatttttaagtattacagtacagtagtattaagtatattcaaactatgtgaaaccaatctccagaactttttcacacccattaaacaacaagtttcccttttcccttctctccagcccctggcatttcactttttgtttctatgaatttgagtctgctagataccttaaataatgtagtttattttaaaagaatcgccgagcacggtggctcacgcctgtaatcccagcactttgggaggctgaggcaggtggatcacctgaggtcaggagttcgagaccagcttgaccaacatggtgaaaccccatctctaccaaaaatacaaaattagccaggcgtgatggcatatgcctgtaatcccagctactcgggaggctgaggcaggagaatcgcttgaacccgggaggcggaggttgcagtgagccaagattgcgccactgcactccagcctgggggacagagcgagactccttctaaaaaataaaaaataaataaaaagtaggtctagcataaagaaagaagccacccctatttttagtaagcacctaaatactgtctgaagactgtgctcttccccactcagtacttcattcattcatccatccattcattcgctcaggacacaatgtgaattgcagaatgggtttagtctgggacacagtgttgaacaaaatttttaattggattgtttatcaatttgttggagttcttaatatattattttgagggctgtacatgctgcaaatgtattttccctctgtgtggcttgccattttagtctcttaatggtgtcttctggacaccaaaagttaaacgtagtcaaatatattagtcttttcctttatgattattgcttcttaattttcatttaagacatctttttctaatttgatgacctgaggttacttttatgttactttttagagcagtgctgttcaataaaagtatgagctgagccactcatgtagtttaaaacattctagtatctgcattaagagagcaagaattagataaaactaattttaataatgtgatatttaactcagtatatccaatttgtcaatgattcaacgtttgaatataaaaattattgagatattttacattgttttgtcctactaatgtttaaaatccagtgcagattttacacttcataacacatctcaagagctccatggccatctgtgggcagaactattaatatttaagaggatttgttgttttaccctttctcagtgagatctgtattccacctgaaattggttttcgagtgcagtgtgaggtaggaatccagcttaattttttctttccaaaggagtatccagttgacccaccagcaaattattgaagagatagtccttcctcactggtctgctatgctactgtgtccataaaaaaagtgtccccatttgtgcaa

SEQ ID NO: 698 - DNA, 4001 bp, Homo sapiens
aatagatgaggataatagataacccatagcccctggtgctcaaaagccagatctgtagccattgttccctcaggcaagtctcagcacacacacccctgcccccaccatacctgcgtgccctggcccctgctcccttctcaccgtatgcacgaggtccagggagaagatttggatgcagcagacaatagcagagagtgtacagattatagcggcacaaatggtgagcccacagacgctgaagagcaggttctggggaagggaaaggaggagaggagtcaggagacggctaagttccacacattatgggcctgtgagtaccccagcaggggaggcaagagtgagaaccaggaggatgtttgcagggtgcaagctcaccttgagggcccctcgggcttcatcacaggtggagttaggggcaactttcagttcctgccccgactctggacagggccggaggaggggaacagagggacagcacacacagacctttccttcctgagtggagcagggagggtgaggcagcctgagtcaggacaaactgaggtgtcctgcacacctcccccagccagttctttccagctctccctcctcaaatctcaccagagagcactgttggaagtctcgggccagttgagcattcttacaggagagaacagagccagccatgctaagcatgacacagagcaccgaaagcaaggagaagaaggagatctggggaaaacagggtgcagactcagggctgggaccctcatgagtactcctctgccacggacagagtccccctccttcacagacacttcgtgcccacccggctggcaccaactggggagccagttcccttcttgaggacataaatgggcttccccttgcgtgctgggcacctgcctcccagtgggcactggaccctggcacctaccactagagtgaatggccgcttccaggacacaatgccaaccaccccggagaacgccagctggggacagagtgggcacaggctcagcctggcaggggaggctcctgagtgagcccctcaccacaggatgcacccagccctgtaaggaggcagaggaccaggagagggaggagaggcaagcatgtggacttgcagctggtgtggagggtggggcccgaggagcctcccccacccaacaactgtgcacccaactcaccgagaacccagcccaagacgggcaggacctcttgatgctctcggtggtggtgacggaagaggccaccatgctgaaggtgaccaccaggatgcccaggagcacttggaccagccccagcgtaagcagggcctgcagccagggtcggtggaggcggaggtgggtaaggcccctggtgctgggccggctggtcagcgagcggctggagtcactaggcgagggcatcatgcctgctgcccggttgcctgcgcctcgctcggccctccctggcacttgggagcatctcagaggcgcccaaggccccgtcctttctcctctccaccccactcgctctagagcccaccccctggctgggtcccctggggcatggccgagggacgccagctgtggggggggccaagcgaggggcgtcacggagggaccgcggagtgctccctccccaccacgggcactggacgggcaccgtgcccggggcgacgatgaggacgcgggggcaccggctcatcgcatctccctagggaagaggggcaccgagaagggccggtccaggagtgaggagggggcggcggcctggagcccagggaggggtggggagggtaaaagcgggaaggatggaaataagtctagagaagaggggaggggtcggcgtggggtgactctagaggcgcggtcggtgtgccctcagggcgtccagtaggatccggggccgcctggtggggagaggccgcggcgccgctgtctcctgtgtcgcctgtcccgctcccctccccaccacgctccgctccccgagctccggctgccgcaggtcggggactagagaagggggatgggaatggggatggtgcgggaaggaggggcatggcggcgagggccggcgcggtgcaccccgggagttgtagttcgggactgagaccctgtcggggttgggggatcccgcggcagggcgaggcagtcggataagcgctcctccagtccctgcctcgctctggaccctggctaggctgctagtgatcctttgggcctccacttgagccccatccagcttttcaggctccaggcccgcgtattccttggcgttcccggcagaggcggtggctcttccccgtcattaatggagaggggtggggagcagggctccctggcgtctccgggtttcgcgtttccgtggacttcccacctccttcctgcgccagccactcgggctccaccgccccgcccctcatatctcccagtttacactaaagccgggtccgaccttcccacctcactccacactctcctttctctttcataaggcctaattcccaatgaagattcaggaaacggggatgtcagttccagttccactttctttttatttaaataaccgaagcaacagccgtggcacagcagagggaagctgggttggggcgtgtgagaggtggcagcagtgtggcctgatggggggactaggtcacagtgaactccccacacgcctgtcaggttcagcagtcatggccataggattgggagcactacggaggagccatcagttagtgatgtctctccaagtcccagagaccttagggacgggagctaagtcagctccctcaagtagcagggccagggcatcccagtcaggggtcacggggcccggaaggcattttcagcagccccagcggctgcattggcagctgcggttcgcaccgcagggttggagaagacaccagcagcaaattcttgctgggccttctgaaagctggcacctgtgcggcggtataaggagtggatctgcaagtagaggacaaagacattaccgcccattccagccactggttccccaccccagcctaacagcatcactaccactcagcagcctgctgcccagcacacacactcacacacagaaacacacaccccagaggtccattagctgagaacaacccagcagcctgacctgtgccagttgctcctgaatgttccacccacgcccctggggacccatgatctcaccatcccggccccaccttcgacacagccctcacccgtttcagcatgacaattcctagcacagcaatgccagtgaagagcagggcgaccagcagcatgagcacggatactgctgtgttgcccttcggcaccaccagagcagagatccagccactgtaaagggaaggatgtaccagtgaagaggggctcctcagcttctccactggttatgtcaccagcatcccctgttcctacccttcccatcagcagtggctccctgtcaatcgagcagcattccaagcaccacaatcccaaactgtatctaatctcttcatagtttaattccagtttctgaaccattagccctgagctctccaagctcttccaggcactcatctggggattcttcttcctcctttcaaccatggttctatgcctcctccaggaagccaccttagattggccaaatgcagcattcttcccttcaatctatatgtgtcaagagtgctgtctgcgctctatcctggaagtatgtcttgtatctcattaaactagtacctcccaaggattaaaaccacatttcctttttctgaacaactcctatcccagcacccagtgctggctggatctagagggaaaggtgagggtggataacagcctcacaaacctgaatccccaacctgggataccaatggcctggaggacaaagagcacatcctggacgaagaaaatgaagaagaaaacgaagaaattgaatgaactgtcactcctacaaagaggaaaaaaatggggagggtgggagaagaattagagctgaaggatgggcagacgtggggcccatcccaggtctccatcactctcccacca

SEQ ID NO: 699 - DNA, 4001 bp, Homo sapiens
gaggtgagcaaagggtctgcccagaccttctctggggcgggacagctggggtgggcagagattcctgggtaaagagcagaggaggagccggaacccctagaatctctggattttactctgcctgggagacctgcctgctatggaacacggtggagtggtgtccagctccccaggtgtcctgggaaactccctccccgggccctgccacctcctccaaacctgtggcagtgggaggctgcaaggcagccaaggtcaggtgggtccacagccaggccaggcacagtgccagcagccagccgcccgtgctccagttccgctcgaccctctcactcatcctgcggagagaagcacacattctgctcagctccaggcagaagctcccctgtgcacctgggcaccttctctgtgccacacactctgggaggcacaaagatggggaggaggcacaccttgtccccaggcatctttcgacctggcacagagtcatgcaggcagtagtgagtgctgcaggaagaaaaggagagcctttggaggagacaacatttaagaggcatcttggaggatgaactagctatgggcccatggagggtcgtgacatgggagggacaataatactgactcctactctttgagtgcttggttccagcacttcacatgcacactcttgaattcttcacaactgtcctacaaagcaacattattattacctgttttacagatgagaaaaccaaagctcaaaaagctaggacataacctaaacaaccatcagtaaaagactggctgaatacatcgtaaagagtctgtacaaatgcagtcccatccagatagctgtaaaaaaaccaatggggaattgctttatgtcctgacacatgcagtgatctccagtgataatccactgttaagggggaaaaaaagcaaagtgtagaatggtgtgtatacgatgtgtataaggcaggccaggagtggtggttcatgcctctaattccagcactttgggaggccaaggcaggaggatcacttgaggccagaagttcgagaccagcctaggcaacatagcaagaccccatctctacaaaaaattaaaaaattagtcaggcatggtggtgcacacctatagtcccagctactccagaggctgaggtgagaggatcaggagtttgaggctgcagtgatctatgactgtgctactgcactccagcctgggcaacagagtgagaccctagctcaaaaataaataaaataaaatgtgtataaaggaaggattatctatgttgctcagatatgcataaactagctttgaaaaatatattttaaaactagtaatattgtttgccatccaaaagggaaactggttggttgggagatggaggtagaagagagactttttctcctgatttatttcttgctttttgagctgccaaccacgggaatgcagtagcacttcaatttaaacagaatttaaatttaaaaaggaagaggtgaaaccgaggctaacagaagtcaaatgacttgcccaaggccaggcagcatgtgggtggaagagttcagagcctagaagcctgccctctgcccactgcaccaccttgcctctgttctcttcccctttccttttcctctttcatcgttgatggtttgggcctcccaaagctaccctgaagggtaggctggaaatggagggaatcctaaggaagcaagaggcacagagtagctaggagctgcccagccattgaagggagcaggagaagtcccaggatgcagcaaggccaaaagctcaggggtgagcctggaccactgctgggcccccacaagtgccagtgcagctttgggaataccagaggccaaaccaactgctaggacccagttgctcctcagatagggtacttgatctctgtccacccccgctactccccatcttcaatgtctccccacttacctttttggggatctttcagtttctgtctgttcatctgctgtcctcagactcactccacctggacaagtaggaaagattcatagggggttgcaaaggatagagggagccgatggctctgcagggggtgaaggagaacctgggagagggcaagggggtgggctgggcactgaagttcagcccaattctgaagctgttctcaggtgccagggcagggacagtctcttctggcctgggaatctggaggggctcttgcagactctgggatcacacagggtggtgagcctgagaagggtggcctgagggagtttctctatcccaagagtgaagcagggtgatggtagggaggggtctaagaatcacagctgtcatctctctggccttgggagggagctgagggtcaaggaaggagcagaacctgacagattcctgctggaagaggcacgtgggagatacctgaggccctgatcctctttgcttccacctcctacccactatggcacctgcttcctggactcacatggagctggcttggcttagcatcccttgcccccattcccacaccagagggctggaatggggacactccaggtccctgagcctttgaaggccacagcctccaatagctttccatttctccctaagaacctctcttccctcacctctctaaagggaggcagaactgaaacatataggatggtggggccccggaaggacagagacccctgagtcctagctcctaggagcgagagcataaggggaatctggaggaacacagagaagaggtgccagttcccaggggatgggtgtgctccctgggctgagcttcccactcttctagatgtgcctctttcctgagtagagatctcttctccctgccctccaggaaccctccttttgaccatcacaaatgcagctttgtcttctctcaggtgatcctatttccctctgagctgcaacatcctccaatccaactcaggcatctctcctaggaaccccaaggcccaaaagaccttggtggggtggggagcagaggggtgggggtgttcatttgggctctcatccctggcattctattccctccctccctgaaacagctggacatagaagcttctgggatgtgtttttcgacttccatgctcctgcctcaatttcctagcctatttttcctaaatcccaatccaggggtttagtgaggctgagttagcagcctgcattacaagggtttgaggatgtgaaccacaagaatcttcaacctttcttcaccttctctccccacaaacccccctaacgcctactcattcctccacattctgagcccccacacctgggacctacctggtccacggtgatgcccactggttcgatctgctggcctgaagtcttccttgccactgagccagggaccagcactccgaaagacagactttgggagggagcggccagcttgggtgctgtctagtccggagccctgtccccttcaccaagttgctgcgcccccgggacagcggggttctggtcaggttggcatcatccgcagggcgggccgggctctgggcacaggggagctctgggcccggccccgccagctctgcagaactcagccgggttttttccaaggttcctgccggcaggccggggagcgcgcagccgccgccgcaaccgccgcctcgccccgggctacccccgctcctccagccccgcgtgggcgccgccgcctccttcgggacagtgccaggcgctcggctgaacggatgggcacagccgagacgcagcggcccctggcggccgagggcaagaggaagggagagaggacatccggcacccgcaggttcagtgaggatggacacctccgtggtggcaactcagaggaggtccctcaaaaccctgaaggtcttgtggcccccagtgccctggctcaggggaggtggaggtgctggggggaaaggagctgggagtgaggagtgattgactagaccctcagggtttttgagctttgaagattgcagaactgcattgtccaatacggtagccactagtggcatgttgatatttaaatttaaatctaaat

SEQ ID NO: 700 - DNA, 4001 bp, Homo sapiens
tatcaatttaacataaaatacttccatgatataaaagattataaaaataaagatgatagaagcagtgatgtgttttttctctaatcttaagaaccaaaaagaaaagcagtgtatgtgttttctagtttccattcattcaccaaaacatagctactgtcctaccagttctagagaaacgaatagagcataccaatgtcacattttcaccacacagaaaagaaacgctgtgaactccaagatgtcttgatcatcttttacctgtatccatatttatcactgcactttatcatgagtgaggctgagagtctgaattatacttgtgtgtgcctttgtattctcctttgataagtaatttcaaatgggaaagggactcctgctgactgattccattgtacggttcgagaggccaaagtccaacatctttgcaaactttagaaaagttattaatagaatacattgattttaaatctccctgagattggctatgagtctgggcaaataatttagcatctttaccatttgtacctcagtttctcagacagtcgtgataacgaatcatatttgaggaagtgctctaagcttagctcaaagatcctgcataaactcaaggaatgtttgtaatacataagaacactgagatctctaaccagatttttagaaatcaacgccagtgaaatttttgcaagaatttacaacgcaaaaaacataggcgtggctaataaatggcaatagtaatttgtaccagattatagatttataaagtcctacagtttaaaggctaaaggctaaaaaaaaccccacattcctacttcccttccaagtgagaaatcaaacctccagagggaagctggctgggtggggaagatgctgatatctggcactagacccaagtcgcaatagcaagcaactctcattttcccaaattagaaactccttatccatcccaatgatggtatggtctttaaaaggactaataattccattaagactaaccaagccctgttacccctactttccctccaatccatccttctaccccttctcttcttatccggagactggcaggttaacagaagtcagattagaatgaatctcttatcagaacccacaatcaaggacgcagctcgacaactattcacattcatcattaagggaaacgtatcggtccgctcttaatcgcggggccgtcacacccggaaatgaaatctcaagcgcagcccactgagggctaacacagcattcgttaagttgtgcccttctgcgagcgcccggcgcaggaccccaggagaccgcgggccccgggcacggttgccccgccttccgcctccggcctgcaggtcactcgcgcttcccggccacgaggcgggcccagcaaagaccccgcgagggcgcgctccctgggctgcctcaacgggcgctccggggaacacaagagaggcaccggggccaatcgcctctggggaccgcgcaaggggacgagagacggtcactagaaggacctctggcagcctgaggcggccccaggtgggcccgcgcctcaggtgggccagggacgtggcggccgaggccgcgtcccttcagccgcgaccgcacacagggacacgcggcccgagcgggtctcccaggaagcctcgggccctcgcccgggacccgcccgcagccactcggggacggctcagggcacccggtgcccggcccctcagggaggcgccccgcccccaggcggccccagcccggcgcgcgctacgtaccgtgccccgcccgcgtgccggtccgcattttcccgcccgccgcgccgggggcgggggtcgcgcgccctcccccgcccccgcgccactcacctgtcgggccctaggctcgctccatggccgcccgcgcggtgcggtgcggcgcggccccggccgcccccgccgcctccggggaggggcagccccacgccgcgctcaccgcccccagccgccgccgccgccacagcggctccggcccacccccggcccggccattcccaggccacctctcgccgcgcagagcggcagtcccacacccacccccccgcctccgaggcccccggctgttggtaccgtcctagcgtagcgcctgcccgacggccaatcccagcgctcgctcggcgcggccccgcccccgcccagtaggcggcccctaccggacccgctccggactgccccccttaacctcttccataccgggcccgtccgcttaactccctcggcgccggcgccggtctcctgccggccgcgccgccctgcccgcttacataaactggcctctcacttctcacttccttcgctcttttttctttttctgtatttgtcctccatcccccaccccgtcttctctttttctttcctgcttttcttaggtaggtaggcagccaagcagcaggactggagagttgcggtcccctaggtcgagttctgtttgtgagaagcattttccctcctcctgttgcctttttaatttgccttgacttctgctcggaacttctgcctatctaaatgtatcccccgcttcttttgcccagaaaaaggctagcctttccacactgagtgcaaatggctcttcattcggaccagagcggagcgtcctgctacatactttcaggagcatctcacaaaattatgattcatttactgtaatattagttgttttacatctgttttttgctaaggaccgtaagccccatgagggcaggtcagtcgctcctgggtcgccaatgcccgaccgtagtgcacccagtgggcgcggataaatcgtgtgaatgaaagattctgccttccctttgtttgctttcagctgacttatacagagccgccactgtgtccatccatttattcaccatatactaaagcgcaaacttagtgtgcctgaccctgaaatataatgcaggttactccatggaataagatgcgtgatggggaaagactgagctgacactttttcttcaggccacatagttcatttaatcagtaaggcgtactgaacagaattctttcttactggctgtatgatactggatgtgccagttaactttgctgagcatcagtttccttaactggaaaatgggagttaataacttcacagggttgttgtaaggattaagttaggaaatgtatggggaaagtactctaagattattgtgtatgattaggtgttattcgtctgtatatttgctgagcatttactatcaggagatcctagagaaataattgggcttgacacttgctccggacaatgtagttagggaggcagcattaatcactgcaggagacgtacagtcaaatgcagaaggcattgtattagctttttgctgcgtgtagttgaaaaggtttggaggtttggaggtcgttttctggccggagaatacataattcttgggaaaatgagctggaagataatgagaatctaccttatttctctgcacaggaagatcagtctgcctgcagttagctaatctccctgaaccttgctcactacatcaggagaccataaagcaaaagggtaaatcaacagttcctttaagacactttatccaaaaggattctcctttcttgcctgtaactctgacaaggacagtgagggtgaacgctccaactgtcactgttcaggaaaaggccagcttatcctgcagcctcagcttcctgggcggatgatcccttctgtctttaaggattttcaggtgagggcagggggcagtcattgcctctccaagcaacccacttcagtgcttaatttcgcatccatctatccatcccacatactgcaggacagacacacttcctccttttctgtcctcagagaaggagagctatgggttcagggcctctctgtgaaaggctttcagacgacaaaattgttctgccccccagttttcccttctccatgttgcattacccaggcccttgttgagtgtatgcatagcaccagcaccgtgcctgacactccatgatgtcagtttctgccccctccgcctgtacgggatt

SEQ ID NO: 701 - DNA, 4001 bp, Homo sapiens
atgtgaggcacatacaagtaaccaagcaaatacaacataagagccagactggaattatttatagtgtgatgtgggaccctggggtggggaataaaaaagggtatcaaaaggagcaggatcaaaaggagcaggatctggagctggacccaaacagcttaagatatccacttaagaaagatcactccagcacctgtggggtacatggctgggatagagaagaaactctggccagagaaaccattcaggaggtttttgcgagttaggatgataaagggatctaaaatatagggcagattctacggagactgaagaagaatgggtgaaatatttggaggcaaaattacttgtgcttggtaaattgttagaaagtggcaaaggagtcaagaataattcccaggtttgtggtctggggattaggcagataaaagaggtgagggcactaagaggaaggctgggacctttagtgccatctccaccatcagtctccattccttcaaacggatagttgacattttctcaatgttttgtacatttccaggcaaaataaaccttcaggaccaccttccaatgggattaccatgtcaaagcccctcctatatcatatggaatctagaccatcactgtgtgtgtgtcaagggggtagggacaatgaccagcattataatctatggacaaagttgggcttggttgcagaatatatttaagtttggtattctttgtatttttaaaaatttgtttactttttaagaatttgagacagggtttctgcatgttgcccaggctggcaactcctggcctcaagcaatcctcccgcctcagcctcccaagaagctggaatcacaggtgcgagccaccccacacaactaaatttggaattatgaatatggctgaggtccagaaatatttaaatttggcatgatgactaagagtttgttataggagctcaatcatttgataaatattgaacatttcctatgtgtcagattgtttttcccactagggatgcagaggagaacaagacagaataggttcttgtcctcatagagtgtgggagacaggcagaagacatataatttcaggtaggtataagtatcataaagaaaaaataaagcaaaacaagagagtgctgggaaaggccagggagcagagaggatgacagagctgtcttagggtgttcaagacctctttgaaaagctgatatttgagcagaagaccacagcaaggaaaagtggcagagactgctagctgcctacgcatgaaatgatgggggaaggagcaatacagaaggcatgtaacatttgagagtctattaggcatcccaagggaggtgctgcggaggcggatgcatggaggcggatgcggaggcggatgcatggaggcggatgcatggaggcagatggatgcacacgtctagagtttaaaaggagatctgaggcggagatacgaacttgggagctgttagtccagttccaggttccaattcaacgtacttttatcagagctcactgtgcgccagggacttgctaggagataaatggggtttatctcaccggagataaatgtggttgcacagcagatggacacaccagccaatgtggtaaataaacccttgggtccagctacgttctgcgcgctctctgccagcacagaggagcagcgagtcagggtacggagcgggtagcgttggggaagaggtggccgcgaagcgagacaggccagcggaacggaaaacggaagcacgagacgggggcgtgacgcaccgggcgcatcacaaagaacggcgagagggcggtggcgccgggggcacggctgggcggctccgcccagaagagggccgagaggcggggcggtgcccccaccgcaggcccgcggcgccctctgcaggccacaggcagcgactcaccagttgcctcatctttcctctcctccctcttggggctttcctcaggccacattttttgtgtgtctgggcagtctctcagcctccgactcccgtccctttcttccacttccaggccgggcgtgttagtgtcttcgcgggaaaactgccaataaagtttttcttcttctcgctcccaagatccccgcctccccttaagcaccgcgagatctgacggcgcggctaccatggcggcggcatttgaagcctcgggagccttagcagcagtggcgactgctatgccggctgagcatgtggccgtgcaggtcccggccccagagccaacacccgggcctgtgaggatcctgcggaccgctcaggatctcagcagcccgcggacccgcacgggggatgtgctgttggcggagccggccgacttcgagtcactgctgctttcgcggccggtgctggaggggctgcgggcggccggcttcgagaggccctcgccggtgcagctcaaggccatcccgttggggcgctgcgggctcggtgagagcgggggcccgggataggtcggggggtggggtgggagaagggggaccgacgggcggcggcggccaggcccgcgccgcagctcaggaagagccctcggtcggcccccggagcagggccctgccgggggctaggcgctacgctcagttaacttatttgtaaaactaacgtgcactattgaacttgaggatagttaagacctttttttaagcactgacaaatggttctaagtttgagaagataaacggtaaacgttcagggactaggcgtgttctcatacgtttttgagaatcaactaaaaatgaaggtgccaactaggggaatctcaggagacccttctagttctctgattccatgttagcccctaagttgcttcagtgagtactggctagtgataattgtttttttccttcgcagatttaattgttcaagctaaatctggcaccgggaaaacctgtgtgttctccaccatagctttggactctcttgttcttgaaaacttaagtacccaggtgagttagctgagaggaccagaggaggatgtgttttgtggactttaccacaggtcagatgaaataccagtagctcctcagagctggaagtgaatttgatgaatgattgagttaagtggtggtggtggcgaaatttggaattttctatgcgtaccttatttaaatagaataaagctaccatatatgtcaattttgtcactacttggtaatacagacagggattcttcttttacttactgactagattaatgtgagacttaacatttgacttgattcatggtaatgtagtgctctggctattgttggtaactgcagagtttgttttttttttttgagacggtgtcgctttgtcacctaggctggagtgcagtggcggatcattgctcactgcaaccttgaacttctgggctccagtgatcctcccacccatcttcctaagtatttgggactacaggtgtgtgccaccacacctggctagttcttgtattttttgtagagatggggtctccagtgttgcacagaccagccttgaactcctgggttcaagcaatcctcccacctttgcctcccaaagtactgggattacaggcatgagccaccacagccggtatgcaggtggttcttaaagctctgtaaatgtatcatattgatctcccatcttccaggttgtcttagagtgtttctaagattgccttacccaaattagcaggaaatttgagtttggggatcatttctccaacaaaggtttgttgagtccgtattacgtataaacagtgtgccaggcattggggattcaaagatgaattagatgtgattctcatagccttacttggtagtttagttgttatggcagactgtatttcaagttctcaggcattggtatatctgatgatgaatcttcaacagtggtttttaacccagatatccatgttcatcacctgggaagctttttgagtccatcttatgtctaccaaatcctaggtgatgttgcacattggaaatcctcctacttcccaagaacctgagttagtctaattgtagactaagatgtatttgag

SEQ ID NO: 702 - DNA, 4001 bp, Homo sapiens
ccacaaaccctccattaaggcagaacctgaggtgggtggtgtagtccccaattcgaagcacaaaaaggaggattccattagattcttttctctgcatgggtcttggacctcagacattatctgtgatgaccttgagctttctttctggtactgcacacataaatggaaaaaaatgagaattgtgtacgtgtgggctggggccagccatcccaatctggcatgagaagcatgtgcaaacgactatgggaagggacatggcgtaagttcagaagaaaagcaatgaatactcctgtctctcaagaaatttatctctgagtcagtgacttttgcatctgagtgtcaccacagaaagggctccaggagggaggactagagagagaaatgatcgttgatgtgagcaggctgaccctggagtaggactgacaggaagagtggcagggttacttggtcaggaagcatcagtgagaacacctgcagtttcaaactctgccccctacccccagagctggcccctaacacactgccaagttccttcccaagcaggaagagtgtagcctttgcaggcagcagtgggaaacgctgtcacagaatctggagagccataagctggccctttctagatccaggcctgctgttgtgtggcctgagtgcccctggctctgtaaagtaagaagaaagaggagagcagaaaagtgagactgagaagagtcgactccaagagagacaaactaaaagagacaaaaagagacgagggcaaagacacaacagagagcctagtggaaggagagatgggcaaagcagagatggggctgtatgtgcataacatttgcctgaattccggtgggtgaaggaataagaaaggtggcaggtggcgtgggggcgggggcagtggtatatgaagccagtgagaatcaacctggctctccctaacatagctttagcgaacaccactcccccgacttcggtgatttccacccccccagactgagctacttctccccctccccgtaccgcggggcctccgaacgctccctgcgcactccccaagcccagacctgacatctggctgggcctccgcagctcccgctctcgatttgccaggcagagcccctcctccagcgcagggccctcccccgcctttccagctgccagccccctccctgctggcagacaagcccaggcagacagccggccaagcctgcccccgcagccgcgccagctctgccaagcccggcagagctgggggcccagggtggtacccgcttccctcgagcgagcagtcccgctgacctcgtgcccgcgcagggatcaggacccagcaccctcctcctccccgcgctccaggtcgccccgcgcagccccgcacccaggcgcccgcgtcccgctccccaggccttcgctctcgcgctttccgcgtcggcggcgcgggggccccactgcgtccgtgtgcctggccgtctctgggcgtgccctatcttctctctggggttctctgtgtcacatttcagcctggctggcttgctccctctgtctctctgtcacttgttcttgtctcatcacaaatctttgctcaaagtttcttcgtggtcccctttcctgaggacaagccctgccctctgcctgcgggcccgcgtcctctcctctcttccctggccctcctccgccctgcttacgtcccggctccccgggggccggggcggagaccaggtgcccgtcggggcggagcagccctccctgccccggcgccagcttcgctcttaccagctcctgtttgaggcgacggagatagcagtccatttccctgctctccatcgtcatgcgcccatttgtcgggttcggttcaaacagagagggcccgggtgaaaccccggccccactggaaactgcgctccgggccggctccccgcccctgcgcccgtagcgctcgcagcgcggagctgagcctgcgctccgagcccgggactcagagtcgcttccccagcggctagccgcgcgcggtcggtgctgggggtggagggaaaagtgggacagccaatgagaattcaggggggctgtcttcagccaatgggcagggcggccgggaggccgggctgggcggccgaggcggaccctaccgcagtgtttgcacaggacccgggcgcagccactggggctggcgaggacacacctggtcccggccagcgcggcggagggcatcgtgactccaggctgtaccgcggcccccaacgaagcacgtgaccctcgtgtggtcataaagggagagcacagttttacggggagggactgggtagcggtctcagtaacaggcagagtgccatagtgtcagtcccttttcccaaactccgatcaggaagggaaacacccccacccactccgctcccatccccagaagtccctcagaagctcttttctccccgaagaggaccctgggaaggtggctcccgcctcactcctagagtgaaatcctcgcagccctgccctcgcgggcggagcagagacgccgccgcttggccggttcacgcctgtcacacaaagccgccgagggtcggctgcgcccctggcaaggctgtagggctggggatactgagtatgacaggcgaggtccctgctctcaagaacttacatgggagagaaggggagacaagataaacaggtaaacacacacacacacacggtaagcacggtaatttcagacaatgatttttatgaaaacatgaaacggggtaagggggtcgggctgctttccctggggccttcagtggggtgggcagggaacaagcctttctctccccagagctcggcgtcagtcaacctagctgacgctctcgcctttggcgaagcgctctaaggccgggacgctcctttgttattcaaaaggagccgggcgagcgccagccaggccctggaggatggagttgcggccaataggctcgataggccgatgggctccgcagaccggtggggggtgctcctcccagcccagccctggacgccgggctccgcgcccgccagcgctgctccctcccagcgcggagacgccgcgcccggccgggacagccggggacggtggcggagagcacggagagtaattaagcaattagcgacgtgttgttaaaaggtaattaacggggaaaagtttgccccaggcaggattagaggtctctgagtgggacaactgtaagaacaccagagaaggcacgaacggtgccggcgccgccatcggtccgtccgtggcagccaaaagtgccagatatgctaactattgaaagatgcgcgggtggcgcacgcctgtaatcccagcactttgagaggccgagacgggtggatcacttgagttcaggagttcgagaccagcctgaccaacatggagaaaccccgtctccactaaaaatacaaaattagctgggcgtggtggcctatgcctgtaatcccagctactccggaggctgaggaaggagaatcgcttgaaagcgtgaggcggaggttgcagtgagccgagatcgggccattgcactttagcctgggcaacaagagagaaactccgtttaaaaaaaaaaaaaaaaaaaaaaaaaaaaaaaaaaaaaaaaaaaaaaagacaggggagaggaagaggagagagatagatacagagagacacagagacatggcgcggggagggaggagggacagagatggaggggaagagagggagggtgagagagagaaacagaattaatctttagaagagtttgcagagtccagttgaatggcctccacttaacaaccccaggtcctcaattacacaatagcccttgcctacacctttcagcctagccccaagtgtccctctgggcgaagctggggcagctgtagccaatggatagagaaaagaaaaaagaggcacaatatgggctgaacttggtcggtgaccgctggccaagcccaggcaactctggtcctaccagtctgagcagtattggccctcctgccttttctgcagctgtgggcagaaattctccaag

SEQ ID NO: 703 - DNA, 4001 bp, Homo sapiens
ccaggccacattgcggcggaggggctgtgatgagactgacaagccagagagagggcctgggctgggccaccaagttcagcaaggccctccttgaggcagtggccgaggcccctccctcgacccacctttgctgaccaccagcagccctccgctctgcagcaggtccccagacaagttcccctggatgccaacagccttggcctgtcaggagtgggtacagcctgagtcaatcctagaagaaaggctcctgggagctcccaccaccccccggcctgtacacccttgacccgcacacaccttggcagccacatcacgcacgggcttccccagagctgctgggaggatgctcaggctgttgtacctgcgaagacaccaggtcgcttggccaaactccggagaagcctgggtccagagcctgctccagtgtccatgagaccagttcctaggtcaggccccaccccacccacccgcctcaccagggctcagagatggcacaggcgaccagatcagtagccagcccagcccaccggcaggttggacaccgagcccagtggctgctagccgagggtccacagagggtgcagggagcatggatggggccccaggctgggtgtgcccagggatctggctcagctggcaactgccaagcaaaggaagcagcctgtggcacagacaccagaaagctaggatggcccctgatgggccacgaggctccaccccacgaggtggtctggacaccgagagtaagccccggacgaggtggctcattacagtcacccagcacccaagagaaggcctggcagaagggctggtcaacagtgccaccagagccgccttgcccaggaaggcccgagtggacagcaccacagagggcagcagggagaggaggtggcagggagcggtgggaacccctgggccccccaccccacgctacccaagggttcccgcccccactcaccgcttgaagcctagctccttgtaaagctgcttgctctcatccaggtagagctctggaaagcggaagccacatgtgtgtgccccaggcgcagaaccagcccccaacccactcaccacaaagaatcgccctcctccttccgaccctctgttcctctgcccaccctccgtgctcagcccacccccgcagggcagggaggggtaaaacggggctgagtgtcccccctcccctcagaagaggggctgagtcccagaggcaacaggtggagccggcggggcagagctcgtccagactctgctgctgggcccaggtctgtgcagggcaccacccagccaccagctgcggggcggggaggcagggagagatgagggacgctgacccgtgggcatatcaaggccgctccagcagacagaagggccggggttgggcaggaaagggccccgaacgccctgagcttagggaagggtatgtgcgccgccgcggcggggaacaggacgcacctcccgcgaagtagtcgccgtccaggaactcctgcagacccagggcctcgggccctacgcccaccaggcgcacgccgtgttggtccaggagcccagcaaggctgctgaggtcctgggcgatccagcggcacaccacgcacccgaagcgccgcagcccggccaccacgcacgcgtgctcccgccacaggctccgcagctccacggcctgccgggcggctgggtcatgggcgcgccccgttgcccccagccccgcccaggccccgcggcccccaccaccccatcgctgccaggacgcccgggcaaggagccagggacgcgcccaccgccctgcgtccacccggcctcacctccccggtcaccgcatgcttcaggatgcacgcgcccacgcgagcaaggtccaccgtgctcatggcggccgctgccagccctggttcccggctccccgactccctgttccccgctcccggctcctcgctcctggatccccgctcccggctcatagatccagccccaagccccgccccgagatgccccggtcccgcctttcttgctgccgccgaggccccgccccttcgggctcgtctccgccccgggcccgcccccaagatggccgcagcgcgccccggccacgcccccgaccgcaccccgagccctgctccgccccctcggattcgcccctagtcccgccttgtttcccctcctactccaggccaagcctcgagatcgcggcgccaaatcctgggtccgcctgcttcggtccctcccgcctcctcaatccgggccttgcgggacagttgctgtcccgcgtcctggtcccgcccctagccccgcctctccgttgggccgccgacttggaccccgtcggccattggcgcagcaggcggagctgggcggtgcggccctcggtgcgcggtgcgcctgtgcggaatgcggcgggaggcgggcagccggctcggggtcgtcccggggggcgccggggagcggctgggtacggtgggcccaggggtggtccagggagcggcgggggtctccctgcggcctcgcgcgagactgggctggactcagggttgaggggagagggtgagcgcaggggtcgcgggcataggggaccgcgggccggggtctcccgcggggcgggggtcccagcagtggggggcgggggggtgcgagggcttagcctttccacgtggcctggttttcgcttgaaaatccccgcaaatgcggcagcatctcaattatacatggacgcgatgtctttaatcatgaaatactgttcatgtcgtgccggttgcatatcagcttttaacccgccaaaccttggggcgaaatagaccccggggagataagcacagctcccagaagtgcactgcgggtcaggtgcctggcagatgcgtcctgttcctcccccactgcagccctgtgatagcttttgtcaccgagttggggtgagggccgggtcacagcttcacccggcctgggctcccacctgagcgggcccggcctggcagagtctgtgctgctggcacgggtcctcactccccaggccccaggacagctccaggggcctgggcgggctggagaaggaagggggagcccccacactgtattccaaataaagagaggccccgggggggtgctgctgcttcgcctgtgccctcgccctggggtggtgaaggtccagactgcgaaacggaagtcgtcactatgtcagaaagggcaaaaagcaaaacaaggaaggggaagcactaggagggaggagctgtggcagctccagagcccaggagtgcagcccccagagaccagggctacccctctaccgtctcgggctgtgcaggaggggccctctaccctctggagttgtgcaggagggggcccctctaccatctggggctgggcaggaagggcccccccccaccgtctcaggctgtgcaggagggggcccctctactgtctcgggctgtgcaggagggggcccctctatcttctggggctgtgcaggagggggcccctccactgtctcaggctgtgcaggagagggcccctctgccgtctggggctgtgcaagcagtgagcaagctgccgcctccttgggagctgggatcccagacgggattcagccattttcagagacgttcccagaaacgagaatgcgagatcaattcctcgcctggcatctcccaccaacgccatcgctgcaggagcctcactggaagccaacgggcagaggagagtgggaaaggagcttgcagcctcccagctccagtgatgcagagcagaaggtggctgggaggctgagaagccataagaaaatagcagggccagcccatgtggccgctcagatacatgctatgtgtgtgtttgcatatgtaggggctgaaaaactccacctccatccttttgaggtcctggctgggcccaagagttaaatcaagataagacagatcatcatgccagtgtatttgattaaagttggatgtggctcaggagccctcctaaggaagtgaagacccagtgaagcagactcagtcgtgtgctgagttggacag

SEQ ID NO: 704 - DNA, 4001 bp, Homo sapiens
tcttgctctgttgcccaggctggagtgcagtggcatgatctcagctcactgcaacctctgcctcctgggttcaaggaattctcctgcctcagcctcccgagtggctgggattacaggtgcgtaccaccacacccagctaatttttgtatttttagtagagacggggtttcgccatgttggccaggctggtctcgaactcctgaccttgtgatccacctgcctcggtctcccaaagtgctgggattacaggcgtgagccaccgcgcctggcaagccaccatttttcaaatggcctcttccccaatctttttatgatcacttcagtcctgggagaaaccaaggctcaggatggactggggcagctccaaacccttccaataaggaaggtcccaggcacctagggccacaaagagcaagtcgcagaactttgtcgcagaacttctcgctcgagaggattaaaatgggtctggtcgggtgcctgtagtcccagctacttgggaggctgaggcaggagaattgtttgaacctgggaggcagaggttgcagtgaacagagatcatgccactgcagtccagcctgggaaacagagcgagactccatctcatagatagatagatagatagatagatagatagatagatagatagatagatgatagatagataagatagatagatagcctggtgtgggtggcctatggctgtattctatgttacttgtcggtccacctcttcctcctgttccccgcttctgtgggttgccagggtccagcacagtgatgtgaatttcaccggagaatcaccagagggttagagagatggaccagggcagggcccaagggaaaggctgcccaggaggggtcaggaccagcaagatacgagaggagtgaagtggcgtaggttgaaaggcggaagggcgggcccctaaggctgggtccaaacgaggaggctgcggaagggaaagtgttattggactgggcagagcagctggtgggcccgacggatagacatacactgccagcccggagtggaaagaacagtttgtgctgtgctttattaaaatgtgcatcattcttttattttaaaatgtgcatcattgtctcgtgctcggcgcatgcgacctcagcgtggtggcccgctgggggcctcgttcccgcccagctcccgcggagccgcagggagcaggcgcactcacgtggcgcgggcccgggggctcccgcccatggcgaggtagacgtcgatgggcacgtgcagcagcgtcaggcagtggcatccagggcagcgacgaagcggcctggggaaattgacgcgcgacaggggccgctgaggcaggggcttggcccatcctgtggggcgcacccagggagtgcacctggggtccccgggggtccggacgtggatgcggggtcctgactgctgggggcgccaagtgggacggagggcggggccgcgggacgggcggaggcgggggtggggcgcgggccttacctgaccgggttgtgctccgtcgctaccgcctccgggctgtcctgggactcgggggcggcggcaaggccacgggagtctccggcctcaatggggaatctccgaccctgcgggggctcctgggcgctcatgtccaagccccggggcgctctgcgcggggagtggcggtcaggcctctcccgggtcgccgggcgccgccgcctcgcgcccgccccctgggccgtcgctcacctcccggcggttgagaccggtcccaggctagaagcagctgccggagccctggccgcgggagaacgctccggtccaggcggagccgggcaggtctctgtggcgtgcccgggcccgggcgtcgaggagggcagcattgtgacccgggccgcggcgcgctgacctcacagagcacgttcctcccactggagaacccccaacggtgccccctgccgcccctggcactcagcgcgggccagaatcggggactggaggcctctggccatggcgcctggagacggggtcgcgcagaccccggacacccgaggggggcgcagcaggccagggcaacccgccgcgaggcggcgtccacgccgaggagccgcgcattcccggtccacacagacgcggcggagcgccctcccaggcgggactacaactcaatgcctggcacgggggcgggctcggcggtgacttaatccgggctgagtttggtggtggtagtgagggcaggtaggggcactgcccattttggccaagggtcacacagcatctacatcacaattgcaccggagtttaaaaatgtctggccctgtccctccccaccacccgccgctgtgtccagacagagaatgttctaacgctgggggcggctgcggatgaagtccttggggagaaaaggagcaggccaagggcgatggtggagtagagctgcctctcagaggcagcatgagctgagagggtgataggaaggcggcgctagacagcatggaggactttctgctctccaatgggtaccagctgggcaagaccattggggaagggacctactcaaaagtcaaagaagcattttccaaaaaacaccaaagaaaagtggcaattaaagttatagacaagatgggagggccagaaggtgagccggggcccctttggagggaaggagggaggactggctgaggtgggtgggtgcttcctcctgtttgttagaacgatcattcgatcattccctgctcccgctggcctggaaccaagcaagcccgatggcagctctggagtgggtcagtggggaacagaggggttctgggagtccaggaacattacacccccccagaatgcaagatgaaagtggcatgaggtgaaggatcctcagaggcaaaacctgagccaggctttcctttccggcaggggaacagagactggcagaggccacaaccagggctggtagagaacaggggctggtgccaaggcccgtggagatgggaaaaaggaagacagggctcatggaaagaattgtggggtcaggggacagtggcgggaggagctggctcaccaccctgtggacaaatcaggccttataatttgtgattctgtggctttgtctaaaagtccctaaagcaccttgatatccagtctcacagactgctcacaacagtccacaaggctggtggggagtgcttcttttgaatgatatactaacgacaaaaataatagaagtgaacattctttgcaatgtccaagcagctagacacacttaagaccattaagaaagccaagaaataagacccagacaaggtgggcagaagttggaaggcaggagacaggtgtgaggaggtgggcctttctgatctgccagcccatctctcctccccttacttcctcagagtttatccagagattcctccctcgggagctccaaatcgtccgtaccctggaccacaagaacatcatccaggtgtatgagatgctggagtctgccgacgggaaaatctgcctggtgatggagctcgctgagggaggggatgtctttgactgcgtgctgaatggggggccactgcctgaaagccgggccaaggccctcttccgtcagatggttgaggccatccgctactgccatggctgtggtgtggcccaccgggacctcaaatgtgagaacgccttgttgcagggcttcaacctgaagctgactgactttggctttgccaaggtgttgcccaagtcacaccgggagctgagccagaccttctgcggcagtacagcctatgctgcccccgaggtgctgcagggcattccccacgatagcaaaaaaggtgatgtctggagcatgggtgtggtcctgtatgtcatgctctgtgccagcctaccttttgacgacacagacatccccaagatgctgtggcagcagcagaagggggtgtccttccccactcatctgagcatctcggccgattgccaggacctgctcaagaggctcctggaacccgatatgatcctccggccttcaattgaagaagttagttggcatccatggcta

SEQ ID NO: 705 - DNA, 4001 bp, Homo sapiens
acagcctctgtaaaccgtccagaacccgtccacagccagtgctctcttatcaaggggaagttactgaaatcagtctcttgtccaatcaaagctgtagttatggcttgtgtagggagggctcagtcagtttatggtaatgggtgagctgcaagtgcttcagcattgcttatctcaaggccagtgcttgtttagctagagaaaaaaaggaagaagaaaaaaacctgtggcaattggaacatagtttattctttaagttgaggggcgcatgactccaccttgcctggcgtggccttaggtctcgtttatcataccatatcttactactgcaaggagtctgttctgtcagtcttaggatctctattttaacaataatgctggtcagttgtgtctaaaccacaaagggagagagtataaggagaggtgtctgagattccaactactgggcaggaactcagtagttaagacttctctggggtctccttggccaagaaacagtctgtccagttggttgagtggctttggattttaattttagttctcaaagcatttaatttgatgaaattttgccatattttttctttatttttaaagcctgttatgttctataagaaatctttctactcaggatagtgaatgtattctcttaattttatctctctatgagttccagcgttttagttttaatttttaaattgatgacatctaaaattctactcctaaccaaaacattcctgggggtgaccaaggacaactccaaaaatcttccataaatggaagtaagacttactccttgaagaacttactgggatctgggcctgcagggcacagtggctttagtgcacctctgctcttacgactattcagaaattgtctttgtgaacccatcaggctgtttcaaaatcagcaatttagggcttgcttgcaacatgcagttatgcagcagctgttttgtggatctggtgagtgcctgcacgcatagttccccgggaattttctgaatttgaattctcatggtatttcaagtggctcagttgtctctttcttttcttttcttttcttttcttttctttttttttttttgagtcagagtcttgctctgtcacccaggctggagtgcagtggctggagtgcagtggcgcgatctcagatcactgcaagctccgcctcccgggttcacgccattctcctgcctctgcctccccagtagctgggactacaggcacccgccaccacgcccggctacttttttgtatttttagtagagacgaggttttaccgtggtcttcatctgacctcgtgatccgcccgcctcggtctcccaaagtgttgggattacaggcgtgagccaccgcgcccggccagttgtctctttcttttgcctactgccacacacgtaccaccaaatcctgcactccaagctgcttctacaccctggactcccaacctccagttagacaatccacatcttcccacacctgcctcaggctccatcaggctactgtgcctcctgcagcaaccaggccagggggaatctggattcctattacacttctgaggaaggtggtcagggagtgtggaggatgtgggtgggagggggtgaggttgagggcaggagtacactgtggtcttctgtcttctacctcattggcccaggtgctgctctccctccggttgtctgctttcagccctgcctgggaaatcaggccggcgccctgatcttcctgactctcattttgtgaggaacctgaacggatgagccatcgctcttgtcccacacgttctgtccaaaaggtgccctcctctctgcttgctcgggggcctgccctctgagctctggcactcaggctgggatgccgcccagtacagaggctctgcagccctgcaggggtctgactgttccacaccagcaggataaaggccacagggcatgctgtggtggaaaagcattcagaggtgtgggctgaaggcctctctttccacagtccctttgaagacaccatggaagtaggcacccccttgacagacaaggtggcccaaggcctggcttcacatgcaggctcttgggtcccagcgggtcctctctgtgcctggtatagccaactgcttcacgcatcttacccggtttcctctcctccacaacccaagctcctcctcgacccccttgctcagctgtcctcaggacagcaagatccccagcccttggaaaagcccatctctagtgcttggggagggagttgggttcaggtggtctaaccacagaagaacagagaacctgaggcaggaggaaatcccttcccttgctgggtctcttggcacagcccatccaggggtctgggtcagggtccaggtatactctaccctccttgaggacctgggttttcaggcccccgaggttggtcaatgtggagtctttcccactgttcatctgggaactgaaggaatatcccatggggccctctcttactcattagagacacccagaaaatactccatccagcagaaactgggtgcagtgtaccagaccactataattataattgcaggatgtggaggtcagatacgttttgtgggtattttctctctgtctgtggcttgcttgccttttcgctttcttagtggtatcttttgatgagaaggtgtggctaatgttgatgaagtctcatttatcatgtctttcttatatatgtattttttctgtgtcctgcttgttggtaggctaatctttgcctgccaacaagtcacaaagtatccttgaaatgctttatatctttaacttttaagttttggtgtgtaatgcggctgaaattacttttgtgtgtaacgtgagggagaataacattgttggtctccccacatccatatagaagttcattaattgaaatgatttattttcttttattgaactgcttttactgaaaacccatttattgaccgtatagctgtggatcaatttcaggttttctaactcaggctgtttatccgtttgtcactcttgatgccttgtgtctaatagcttatagtaaaccttaaagtcagatagtacaagtccttgttcttttccacacattgcaataaattttgaaatagataataactcatgaaaccatcacacacatcaggatatgctgtcacttcatccctttctgacatggtttggccgtgccctcacccaaatctcaacttgaattgtatctcccagaattcccatgtgttgtgggagggacttaggaggaggtaattgaatcatgggggcgggtctttcctgtgctattctcctgatagccagtaagtctcactatctgatgggtttctcaggggtttctgctttggcttcttcctcattttctcttgctgctgccttgtaagaagtgccttttgcctcccgccatgattctgaggcctccccagtcatatggaaatgtaagtccaattaaacctctttttggtcctggactctgttatgtatttgtcagcagcatgaaaacggactaatacactctcatttctgagtgggacacatgctgtcactcacatatgctggttgctgacttgtgacggaagattctctattgtaccctctggggacaatacatctccagttgcctgcggggaggatgaaccctcaagagtcaatgtgttgactgactctaaatatgggttcctggtgctccatgctcatgcagccatagggaaggaaaggggactatcaagagccaagggatcccccatacgactttactcagatcttggaacttttagatgctgtccaactcccaaagaaataacaattactcactgcaggggacaccagaagggagacacttttattattagaggaaattccctggtggaaagagcagctaaggccacaactaaggaaaccctggtatttcaagctgctgcgctactaccaggtactgcatccgtgtcagtgacaccatactatacccctaaggaaattaaagggactgagtaaaaggcttccagggagacccctctgg

SEQ ID NO: 706 - DNA, 4001 bp, Homo sapiens
tttatcataccgtatcttcctactgcaaggagtctgttctgtcagtcttaggatctctattttaacaataatgctggtcagttgtgtctaaaccacaaagggagagagtataaggagaggtgtctgagattccaactactgggcaggaactcagtatttaagacttctctggggtctccttggccaagaagcagtctgtccagtggctttggattttaattttagttctcaaagcatttaattagatgaaattttgccatattttttcttttttttttttttttgagacggagtctcgctctgtcgcccaggccggactgcggactgcagtggcgcaatctcggctcactgcaagctccgcctcccgggttcacgccattctcctgcctcagcctcccgagtagctgggactacaggcgcccgccaccgcgcccggctaattttttgtatttttagtagagacggggtttcaccttgttagccaggatggtctcgatctcctgacctcaggatccacccgcctcggcctcccaaagtgctgggattacaggcgtgagccaccgcgcccggccttttttctttatttttaaagcctgttatgttctataagaaatctttctactcaggatagtgaatgtattctcttaattttatctctctatgagttccagcgttttagttttaatttttaaattgatgacatctaaaattctactcctaaccaaaacattcctgggggtgaccaaggacaactccaaaaatcttccataaatggaagtaagacttactccttaaagaacttactgggatccgggcctgcggggcacagtggctttagtgcacctctgctcttacgactattcagaaattgtctttgtgaacccatcaggctgtttcaaaatcagcaatttagggcttgcttgcaacatgcagttatgcagcagctgttttgtggatctggtgagtgcctgcacgcatagttccctgggaattttctaaatttgaattctcttggtatttcaagtggctcagttgtctctttcttttcttttcttttcttttcttttctttttttttttttgagtcagagtcttgctctgtcacccaggctggagtgcagtggctggagtgcagtggcgcgatctcagatcactgcaagctccgcctcccgggttcacgccattctcctgcctctgcctccccagtagctgggactacaggcacccgccaccacgcccggctacttttttgtatttttagtagagacgaggttttaccgtggtcttcatctgacctcgtgatccgcccgcctcggtctcccaaagtgttgggattacaggcgtgagccaccgcgcccggccagttgtctctttcttttgcctactgccacacacgtaccaccaaatcctgcactccaagctgcttctacaccctggactcccaacctccagttagacaatccacatcttcccacacctgcctcaggctccatcaggctactgtgcctcctgcagcaaccaggccagggggaatctggattcctattacacttctgaggaaggtggtcagggagtgtggaggatgtgggtgggagggggtgaggttgagggcaggagtacactgtggtcttctgtcttctacctcattggcccaggtgctgctctccctccggttgtctgctttcagccctgcctgggaaatcaggccggcgccctgatcttcctgactctcattttgtgaggaacctgaacggatgagccatcgctcttgtcccacacgttctgtccaaaaggtgccctcctctctgcttgctcgggggcctgccctctgagctctggcactcaggctgggatgccgcccagtacagaggctctgcagccctgcaggggtctgactgttccacaccagcaggataaaggccacagggcatgctgtggtggaaaagcattcagaggtgtgggctgaaggcctctctttccacagtccctttgaagacaccatggaagtaggcacccccttgacagacaaggtggcccaaggcctggcttcacatgcaggctcttgggtcccagcgggtcctctctgtgcctggtatagccaactgcttcacgcatcttacccggtttcctctcctccacaacccaagctcctcctcgacccccttgctcagctgtcctcaggacagcaagatccccagcccttggaaaagcccatctctagtgcttggggagggagttgggttcaggtggtctaaccacagaagaacagagaacctgaggcaggaggaaatcccttcccttgctgggtctcttggcacagcccatccaggggtctgggtcagggtccaggtatactctaccctccttgaggacctgggttttcaggcccccgaggttggtcaatgtggagtctttcccactgttcatctgggaactgaaggaatatcccatggggccctctcttactcattagagacacccagaaaatactccatccagcagaaactgggtgcagtgtaccagaccactataattataattgcaggatgtggaggtcagatacgttttgtgggtattttctctctgtctgtggcttgcttgccttttcgctttcttagtggtatcttttgatgagaaggtgtggctaatgttgatgaagtctcatttatcatgtctttcttatatatgtattttttctgtgtcctgcttgttggtaggctaatctttgcctgccaacaagtcacaaagtatccttgaaatgctttatatctttaacttttaagttttggtgtgtaatgcggctgaaattacttttgtgtgtaacgtgagggagaataacattgttggtctccccacatccatatagaagttcattaattgaaatgatttattttcttttattgaactgcttttactgaaaacccatttattgaccgtatagctgtggatcaatttcaggttttctaactcaggctgtttatccgtttgtcactcttgatgccttgtgtctgatagcttatagtaaaccttaaagtcagatagtacaagtccttgttcttttccacacattgcaataaattttgaaatagataataactcatgaaaccatcacacacatcaggatatgctgtcacttcatccctttctgacatggtttggccgtgccctcacccaaatctcaacttgaattgtatctcccagaattcccatgtgttgtgggagggacttaggaggaggtaattgaatcatgggggcgggtctttcctgtgctattctcctgatagccagtaagtctcactatctgatgggtttctcaggggtttctgctttggcttcttcctcattttctcttgctgctgccttgtaagaagtgccttttgcctcccgccatgattctgaggcctccccagtcatatggaaatgtaagtccaattaaacctctttttggtcctggactctgttatgtatttgtcagcagcatgaaaacggactaatacactctcatttctgagtgggacacatgctgtcactcacatatgctggttgctgacttgtgacggaagattctctattgtaccctctggggacaatacatctccagttgcctgcggggaggatgaaccctcaagagtcaatgtgttgactgactctaaatatgggttcctggtgctccatgctcatgcagccatagggaaggaaaggggactatcaagagccaagggatcccccatacgactttactcagatcttggaacttttagatgctgtccaactcccaaagaaataacaattactcactgcaggggacaccagaagggagacacttttattattagaggaaattccctggtggaaagagcagctaaggccacaactaaggaaaccctggtatttcaagctgctgcgctactaccaggtactgcatccgtgtcagtgacaccatactatacccctaaggaaattaaagggactgagtaaaaggcttccagggagacccctctg

SEQ ID NO: 707 - DNA, 4001 bp, Homo sapiens
caattctccccggccgctagattcttctcctacaagaatgcctctccagggtcatttttttttgcacagggaagaaggctagagggaccaagggcaaggtcactgcctccaccctgcccagggtccaaacccacccctcctgatttcttgaaacttctcctcccttctcttgagaggatgttttgggagggaatgaggaggtctgtgggcaaagagactaggtgtaaagcatagggggcgggtccacaatggcaggcccgggaaactccgggtgtggggagagaggaacaccccccaataaccaagggcgtatcaggcatcaccctgagccaaaatgaggcggcggggcggacaacacggagaccacgggggagacacgggccgggggccggggcagccgaagcgggcagggccggggttggaggctgtgagtctggcgggtcgggcctggggctgcgagtcctgtccttcggctctcagcgcgcctggcccgcccgctccctggggccggccttccagcggcggggctgcgcgggcggcgggggcgccggggcgccccgcaggctgcacgtcctcagctcccgggccaggctgagcacctccggccgctcgcgctgggggactcctccctcttgctcctccgcgtcgtcctcctcctcctcctcgtcctcctcctggatgctgctgaggcgcggcgccccgcggctgcgctcgctcggcggcggccggtaggcgcacttggcattgagcaggcggcgcagtggggcgcggggcaccgaggcggcggcgcccccagcgcggagatgctgctggcgcacgtggcgcgcgtcgctctggcgctgcaggcgcttgaagtcgctgaaggccgccagcgcggtctggcggagcaggcgggccagggcgcgcgccttgtgcgcccgcgccagcagcacagcgtggcagcgcagcaccacggccttgtggcgcgcctggtggcggtagacccaggcgaagacgcgcgggtggcgcccgtccgccgtgcagtaggtgatgcgcggcagcaggtaggcgtgcgccggcctgcggccccccgaacccccggcggcgctgcgctcgcacggctgcatgcggatgccgtgcggccccagcgtcagcttcatcttagtgcccccgccaggcccgcagcgagcccagatcttgcccacggcgtcgtcggtgcagccgtcgcccttggcgtgcagggtgacggcgttgcccaggtaccacacggtgtaggtcgggtcctccttgttgagctccactttctggcgccggctgcggaacacacggcccaagcgctccagcggccagtcgggcagcaggtccgggcaggagcgcaggaagctggagagcagcgacgtgtaggcgagccccggactcaggctcttcgccttgcacttggcctcgtcctccaccagcacgaatttgttacgtctccagggcagcatcgcggcggcggcgaaaggggctgggggcgcagggagctcaccggcgtcctgtcgggagaccgggggagggaaggcgcgcagaagtccaccgccctggagtcgcgagaagctgggcagggccggggacagtcgttgcctggagatgcccagtgccaggcagggctagcttcgcagatgcccggtgcccagccgggccagcagccgaggtgcggacggcggccgagtggctgaggaccgcttttcccgggagtgtctccagccgtctgggaagcgaggaggggccggggctgggggtgaggtgggctggacgtccaccaagcccaaacggtgggatttccgcggtccctgccgccgcaatttgggtcgccggagccgctggcggctgcttagtggggcagaccgagagcgcggctgcggtggggactccttcaggcgtcgcggctccacctccccgggctgcctacatcaccgggcgggaccgctagctctcttgtcccctccccttgccctcttctcccctccccccacgcaggctcgcgctgcccgggaccctgcacaggcgcggtggaacgggtttaatcattattagtggaggggtgggggtagagagggctgttaagtactaggaatcccctgaaatatacaggagggcttcgtccatgctaatttatttggcctcgctactggtctccaagctccccttggcgcattcgggaacccccgcgccccacgattcctgctgcccctcacccacagcatgtcattacccccatctctgagagtgggagttagggggtgttcctgaaggggctggcctggcgcactttgcctcgtctgcacagcacaaagccagccgaggtggccgagcagtgcagtggaaaagtactgtcgcttggtgaagctttctcccaggttcttccaaggtcgtgggccagaccgctgggcctgagctgagagacctggccgctgctgcagtggctggcagtgcccctcgcctggtctgaagcagggagggtactcttggagggtgggggaaactttcagaacagggtctgtggtaattgcagttgaaaagctccttctggcgaaagggcagcctctgggcgcatgattaaataaactcctatttgtgaactcctgtgagttcccaggggtttagcattcattttcttatttaattcttggaacaagcccaggctcagttaaatgactggcccaaggtcttcaggctggtaggaggtaaaactagggctccactcaggccctggtgacccaggggctgcccccaaccctccatgctccccgggacctcctaatgagaagtgatgaggacctgctagggaggaagttctgatatactgagagacagttgtccctgggtgtggggacacagctccctctttcaagattggttaagccacaagctccctagaactccaggactgctctgatatgaccaggagtcttgttgccttgggctctcacagagtcaacactcaagctctttccttggcttctgaacaggtcatctggggtggtgtccaggtcaggagtgaacccaggtctgggctggagctgaattgagagcttgggctgggccaagccaaaccacatgacctccgagagtgggagcagtgggaagatttgggaagacagtgtgtgctatctcggccagcaacatcctgccagtgggtaggagtgagtgtctgggtcagaatccctgggggaatataagtaaaataacaaaccacaacaagaaaataatatgcaaataaagaacaggaaattactccgaattgcagtatctttggtttggagggtgcctcccagatgatctggttggttgtagcctcggttcatttttaatatggaaatatctttatcaccttttgctgattataaaaggaagatgtgcttgtggtaaaaattcacagaagaaggacatgaaagtaagtctcctactgttccccaccctgcagatgtggtctcatttcccagggggagagaacaggctctgagaagccagtgatcattgcagtgctttccatggcgctacatttgtctcctgggccagtggagacattaactcaaccaaatccctttatggaaaggacttcatgtggttttgacctgaaagtcagttcactgtaaaattctgccgtatcctgtcttgagtctcctagggctgttctctggaccttgccactgggggttccctctccccgctggcagtgggctggtgggagtgctcagaagcaaagcctcagcttgcaaggcagagaaaactgcaagctttttttttttttttttttttttttttttttgagacagggtcttgctctgtctcccaggttggagagcagagatgactgctcactgcagcttgacgtcccaggcccaagctatcttcccatctcagcctcttgagtagctgggaccataggcatgcaccaccatggctggctagtttttaaaatttttctgtagaggccgggcatgatggctcatgcctgtaatcccagcactttgggaggc

SEQ ID NO: 708 - DNA, 4001 bp, Homo sapiens
tgaagggatggaggctgagtcctagtcacatctgtgcccttggtttcctaaacagggcttggcacagagcagacaccaagaggcaatctgagccatactgacagggcaaggacttctcctccttccagggtatcccttgttcttgcagaggggggctgccacactgggctccaccttcccctccctgccatgcctggggccacaatcctggaggtgcagcagctggggccccaggaatgacttgactgtcccggggattaaagcctcgactggtttcctaatcacccaggtgacagcgagcagccgaggaatgcctcggcgaactccactgggccgcgtgtgagtcagccaaggagaatctgcccccgccccctccagttcctagttccttgggagggtgggggaggtaatcccccagcaggcaaccctccccctctgtgggaagccaaggtagtaggaggcaggggaaaggcctacttcatccaaaggaagccatcagttggcaggaacgcacaggagtcctcgctgggtttcttggtttcttttatcaaaggaccctccctaacacctagaagttgaccttgggagccggggaaggggtgggaaaacattgaacctactgtaatctgctcctgggaagacccaaaattccctaggtttgattttcacctcattaagtaatcttgggtggcaaactgccccagctataaaatgggtacaataatgaccacactgtggtatttcagaacatgacagcgtctgggctgtacagatgaaaaagcagtcttggggtcgttgaggttcagataaagggaagagttggaggagggaggggctgtcagaattctcttctccctttcctcaggagagagaggacgtggggcctgaggcctgggttggccttcatttccaatcttgggaaggagaagaaacacctaaattggtcacttaatgttgcccttgggggtggggtatcaggtctgaccttcggcttaataaatattgggccacaaccccagctgagagagagggagtccctgacaagttttcttggcttttccacggggtggagggggaagggggggtttctccagcaaaaggctgtaggagcacaatggcagaggctgctcctagaacctcgagagaggaaaggagggtgaggtccagggatgcccagatagggaaggaaaagctattttggactcaagcatgcacacttacccacccagggccacctggcgtcttttgtccttgcaggcagagacaaattcttcccccaatgcccttgacatcctcctcccctctcccagccaggccctgggtgagtgatccgtggggaatcagggttctccaagagtcgagatggaaaagccaggtggggaaggattagtagatgcagggggaggtctggtctaccattcataatgctgtgcaattgttacagccatgtccccgttcctcagtttccctagctgtctagaaagtcaaacagactacaaatgccttccagccacgagagcctcagaagggattcccccacatcccccgcctggcgtcctctcacctgcacgatctgccggggctgcacgctcagcgtggggaagttgccgcgcccgtgaatgggaatcggctcgctcagaagagcgtccagtcgcttcacctgtggccagctcagcccactcaggtgccgtccggggaaggccgataaggcctccgggtcggggccgccgcctgccggggctgccgtggccaccgccgtggccgcagccgtccccacctgagcagccgcccggtccctgcgctcagctccgctctccgacggcatcatccgcccggcccccgggccccgacggcagaaaccgtgggggtggttaaggggaggaggacagggagagcggctgggcaggggccaaggcggggggcacgaaggcagggacggggcggcaacgacggcgagacaaagccagggaacacctcagacggcgacgactaaccgaccctagcgcctgcagcccgcggcccagcggactcttataggccgcgggcgacgtgcccattggtccgggccgctgccaacagcgagagccgccccgcctctgaacgctccggacactggtctgtagagctttgcacgtgagtcactgttctctagggagattccgattggctagagggcacgcccctgccccgccctccttctcaggctgaattccctcctttggtccttaaagaacttctgttcactgtgattggcccgggcctggacttaaagggacagcgcccaccccgccccgccagggtcaggagggagggaagtgacctgcggagtttgtagcagagtcagaccactgagaaattccaggtttctgttttttttttttagcgctggaagaaattgagaagtcacctagccttgtcctgctattttcagaagcccaaagagattgagccacgtgatcaactctgcacagcactgctcatgctctggcagttttccagagcctaggaaaggtataataaacaactctgggcccggcgcggtggctcacgcctgtaatcccagcactttgggaggccgaggtgggcggatgacaaggtcaggagatcgagaccatcctggctaacacggtgaaaccccgtctttactaaaaatacaaaaaattagccgggtgtgtggcgggcgcctgtagtcccagctactcgggaggctgaggcaggagaatggcgtgaacccgggaggcggagcttgcagtgagccgagattgcgccactgcaccccagcctgggcgacagagcgagactccgcctcaaaaaaaaaaaaattaataataataataaactctgcataccaaggtaaaggcctttttttttttttttttttttttttttctcgagacagagtctcgctttgtcacccaggctggagtgtagtggcgcgatcttggcttaccgcaagctccgcctcccgggttcaagcaattctcctgcctcagcctcccgattagctgggattacaggcatgcgccaccaagcccggctaatttttttgtgtttttagtagacacgggggtttcaccatattggccaggctggtcttgaactcctgaccttgtgatccacccacctcgacccccaaagtgctgggattacaggcgtgagccactgtgcccggccctaaagtaaaggctttctaagacactgttgattggcctcgcaaaccacagcatgatgagcgttgatgtacagcatagccaatttagggaaggagagatctgctcagagaggctttgtgattacccgactgtcacacagcaaactagtaaggccctggtcctcaaccagggctatagaatctgtggtgcatgttttttccactgtacctatgcagacccagctcctttctggagctagagaacgaataatgtgtttacatgtttttctgcaggtctagacaaaacataatttaaaaaaaatatgtttacatgttttgctctcacactttacaggacctaggggatgaggcttatgattgtcgttacttttattttttatttttatctatttatttattttttgagagagggtctcactctgttgcctggactggagttgactgtcatgatcatggctcaccacagcctcaaccaccctggctcaagcaatcctcccaatcccagcctcctgagtagctaggactacaggcacacgccacagcacccagctaatttttctgtttttttttttttttttgtagagataagggtctggccatgttgcccaggctggtcttgaactcctgggctcaagtgatctgcccacttcagcctcctgaagtgcagggattacaggtgtcaactactgtgcctggcctgttattacttttatttttccccaacctcacctgttgcttttaatttttttttctgattttaaacatgtgctgtagcaaaaattcagaaattgagtctatctgattcattgctgcaattttttttcttaaa

SEQ ID NO: 709 - DNA, 4001 bp, Homo sapiens
tgtactctaaagctatgggtataccttaagagaaaaagttcattatctgaaataaactaagcttgactccagagatcattttccatcttcacaaacaagaatgtcaaaggacagaacccctgcagcccagctcagaggtttccctaaaagcccagagaaaagtcagcattctttactccccatccccctcccccttttccactgcagggcctaacgtggctggtctcacaccctcaataatacccttggggatttaagacagtaaaattctgggtaagctctcctaccactcttgcggctgcccaacttacttcctgggctcatttccttgccaatttactcacgttgaaaggttgctgtcgccaacaacggtcaccctctttcctgcacgcagagggcagctgagccagccagaagtgtactttgggaggatctaatcaccctaactttatttcctgggctggttcagtctcctaacccacctacaaagtaacctgaagaccaagttgtcacaatacaaataattatgcacatagtatttataaaagctttcttactataagtgcattttaagcacttcatttgtatgcactttatatctccgtaagaaagcaaaaatgttaaaaaggaagcaggcccctacttaattaagccagggaactggttagagccctacaaaagcctacctatggacaaaaaagggcgaaggggaagggagctgacactatccctcccgcagggtccagccctaatagtgggttctccagaagctcgccaggcattcatttctccaggggagcgcccttacttggaggtagcgctgcttggttttctcgcccgccagcgttgagttcaggtgtgcaggctaccaacctgtattcttcaggtaagtcaccctcctctgactcgcctcccaccctgctccctcctgcctcgcgaccagtgcgaagggagtccccgaactgcgacacctcccggggcagccgcaccggtatccgtccgagtcgacccacttgccgtggcttttcacctacgcagtaaagcaagtttcattttcaaaaggagaggaagcaggtttcacagacaccgcattcccaagaagtttctgagagacgcgcagcgcacaagtcactggcttggatccctttgctgctcatggtgtccacagtctgatgtgagcgcattaaatttaaggatctccgcccttctccttaaaactcaggacttggcaatgagcctaggaagcgcccctcccctccccaaccagatccaagccccggaccgctgcgtctccagctgcgcctagtgaaaccgccgaattcgaattcacactcggcgggccggcgaaggtgtgcgcgcccgcgggagcgccggggcgagcccgagggactgcaagccaggaagggaggcatgggtggcggggggcgccgtctgatccaggtaggagcggaggcgccgatcacacactcttcagacgccctgcccgcgcctggccagcgcgcagcctgcaggacgcgcggagcaggaactcgctggagtttgccaagccccaggtctctggaaagttgtagctccctttcggagcgtctcttctggccctttgggacgggtgtgtcaggggcgggggtcctcgagggagcaggaggggaaaggagcaccgggtctcggcacctgtccgcagctcccctcgggtccgcctgccccctaccaggctgggcaaagacctgagcaccacttagtgggggcggacccccactaagtgagctcgcggctccctggggctgctgccgcatcgccgcacctttagaggaggggggtcgcggactcacctgggcaatagaagaggaggcgacagaggcaggtccttggcgtgggcaggccccagcaggagcggcgcgacctctacagcccctaggcagcggcaccgagtgagccgtcccgccgccgccccctccgttcttatacggcgggaccacgcccccgtccccgcccctgagccgccctcccgggggagccaggggcggggcgtggcggagccagtcccctcgggacccttccgcccggccctgacggcaggggcggggcgagggctgccctctgattggctcttcgggtgaatggttgccaagagacgagtaaatcctcagcggcgggaaggggcggggtgctcagggaggcagcactgcgcaagcgcaatagagggggctgcgtcgacacccacttaacttcggagttagtgggacacctttctttttgcttagtacgcttttctgctattcctgccgcataactctctcttccccaggcttttcccatctccatcctattctctcgcaggcaggtttttcttccgcctctctggggattttcgcgttggttctccctgcccccaggagtgaggcgggtaacgcccacgcctacctccggtgtgtgtttttgaagtcggaaaaaacttaatggtttctgggccctgggcacctttctgattccccaagcaaactggctggaggcgaaggcgtggtcttcggggagagagcgccggcggctctctggccccggggaccacctgtgtgcagttagtgggacgaagggcctcggggagtccatcgccaatgtcggcagccgcagccgcttcggccccattcggaatgccacagcacttggtccagtgtgttatataacatgcaggcagggcttggacaccatccattcataacatagcgagtggtttacagcccaggttctgaattcagactaatctgagttgagatctccatgcaccacttaaactttctgtaaggccttaggcaagtaactgaaccaaccctccaacaacctgcgtctcctatctgtaggacaagactaacaatgggacagctctgtagaattatataagtattaagaaaatacgtgggaaacaattagtgcattgcctagtgcctgttagaaagtgtgtggcaaatgctgtatgtatcagatagtagccaatgttggacaatgttatttatcaatagacattattgtacttgtattgatcgtttactaggtgctgggggaaaagattacttcccagatgcagtatttacatctcctccgccctactcttccaaccctgcctgaaataagtgtggttctcctgtctgtcagactatgaagagttctcaaatatgtctttcccagcgagggagaggagagtgagtatccaggaactttaatgcgataggacatcaatatgagtgtttatagggaaagccagtgatcctattgttagacgcgaaatcaagacatatgatctgattttttgttttactttttgtttttgaggtataacattcagtaaagcgcacaaatcaaaagtgtccagaatgataattttttacatatgcatacccatgtaactgccatccatatcaagatgtggaacctttccagctcattcatgccccttcccattcagtatccgacaaggattaccactattttaacctctatcaccatagattagttttaccaatatttgaacttgctatggatgaaatacataacacgtacaattttatgtctggcttctcttgcccaacagtgcgtctatgagattcatccatattgttgtgtgtaacaatggtccattctttttcactactgtgtattacttcattatataaatattcaacgatttgtgtactcatcctactgttggtggacatttgagttgcttcatgtttctgcctttgatgaagctgctgcagacattcttacacatgtcttttggtggacatagcattcatttatgttggatatatatatatacctaggattggattcctggttcatagagtgttcacatattaaactttaaatacactgccagtttttaaattcgtataacaatttaggttccaaccagtgatatgagatttccggttgtttcacatctttgccagtattggtattttcagtctttttaatttaaaaaggggggggatatgtatttcattgtg

SEQ ID NO: 710 - DNA, 4001 bp, Homo sapiens
ataggtgcaatgaagggggctgccagtgccagctgccttccagctgtcaacgcctgagcttatacaggtttacacagctttataagcgacggtccaggctgggttgtggccacttccggactcacgcccagtactgggggcactggaggagggtgaaggcaggcagggacacagccaaggtgctccaggtcgctcagagagtcttcaggattcctgagtcgccgagtctatggcatgcgctccgggccctgactacaagctggttttcaaaggaagtttgtggtttttcttttcttctctctctcttttttgttctcatcaggacgaagaaaaattaggcaaggacaagctccctggaggaggaggggcctgcccagcgctggtggatttccatcaggactttctgacccggtcagcagctttgtgatcagcagagagggagcgagaaacaggagagaaaaacaacagaccctttctcttccctctgcctgcctctagaagggacggagcgcttgtgcctctctggtgagaatagggaagagcaagtgcccttgctaagtagggaggagaagggctggacagaagcagcttgttggatctgggctctctctctgggtatggcagtcctttgctctggatccacagaagcaggagcaaagagcacgatatttgcatgtattactcaattaatgttaaaaacaaacaaacaaacccagctcttttccctctggagccctccagagagctcctttccaagtccttgctgtatcatttttaagtctagaaatgaaactggttgggttgtgcacctggtagagtgcagagggtgtggtagaagccccaggctctgggcgcgatggctgacgcctgtaatcccagcactttgggaagccaaggcgggcggatcacaaggtcaagagatcaagaccaacctggccaacatagtgaaaccccatctctactaaaaatacaaaaattagcagggcatggtggcacatgcctgtagtcccagctactcgggaggctgaggcaggagaatcgcttgaacccgggaggtggaggttgcagtgagccaagatcctgccactgcactccagcctgaagacggagcaagactccgtctcaaaaagaagaagaagaagaaaagaactggcagagcaggcaggagatccaacacgcctgtgctctggatcttggttccactgcaggcctctcatcagtcacctcctctcgatttacagctggggaagcaggaaaagctggtgtgaggctgacggtaggaaataaagggatagataaataaatgagggaatttttgatgatgagtgtccatttatttgcagtacctgcactactctgcggctggaaagtggcagttaagggaggttggaacctaactccacattctgaagggttccctaaactctatgtacagggccgccacaggatgaaatttcaagcaactctaaaggctgaaagagcaattggaacaattagggtggcagagagcaaaaagccaaggttacaaccgtccaagaaaggaagaagatatttgccgaggctgtagaaaaaaacaggctacagagttgcaaagggagaagcagcaggagttggcaggagactgtaggtgttaacaagaggggtcaaagattattctaatgttctcctaacatgaacaaccacaaaattggtggcgactgagtcagtttggtaaagggcagaatttgtagaaagaagatgatctgttttgccaagtgtcatttaaaatgtcaccagatgctcggtgtgatatatgtaaagatgttatacttggcctgatctgagagggaaagttcagatgccacaataatgggttactgtgacacatacacatttgtttaccgaacgactgatccctcagaaaacaatccttccctcggttgctagggacattgcggagttgcgggactacgtttcccacgtcgccccacgccacgcccccttggcctcgccggaaagacgtcccaggagcctctgggcgtagagccccgcctccgccgctgggggcggggcgacgccggactccggagcgcccgcttacgcagttcctcccggggtcggaggccgattcgccgtgtggcgggttcgagtcccgcctcctgactctggcctctagtccctgagtcccgggcgggctgcattcgtcggggaaacctctcctcgaccaggggcacctctactcgaccaggggcgacggcgtactttgggcttcatcatggaggactacctgcagggttgtcgagctgctctgcaggtaacgaatccctgtctgtgactgtaaggaatggagcacggggtccaggaaggacgaagacgtgggatctgggggagcctcgacggtccgtgtggagggaacactgagttgtggggaggggggttggggcctgatcagttttggggcatgaggagcgaggagcgagaagccagtttaggagcgtgagaatgctgcttgttcagtctcccggtttttggctccccgcctttggggtccgcctgagagcggggagaagtcttgggtctgaatcctgcatttgagcctctgcttgctgtcatcttggtcagttccatcaaaaaaaccaggactgtgccgccgccagcctagccccgcgaggtgtgtttattcttttctccccgcccctctttgagttctccgctcccaaggcttcgcttggcccactggcctccaggtgaacctcgggggtgtggagggaaccggtgctcacggccttatttcctccgaatggcagtttctgtctggcgggctgaactcatttctaggttagaagtagtcacagtattttactttaagtcagtgtttttaagccaaacatacaaaatccatcaggcatatttgttgacccacaaccagcattcctttgcctccaggtttctcctttggccttaacgcacacaaatgacataaaaattctccacttggaagggataagcacaaagtgtgtttggaatcaaaaccataaatatgactactcaatgctttgtggcttatttttggtgctctctgactcagttggactcacccagccatgctgagccgtcatgaggcattaggctgttatccccagttagcagcaaaaagctaaccagagacaggctccaggaggtcacccggcccctctactttgagttatactgccctgaagaaacctagatagatggcttgctgagctttcctttttagatatcttaaactctacaaattcccctgagggacagattctggtctttaacaaatcctgaaagtcactaattcctgctgcagactcagctgctggaataaatgaattgtcttcatattgaattggggagaaggtccattttaacaccaattacatagacattttccttgtgaaaaacaaatttggggagttatttcaatgcataaggccatttggaaccaatccctttttgttacctctgagtccaccacagggcgcttattggaggactaatgtagagtttttggggcaccgttctaagtgctaaacagttggattttaccccccagtaacccaaatgactggtctcttccaccatttggtaaagtgcccttggacctgaaacctcaccaaatagtatttctttgcatgcatctactctccagcatatatcctccagagcctcccccgacccccaggttagtagtatattctctatttttattttgtatttgtttatttattttcagccagggtctcactctgttgccctggctggagtgcaatggtgtgatcacctccccggctcaagtgatcctcccacctcagcctcccgaaaaagctgcgactataggcagtgccaccacgcagggctaattttttgtatttttatagagacagggtctcgccatgctgcccaatctggtttcaaactcctggactcaaacaatccccctggcttggcttcccaaggtgttggaattacaggtgttagccactgtaccc

SEQ ID NO: 711 - DNA, 4001 bp, Homo sapiens
attaaagttactgaaacaaaataagcctagtcactcaaattgattatcctcttgattcacatatgtttatgctagctgcatatcatttacgtgttgttaatttagaatcagagtagcaaaaattgcctgcaggccttatgcttttttttctctctctttctctctctcctttccttctccccttaaatgacacttagggtgaacctcaaagcagatgccagagcctggaaaagtgaaaaagcttgaagaaaagcaggccttggccgggcacagtgcctcacacctgtatcccagcactttgagaggccgaggcgggcggatcacctgaggtcaggagctcaagatcggcctggctaacatggcgaaaccccatctctactaaaaatacaaaaattagccgggcacggtggcgggcacctgtaatcccagctactcaggaggctgaggcaggagaattgcttgaaccccggaggtggaggttgcagtaagccaagattgtgcctctgcactccagcctgggtgacaagagtgagactcttgcctccaaaaaaaaaaagaaaaaaagaaaaaaaaaaaagaaaagcaggccttattttttatattttctctccagtgccagaaatgatcaatgatgaagtgggggttgggcagctagctggctggagaggtgagccaaaggaacccaggagtggacacctgagggagtggggtctcagaggaactgggcagagctaaatgggctaagtcttaagaggcaggggcaggaaatgtaatggaggctttctactctacaacgtccaatcctgctggggagggcatggagtatttcagagtaggaaagaatgagggagaggatagtcagataaatcaaagtttcattcttttcctcctctttcttagctcgtcaaatcctacactttctctccagctggaattatggtggtgagtgagggagttaaaataatcctggctcctccctaatcaatggcagtagagagccgaaagttggaagaagcacgtaaaacaggtatgtagcttcaagaagacactccttctctgtaggaacagttcccttactgtctcacaccaatctccttcttagtctgacctatgtctttgtgcaatcaatagtttagattttcatctcagaatatgtcaaccatggccacagtgccctgtatacttgctcacaaggagagggggaaggtttcgtgctttcattaaaaggaggaggaccaagcagcatcccctttacatgtctctcctgacttagctcctctaagcaatccagacttgcagaccaaaggtggaaggacagcaggtgtcagctccccaaagctggagaggaaatagagaagggtgggagaagaggtgaagaagatgattaaaataaagtttttaccttaaagaagggggtgctgttccaagattgagaaggagggttcagccgtggcaatgagatgggggagataggtgcaatgaagggggctgccagtgccagctgccttccagctgtcaacgcctgagcttatacaggtttacacagctttataagcgacggtccaggctgggttgtggccacttccggactcacgcccagtactgggggcactggaggagggtgaaggcaggcagggacacagccaaggtgctccaggtcgctcagagagtcttcaggattcctgagtcgccgagtctatggcatgcgctccgggccctgactacaagctggttttcaaaggaagtttgtggtttttcttttcttctctctctcttttttgttctcatcaggacgaagaaaaattaggcaaggacaagctccctggaggaggaggggcctgcccagcgctggtggatttccatcaggactttctgacccggtcagcagctttgtgatcagcagagagggagcgagaaacaggagagaaaaacaacagaccctttctcttccctctgcctgcctctagaagggacggagcgcttgtgcctctctggtgagaatagggaagagcaagtgcccttgctaagtagggaggagaagggctggacagaagcagcttgttggatctgggctctctctctgggtatggcagtcctttgctctggatccacagaagcaggagcaaagagcacgatatttgcatgtattactcaattaatgttaaaaacaaacaaacaaacccagctcttttccctctggagccctccagagagctcctttccaagtccttgctgtatcatttttaagtctagaaatgaaactggttgggttgtgcacctggtagagtgcagagggtgtggtagaagccccaggctctgggcgcgatggctgacgcctgtaatcccagcactttgggaagccaaggcgggcggatcacaaggtcaagagatcaagaccaacctggccaacatagtgaaaccccatctctactaaaaatacaaaaattagcagggcatggtggcacatgcctgtagtcccagctactcgggaggctgaggcaggagaatcgcttgaacccgggaggtggaggttgcagtgagccaagatcctgccactgcactccagcctgaagacggagcaagactccgtctcaaaaagaagaagaagaagaaaagaactggcagagcaggcaggagatccaacacgcctgtgctctggatcttggttccactgcaggcctctcatcagtcacctcctctcgatttacagctggggaagcaggaaaagctggtgtgaggctgacggtaggaaataaagggatagataaataaatgagggaatttttgatgatgagtgtccatttatttgcagtacctgcactactctgcggctggaaagtggcagttaagggaggttggaacctaactccacattctgaagggttccctaaactctatgtacagggccgccacaggatgaaatttcaagcaactctaaaggctgaaagagcaattggaacaattagggtggcagagagcaaaaagccaaggttacaaccgtccaagaaaggaagaagatatttgccgaggctgtagaaaaaaacaggctacagagttgcaaagggagaagcagcaggagttggcaggagactgtaggtgttaacaagaggggtcaaagattattctaatgttctcctaacatgaacaaccacaaaattggtggcgactgagtcagtttggtaaagggcagaatttgtagaaagaagatgatctgttttgccaagtgtcatttaaaatgtcaccagatgctcggtgtgatatatgtaaagatgttatacttggcctgatctgagagggaaagttcagatgccacaataatgggttactgtgacacatacacatttgtttaccgaacgactgatccctcagaaaacaatccttccctcggttgctagggacattgcggagttgcgggactacgtttcccacgtcgccccacgccacgcccccttggcctcgccggaaagacgtcccaggagcctctgggcgtagagccccgcctccgccgctgggggcggggcgacgccggactccggagcgcccgcttacgcagttcctcccggggtcggaggccgattcgccgtgtggcgggttcgagtcccgcctcctgactctggcctctagtccctgagtcccgggcgggctgcattcgtcggggaaacctctcctcgaccaggggcacctctactcgaccaggggcgacggcgtactttgggcttcatcatggaggactacctgcagggttgtcgagctgctctgcaggtaacgaatccctgtctgtgactgtaaggaatggagcacggggtccaggaaggacgaagacgtgggatctgggggagcctcgacggtccgtgtggagggaacactgagttgtggggaggggggttggggcctgatcagttttggggcatgaggagcgaggagcgagaagccagtttaggagcgtgagaatgctgcttgttcagtctcccggtttttggctccccgcctttggggtccgc

SEQ ID NO: 712 - DNA, 4001 bp, Homo sapiens
gttagaaatcttgtcttttctccaccctcctcccagcctgagactgcttccttcttgtaaacctacaggaatttggggctaggggaaggcctgggagatgaggttgaggaacattaaagttactgaaacaaaataagcctagtcactcaaattgattatcctcttgattcacatatgtttatgctagctgcatatcatttacgtgttgttaatttagaatcagagtagcaaaaattgcctgcaggccttatgcttttttttctctctctttctctctctcctttccttctccccttaaatgacacttagggtgaacctcaaagcagatgccagagcctggaaaagtgaaaaagcttgaagaaaagcaggccttggccgggcacagtgcctcacacctgtatcccagcactttgagaggccgaggcgggcggatcacctgaggtcaggagctcaagatcggcctggctaacatggcgaaaccccatctctactaaaaatacaaaaattagccgggcacggtggcgggcacctgtaatcccagctactcaggaggctgaggcaggagaattgcttgaaccccggaggtggaggttgcagtaagccaagattgtgcctctgcactccagcctgggtgacaagagtgagactcttgcctccaaaaaaaaaaagaaaaaaagaaaaaaaaaaaagaaaagcaggccttattttttatattttctctccagtgccagaaatgatcaatgatgaagtgggggttgggcagctagctggctggagaggtgagccaaaggaacccaggagtggacacctgagggagtggggtctcagaggaactgggcagagctaaatgggctaagtcttaagaggcaggggcaggaaatgtaatggaggctttctactctacaacgtccaatcctgctggggagggcatggagtatttcagagtaggaaagaatgagggagaggatagtcagataaatcaaagtttcattcttttcctcctctttcttagctcgtcaaatcctacactttctctccagctggaattatggtggtgagtgagggagttaaaataatcctggctcctccctaatcaatggcagtagagagccgaaagttggaagaagcacgtaaaacaggtatgtagcttcaagaagacactccttctctgtaggaacagttcccttactgtctcacaccaatctccttcttagtctgacctatgtctttgtgcaatcaatagtttagattttcatctcagaatatgtcaaccatggccacagtgccctgtatacttgctcacaaggagagggggaaggtttcgtgctttcattaaaaggaggaggaccaagcagcatcccctttacatgtctctcctgacttagctcctctaagcaatccagacttgcagaccaaaggtggaaggacagcaggtgtcagctccccaaagctggagaggaaatagagaagggtgggagaagaggtgaagaagatgattaaaataaagtttttaccttaaagaagggggtgctgttccaagattgagaaggagggttcagccgtggcaatgagatgggggagataggtgcaatgaagggggctgccagtgccagctgccttccagctgtcaacgcctgagcttatacaggtttacacagctttataagcgacggtccaggctgggttgtggccacttccggactcacgcccagtactgggggcactggaggagggtgaaggcaggcagggacacagccaaggtgctccaggtcgctcagagagtcttcaggattcctgagtcgccgagtctatggcatgcgctccgggccctgactacaagctggttttcaaaggaagtttgtggtttttcttttcttctctctctcttttttgttctcatcaggacgaagaaaaattaggcaaggacaagctccctggaggaggaggggcctgcccagcgctggtggatttccatcaggactttctgacccggtcagcagctttgtgatcagcagagagggagcgagaaacaggagagaaaaacaacagaccctttctcttccctctgcctgcctctagaagggacggagcgcttgtgcctctctggtgagaatagggaagagcaagtgcccttgctaagtagggaggagaagggctggacagaagcagcttgttggatctgggctctctctctgggtatggcagtcctttgctctggatccacagaagcaggagcaaagagcacgatatttgcatgtattactcaattaatgttaaaaacaaacaaacaaacccagctcttttccctctggagccctccagagagctcctttccaagtccttgctgtatcatttttaagtctagaaatgaaactggttgggttgtgcacctggtagagtgcagagggtgtggtagaagccccaggctctgggcgcgatggctgacgcctgtaatcccagcactttgggaagccaaggcgggcggatcacaaggtcaagagatcaagaccaacctggccaacatagtgaaaccccatctctactaaaaatacaaaaattagcagggcatggtggcacatgcctgtagtcccagctactcgggaggctgaggcaggagaatcgcttgaacccgggaggtggaggttgcagtgagccaagatcctgccactgcactccagcctgaagacggagcaagactccgtctcaaaaagaagaagaagaagaaaagaactggcagagcaggcaggagatccaacacgcctgtgctctggatcttggttccactgcaggcctctcatcagtcacctcctctcgatttacagctggggaagcaggaaaagctggtgtgaggctgacggtaggaaataaagggatagataaataaatgagggaatttttgatgatgagtgtccatttatttgcagtacctgcactactctgcggctggaaagtggcagttaagggaggttggaacctaactccacattctgaagggttccctaaactctatgtacagggccgccacaggatgaaatttcaagcaactctaaaggctgaaagagcaattggaacaattagggtggcagagagcaaaaagccaaggttacaaccgtccaagaaaggaagaagatatttgccgaggctgtagaaaaaaacaggctacagagttgcaaagggagaagcagcaggagttggcaggagactgtaggtgttaacaagaggggtcaaagattattctaatgttctcctaacatgaacaaccacaaaattggtggcgactgagtcagtttggtaaagggcagaatttgtagaaagaagatgatctgttttgccaagtgtcatttaaaatgtcaccagatgctcggtgtgatatatgtaaagatgttatacttggcctgatctgagagggaaagttcagatgccacaataatgggttactgtgacacatacacatttgtttaccgaacgactgatccctcagaaaacaatccttccctcggttgctagggacattgcggagttgcgggactacgtttcccacgtcgccccacgccacgcccccttggcctcgccggaaagacgtcccaggagcctctgggcgtagagccccgcctccgccgctgggggcggggcgacgccggactccggagcgcccgcttacgcagttcctcccggggtcggaggccgattcgccgtgtggcgggttcgagtcccgcctcctgactctggcctctagtccctgagtcccgggcgggctgcattcgtcggggaaacctctcctcgaccaggggcacctctactcgaccaggggcgacggcgtactttgggcttcatcatggaggactacctgcagggttgtcgagctgctctgcaggtaacgaatccctgtctgtgactgtaaggaatggagcacggggtccaggaaggacgaagacgtgggatctgggggagcctcgacggtccgtgtggagggaacactgagttgtggggaggggggttgg

SEQ ID NO: 713 - DNA, 4001 bp, Homo sapiens
ctcaccacaagctctgcctcccaagttcacgccattctcctgcctcagcctcccgagtagctgggactacaggcgcccgccaccacgcccggctaatattttgtatttttagtagagacggggtttcaccgtgttagccaggatggtctcgatctcctgacctcgtgatccgcccgcctcggcctcccaaagtgcatgagccactgcgcctggccgtttttttgtttttgtttttgtttttaagaggcaaggtctcactctgttgcccaggctggagtgcagtggcgtgatctcagctcactgcaatctccgctccggggctcaagccatactcccacttcagcctcccggagtagctgggaccacaggcacccaaccaacttttttttttttttttttttttttgtatttttagtagaggcggggtttcacaatgttgcccaggctggtctcaaactccagagctcaaggaatcagcccgcctcggcctcccaagtgccgggattacacgtgtgagccatcgcgcctggccggtaagcttttttttaaactcacataaaagattacacagaggtacctggcctgggttgaattctagaaggggttgtgacagtgttactcaagtgcacaattactattggtggtgcttgctacaaagactcagttttattcgtacacgcttaatatcatgggttgtcaaatcatgcttccaatttgcaatacgtcactcatttcagggtaatgacttacacatacaattttcaaacaaaaatgtaagatttacttgcctcatgatggttaccttctcaacttttttcataatttataaaagcaccagctgaccccaaatcatctacctcttggccttttaatgtaagcggtaaaggaatactgtcctctgaatgcagcgttggctaacactgctgacccacgcaaggcattgatttgtagttgtttttccatcggagtgatggatttgcgctcagctactcgcggtgtctactaggtccccctggtgaccaaacagtacacttaggcagtagtagggttccaaggcacagactggcagcggaacagagggtggaacgggaaatcatgaaaaattaacacgcgaaccgtacacacgacatgactgagaattacgtttgcattactagggtatttgggatccacagaccagccactagcccctttcctttaaaaagcaaacacccatccgcctggttcaggcttatcggtctccacctcccatttaaatcttgggtgtgatggaacgacccaaccaaggggctcggcacgaggcacacgctgctttttggagcctggggaaacactggtgtgacaaattgtcataattttctaagacacggaggaatgctacaccacctttcctaccaccgacttaagacccaagacactgagtcaagggcaaccgacctgcgggggcccacgggggaggggggaaagccccgaaaacaccagggagaaggcggcccgtcgagctccgcctggagcggcgcagggctgcgggcaatgcccggagcgcggggtcgtacccaggtcacgtctcggggctctcaggatgcgagggcgtacccgggcgggacgactcgggccctggagcccggctggccgcggcgcgggagccgcgagggccgcggtggggggcgtcggcagagccgctgagggggctggggagggcgcgccgccaggtgccggacggcagggggcagcggggttcgggcgggcacagacccagggagggaggaggggagcgggcgagtcctgcgcggcgcggcagggcacacggccgggtgctcccgcagctggtggctgggcggccgccggcctacctggaggtaatagggtttccttagccaggcccccggacagagactcctcgccatggtaatcacacatcgccccgccgcgctgcagtcagaggcggacccgagcgctggcggccgggctccccgcctccccccgcctccccgccccctgcccggccgggcccgcccactcccccgcccccgccgcggcgcgcgccgcgctcccctcggcccggctgcagtgaaggcggcgagaggccagaggcccagcctcctgccctgttcgcccgccggccgccgcggctgtcagagaggctgctgccgactccgccataaaggggagtcgcacctcgcctccgccgacacaaatcgactgcgcctggagcttaaaggggaggcgcgcggaggcgggagggggcgccgcggcagcgggggtgtcgcacgctcggcgcggattggggcgtgcttctcgctggctgatgcggcgacccccggaccgcgctggcctcgcagtctgctccggcttccggctccccgcgctgcgcccagctgcgcgtcccgccacccgccccggcagcaccgacgctccccatggactcttctcctggagtcaggacgtgtctggacgggttgtttggaaattcaagggaagcttggggctccttccctggggactggctcgtcctccctcgcccttggtggcggtcgggggaagggggtgtctgccgcagctggagacgcagaccggggcatccccccaggactgggctcagcttcgaacgcggacagggcgccccactgctgaactcggtgccccccttaccacgctccagttcgcctctaacggcctacaactttttttaaaaatgtacttttaaaaaattccgacttttttggtttatattgtttttaagacagcttcagagttttcctggccccgtccaggaacactgatttcaaaagaaaacaaaaacaaaaacaccgaattaaatacagtcctgaaggcagggagcctgggacgtggcctgctgcttggttaaggctacataacacagggtgtggtgtctttcttttgacaatgagttccaaataagggaaaaaagagccaccctagtgggagaacagctgttgatccaagtgacttgtaatggaagaagcagcttttttttttttttttttttttttggctgctttttaccccacctaccacgtttaagcgtgatgctaacaaagtttaggtggcccgttagagctcattccggcctgttgctctgagaaggggtttccccagaagcaaaccattactcattctcacttggtttttgcataagccttgttcaggtgccttgttctgaagagataccttcatgtctgccccttccctcaacccacacacagacacaggttttaaacctaggtgatttttgttgtggtggttgttctttctgtttttgagaggggtcttaccatgttgcctaggctggactcaaactcctgggctgaagccatcctcccatgtagctggaactacagctacttggtcttattttattgcttgcagataaaccaatttttcattgattttgtttgggtcaagagacagtaatttctgagtaagataaggatgaatcctagtggtttcattcattcatttaataaagatttatgagtacccaggcaccattcaagttgtttcggttacataaacaaaacagacaaaaatccttgcgcttgtggatgtgagagagaggggcaataaataataaatgtaatcaataaaatcaaattggataagaatgctaataaaggttatggggaaaacaccaagggagatggggaagactacaaatagaggaagtttgaggcaaaagaggagttcagttttggagaagttccattttaaggtatctattagaaattgaagtggagatcttgattaggcagttgtatgtatgaatgagtctaggattaaggagcgtggtccaagctagaggtatatgagagatatcagcatttagatggcgtttaaagccatgagactgcctaagatcaccaaggaagtgagtgtaaataaaagacgactgaggatggagctctggggaccaatgcagctttaagacagggtagtgggtgagccagccaaggagactgaaagggagcagccagtgaagt

SEQ ID NO: 714 - DNA, 4001 bp, Homo sapiens
tccaggtttccgtcttatgttcccataacagttgctatcttatttatcttaccttactgtaattactcattttctttcctgatccactgtaagttttataaggtcaaagatattttgctccctgttatatgcatacaccactggcctgggtaaagagtagctactcaacaactatagaatctttaacaagttataataattggaaccctccaaatcattactattcaaatataattctgagatggagtgttttaatattctttatattagaaagtactggtagaggccaggtgcggtggctcatgcctgtaatcccagctctttgggaagtcaaggagggcggatcacttgaggctaggagttcaagaccagcctgggcaacatggtgaaaccccgtctttactgaaaatacaaaaattagccaggcgtggtagtgcgagcctgtgattccagctacttgggaggttgaggcaggagaattgcttgaacctgggaggcagttgcagtaggctgagattgtaccactgcactccagcctgggcaataaagcaagacttcgtctcaaaaaaaaaaaaaaaaagagagaaagtactggtggaaaaaaaggagttaaatttacttgaaattctcaaatttttaaaatataagtctatagaattaatgatcactactagaaatcttagactgatacagtcatttttctgagatacatccaatcactaggatagaaacagaataataatccttttagataaattttggtattcaagagtaaaagatgtgttctagaaagtctgcctgtaaatacgcttttatagtctaaacattaaaaaactcatctgattgaaataaactaaaacttaaatatattaaaaatatatatatatataataaaaatccttctttgtattgaggatgcccccacactaacttatttatgtgttatatatttaaatttctgaacactggaattttcaaagtggggaaaactttactaatgggtcatgtcaaaaagctaagaagattagcacaattctaatgtcaaattaacttttatttttaaaaacatcattagtaagtatgtaagcagtaaatatagtgttatgaagaggctttttagtaaacaggaaatttaaaatacttactattattttcttacagtcctttcctctgcataattctgtataggtagaatactgcacatatataatccagcttccaacaaaaaccactaaccaggaaaagaaaagatatttcatccgcacatatgagaagcgagcctgtgagtaaaaaagaacataacgatcattcattcagcaccaaatcagcattcaatgtcctagaacacgacttctcacccttcttggaacaactcaatatatattccaggcttttatatggcaattctagaacaaagtgcactttcactgagtccaaacagcactggtcttagaaaaggaagctccttggtcctgccaaggaaaaagggaacaaaatatcctttaagatgtataacctttcaaataccaccatcatccaaagctactttttaggcacaagcacatgtaccatgctaccctgggcaccttgtgagatcaggtaaagagaggtacaattcctatttactagaagcttacaaaagactctttcacataagaatcttaaaggtctttaggaaaatcatgataaaaataattttgttttaaagaaataagaacagaaaatctggctatttgtctaatgtctcatactgacaaccagaacaagaaattaagctctacagtcatttctatttccctattgtattcaccagggctttatgttcctcttgttcagcgaaccaaatgtttcaccgaatagatattctggaaactgaggagacgctaacaattgttaaaggagaaatgactggagaagggttaagatatattaaaaataagttactctttgcatatcaacttgcaaagtgtaaagctgcacaataggatcctctttgcattgttttgtttccagtgctcttgtatctaattgcaactcgggctggttgatgccttttttccatcaattacatatcaaacagtttcatcttcaaaagtgacacttgatcaagactatttgacatttattttttgagtctgtagcacccatggtctggttttataaacagcagaactgaggactacgaagagaattcggcagaataaattaaagatatgtaaacaaacaatgaaaagctagttttgcttttacaatcacgagccagtttctcacactgggaacagtaggatattgtgagcattgtgagcatgcaaagaagcagaaagagatgagagagacataagcacacctgcagaagacaatgagtgcaaaggaaaaagagactcaggaaatactgaattctattggccctatttgtggtttagatatctttgtgaggttaacagatggtgaatccctgtaccaaaaggcttgagtacaatgagttctcagtaaaattgtaggtctctgagctttattattaaaatgaaaaagtgccttaatgcaagatacttttgtattgctctaagtaaaaagaaagttcagattaaactccaaattaaatcacataaaagacaatggggtatataccatggggtttgtttgaaagatatttaagatgactcgtctctaataagaggtttggtcatcagacagaaatcgacatgtactaatattgtgaacctaaataagattaaatgacataatgcctataaaacataagcatattgctgggcacgtagtaagtattcagcaaatgttagctaaatcaatttgcaagtcactgggcaagaagccaacaatactgtcagtggctatcatcttcttttcggacttgccaaaaagaaaactgaatctgaatctgatcaagccttttagctccagctaccagtttacaggaaatacatgagacagagaaacacaagtgacacttaagtaagtgacactataaggatataatcagcaaactccaggctgtgggaaacactgcaatacaaacaatccagtttcttcaacaaataaattacaagaagggaaaaaaaggcaaggggaaacttaaagattaaaaatcatttaagatatatattaggctagatctgtaatcccagcactttcggaggctgaggtaggagaatcacttaagtataggaatttgagatcagtctggacaatatagtgagacattgtctctatgaaaaaatttaaaaattagccaaggccagccaggagctcacgcctgtaatcccagaacttcgggaggccaagacaggcgaacaacttgaggtgaggagttcaagaccagcctggccaacatggtaaaaccccgcctatactaaaaatacaaaaattaggccaggcgcagtggctcacacctgtaatcccagcactttgggaggccgaggtgggcggatcacgaggtcaggagatcgagaccatcctggctaacacggtgaaaccccatctctactaaaaatacaaaaaattagccgggcgaggtggcgggggcctgtagtcccagctactcgggagtctgaggcaggagaatagcgtgaaccccggggggcggagcctgcagtgagccgagatcgcaccactgcactccagcctgggcgacagcgagactctgtctcaaaaacaaacaaacaaacaaacaaacaaacaaacaaaaattagccgagtgtggtggcatgcacctgtaatcccagctactcaggaggctgaggcaggaaaactgcttgaacctggggggcggaggttgcagtgagccgagattgtgccactgcattccaacctgggtgacagagcaagactccatctcaaaaaataaaaataaaaataaaaattagccaagcatagtggctcatgcctgtagtcccagctatttgggaggctagggtgagaggattgcttgagcctgggaggcagaggttgcagtgagccaagatcgcaccactgcactacag

SEQ ID NO: 715 - DNA, 4001 bp, Homo sapiens
caagtcccttgctggaaccggaactggtggtccataagctcctcccagatttgtgagaggtcctggactcctttgagatgggcgtgtggctgacacctttatgcgagtccctgtgcctgctgctccccgggttgccacagcctttctcctttttgtcatctctattggctctgtggctgaatgaggacctgctggaggacttttgggcaatcttgtctccccttgttttgtggcggctttcacctgtcctgcggcgatgggaactccttccgagagccctgtccttttcccttctttccctcccctccttgcagccttcagcgctggcctgggttcgctcccttccatgctgtccactcaggctgctcttgctctgccgggtggagacgggaggtcccgctgctgcatccatgtctgcttctgcagctgtcctgctggtcagtactactcctgcaatggccaggctcacactgccctctcgggaaaggctcatggatgcgctggaaacatgctctgaggacttgcctgcagcccctgccacagccaccttcgtgctgtttggagccatgctggcagtgcctgcaagggccatgttgcctttgtttcctcctgcaccgatggtggccgccccagctatggctgcgctcacctgtccaggggcagaattggctgctgccacactcaaggcacctgctacggtgcctgttgctgcccctgcagctgcccctgctgctgctgcctctttaatcccccctgttgctggctcctcagcaagttctgtagatgttttggggatggatgcattgagcacattagtgggtttgttaaagtcattttggagtccctcccctccagcataagcagcagaggtggccccacacacctcagagaccatgtggaggctttggatgctgacctggtcctgatccccctttccttgaaggttcacggctcccaggctcctcctgtcttcctgaaacacaggcatccacatcatgtcttcagctggaatgccacaggtactgctgttactctccatgggtggccgcaagaggtaaattagtttttcccaataggcaaagaggtcatcccgtgtgtcaagagcgggacacaattgcagatagcaagatctgccagtggcgaacttcaggcgcagctgttgtttctcatggtcttgaacagagatccgtacaaacctcaggggcagaagcctggtgagctctaagttctttgctgccttgcgtttttttctcttggtggcctggccatgtccagcatactcttcgcagccggtggccggtcgtgccagtagcatgacatctgggagtgggaggatggggctggtacgtgcaatgcccatggtcaccatacggacacggttgtgcacatcaatcacttctccccttttggtgatctggataaagtcgctctcaaatatcggtgcatacttgaatatatcgtactcccccttgtacagttgtcgctgcagtttccccatggtggtgttgaacatgctcatgctggagccactctgggccgtataatacggcagcagaaaatcagcattcatggttgtctttcagcacaacggcagcactggtgaggcaggtctctgggtcttccttggcctcggtggcagatgagggaccagtggtgctcctgggtcacaaagatgtctctgcagctggtctctcaatcccaccccaccccacaggcccccactgttgcctcagagcctcccagaggccggggtgggggtgggagcacggatgattgctgtggggggtgctgtagggtgcctggactccagactcttccaagacgtagagatgcagggtgggctccagagaggttttcttctggacctaaccccctgacctccacctctgatttttttaattacagtttgtagtctctctccctgagagagactacaaactgtagtcctagtgacaggaagtgacgaccctctctgcctaaaccccctgtgcagccatatttatcttctgcttccctttgtgacctgttgctgtcacatacccctttgttctcatcccccaggccagggccacaatgccctcactaatactccattgcccccatagaggacagccccaccgtgccaggtactcaagtgggtgccaaaataaaaatttttcaaatgagaaaatgtgtggttgcttccccttcctcaccccaaattcaaaagattcagcaactaggcagagtctacaggaacgcaagatgatgggataaatttgaaccatttgagtacacggtttaaatttttttttaacctagaattcgcagtcttggttcttagcccactcttccataaaatctcagttcatgctgacaatggaaatctttagtaataacctcaacctttaataataacatgagagattgcttcttctaggcgccatactatgtatcaaactccattccagtttgatactattgcaacgcttctcatcttacaggtaaaaaaaacctgaagttgtgaaacatacctgcatttgtagaactcgtaggcagtggaggtattatttgaatacaggtcttgctgcttttaaaatcttccttctgaaccactacagaacttacaaaaaaagcttgggcaagccaaataagttgcataattaattctgtgtgtgtgtgtgtgtgtgtgtgtgtgtatgcatgcatgttatggagaatccaggacaaccacttcagaaaggggctgggctgagtgggggattaaattatccaaggggccacctctatttctcctccatcatgtttataccaacatcctgtgtcagggagcccaaatattttctcaaggcccccagtgtttgccccgtgcctcttcttaccccctaccctgtgaaatgccgggagaagagggtaggatggaaagtgtgagcttacattccaggagcctatcaaaggccctcctctactaacctctctactatgcagaagtactttggaagccatttacatccatggggaacaggtgctactatacctcctgccttgccatgcccacagagcgagcccaggaataagtaatttccaagctgttacctggaagtcctgaaaaggagcacctgcttccaactctcttttctcccagcttgacatcaggcctgaaatcctaccttagagattcagttcttgaagataaaggctagctgtttcttaacatacacacacctgtctatcaactgatgaatggataaacaaaaagtatagtatccatacaacagaatactattcagccataaagagaaataaggtactattacataatacgctaggctgacacttgaaaacattatgctaagtgaaagaagccagccgtattgtgcgaaaggccacatattgtatgatgctatttacataaaatatccagcgcaggcaagtccatagaaacagaagacagattagtggttgccagagactggaaggaaggggaatgaagagtgactccttaatgggtacaggatttcctttggggacagtgaaaaagttctggaactagatagtaatggttacactgcattgtgaatgtacttaatggcactgaattgtacacttcaaaatagttacaatggcaaattttttgtatatcttaccacgcacacacacacaaatgtatatactcttgtttgaaatcattgctgttgaaaacaagcataggcttcagctttggaaagatccactgtgagacctcgagcaagttactgagctctccactccctcatctgtaaaatgggggtagcagttgttgtgaggattaaatgggataatacatgtgaagtgtttagtgtattgtcctacgcaataaatgttagcttctgttagcattagtcctcaacagtccttttaacctcagtgtaaattcctccctgaaagcagtgtttgatgagactgtgttaaaatcttctggagttagagccaccatgagaacacaggatgctcagtgggcaaatgggacctcctttcaggca

SEQ ID NO: 716 - DNA, 4001 bp, Homo sapiens
ttgattcacatacatcttagcacgctaattcattattattttaacccctacaaagaagggtagaaaatgggaaaaacatgattctattctagacttgggtctaacctgtaacaattcacctagccttccttatgactgccctattacttaccatagctattgcaaagatgaatgggttaatattttaaatttgtgtatgagctactaaaaagaaaaagcagtggacaatgaatcacagaactttgtagcagtaggttctatgatttattttctagtgttttcccttttttgaaatacatatacgatgtacacacacacaaatgtaaaatattaacttagaatttaaaaaaattaaaaagattttaaaataacacatttatctctgcaataaatgagagcctttggctttgctgttagacatgattacacttagaccaattcagaaaagatttcaagaaaggaagagtacacagctttacctgggtaaatcaaaaaacttgtaaagtttctatcattatcatgaaattcatttaaaatgaattgtggttattaacctgcttcctctggctctatatccaaagacttagagaataactgtccactcatattttggataattactttccttttaataataaaatttcaataaataactaaattttgaagattcatgtagggcatatatatgttgattatggaaagggaaagtaccatttagagctagaaagaggtttatttgagtcaaataaaatggctattttaccaaataggaagcaaattcttaaggactctacacccaaaagcagttagtggctgaaaacaaacagattttaaaagggttcaattatgggaacaaatgtgtaatgtccaaaatagtctttattggagataaggattaaggctaagtctctatttttcatcccataaaaatctatttacatctctttcagagagagagagttttgaggaaagaaaactgaatttgatgaacaacggatctgatttaggatgccaattgcaaataatgatagaaaacggatttttttttttttggtgcaaaatttcatggataaaaatgaaaaacttaaatgacctctcctctccaacagtacggaaaattttgcctgaatttacctaaagtctacgccacggacttgattcagtgaaataggatggttgggcagggcactgaaccagggatcaaacttaagagatgtgtggtcgcatgactgcaattgaactagaagcattacatcaggactgaccaccttggctaaaccacagactttgtccagacagtctgcccacttagatatattccaaggggatcatcaaactggtgggagtggctgaaacaccgaaatgataacctccttgttgactcccacagatccaagccataagtgttcccatttagttaaaagctaccgttgcccgccactagcatgacttacttggtaggagggatgtctgtagagaaaaggtctatttcagtatcagccagcaaaacagccttcattcccctagagctgagcacttgtttacagaatttgcaacacaggatggacacgcacctgtccttgaaactacaaatgttggtagacatggcgtcgcaggaaggatgaggtgtgggattttgaaaaaggaaacaagagtaatgctcctactattttgattcccctaggctaaaattcaaattgcgggacctagagcttttctaagtcctaatattgggaaggaaattagtttttttttctgttttcccggtggcggagtagaagaagtatttattgagtaggaacaggggagcgtggcaaacttggctttccttttaacttttggagaagggagtggagtttgaattggagaggaggcaggtggagtttgaagggaacttctcaacggctttccctttctgctgtctaaaggagtcctctacacttcagctcccgccccttcatagcaattccctcagccttctccgatcgtctaatttaaagcttctcctcttttaagacatcccttccccagcattaagcccctcccccggagcgctccggttccctgctgtcggatctcgggctaagcgtccctacccacgcctcctcttcccaggattcagaaactcccttctctttttctgccaggcgatcccggattctcctccgtcccgccccttttctcccggaccttcctccgctctgcgggtccgcgggcccctctcctggcaacccccggccctcagcgtgctcgcgctgtttctctcgcgtcctcccttccctcagctgtccctcgtgccccccgcagtcccctcaggtttcttcccggagcggctgttcccgggcgcgcggtggtgttggtggggcagagctgaagtcgctttagaggctcagtcggcgctggggtctgtcaccgaacacgttggttttcgctccctcttccgcttttcctgcctctccaacccggtatcagtttgaattgccagcgccgcgcaccgattggaagaactagagttagccccagtccctcattggaaggctccggggcctcccctcacgagagcttagtggcttgaagaccgtaggcaccgccccagtaacggtgctgagatcaattcggctttctggttggctgagcttggctccgcctccgatctcattggccggcttcgggaggtttcggcaaaccctgccttcgccctagtgaaagtggcaaggcacgcccttcccgcttcttattggaagaggttctacagtctccaccggtctctactctttattggttaaaactccccgcaacacccctcctctctaccccggcccaattggccgtgccttagctcaagagtttgtgtttggtcgtcggttccaccttaatcccgcccatcagttctacttaggggttcaacaacccggggtggagcttaatctgtgaccacgcctcggcagtgctagtcacacctccaagttttgccagctcctccccctcattccgggcctctcgggatcagctcttcctattggctatgggccccatcggtcgatagaaaacgggcggtgattggtaaaggggtgggctctacttcccggcggggtcctgcggagttggcggaggctcctccagggactggggcaccgatctgcgtagaaacgggtggcggggaagagaggggaggagagctctgagtgggaagcggagccgggggcctgggacccgtcgcgtcagagccaggtaaaggctccttccctcttccttttcttcctcccggccgccgggctggagccctgactgaacaaaccggggctggggcgggaaggagagggcgcggatgctgctcgcggcatcgccttagcggtgccgcccggaatccctcagaccgccccccctccaccctctccaaatctcccagtacagcccataatacttctcaggactgcgagtctctccgcccatcactgtacagcctgggactccgtcctggctcacggaccgcagcgcagccggcacccagccgcctctccctttcctccgcacacgggcagccgcggtccaccgtagggcagtcgtcgttggcatcgcgcgtaatcatcggccggcctcctccagtgtctcccagccctggcggacagcccgggtcccagcctaggacccaggaggatgggtgttccgcgcagcttccggggctctccccgagtcccaccccccggcccgccccgatggacttctcttcgcccactcccatccctagaccacatctcggcccccacagttcctgacatccttgcgcttcacgcaacatcgcggcccatgatcatgccccaattcccctcacctctaaggcagccttctccttgccgcctcccgccttccgagcgtgtgcaactccaattgtccccgggctcccttccagcctcaggaccccatctcacacccgcctctcgcttcccgcttcccgctcgcctgaaccccgccgcctctgctccctgtcttgttccctcagc

SEQ ID NO: 717 - DNA, 4001 bp, Homo sapiens
caattcagaaaagatttcaagaaaggaagagtacacagctttacctgggtaaatcaaaaaacttgtaaagtttctatcattatcatgaaattcatttaaaatgaattgtggttattaacctgcttcctctggctctatatccaaagacttagagaataactgtccactcatattttggataattactttccttttaataataaaatttcaataaataactaaattttgaagattcatgtagggcatatatatgttgattatggaaagggaaagtaccatttagagctagaaagaggtttatttgagtaaaataaaatggctattttaccaaataggaagcaaattcttaaggactctacacccaaaagcagttagtggctgaaaacaaacagattttaaaagggttcaattatgggaacaaatgtgtaatgtccaaaatagtctttattggagataaggattaaggctaagtctctatttttcatcccataaaaatctatttacatctctttcagagagagagagttttgaggaaagaaaactgaatttgatgaacaacggatctgatttaggatgccaattgcaaataatgatagaaaacggatttttttttttttggtgcaaaatttcatggataaaaatgaaaaacttaaatgacctctcctctccaacagtacagaaaattttgcctgaatttacctaaagtctacgccacggacttgattcagtgaaataggatggttgggcagggcactgaaccagggatcaaacttaagagatgtgtggtcgcatgactgcaattgaactagaagcattacatcaggactgaccaccttggctaaaccacagactttgtccagacagtctgcccacttagatatattccaaggggatcatcaaactggtgggagtggctgaaacaccgaaatgataacctccttgttgactcccacagatccaagccataagtgttcccatttagttaaaagctaccgttgcccgccactagcatgacttacttggtaggagggatgtctgtagagaaaaggtctatttcagtatcagccagcaaaacagccttcattcccctagagctgagcacttgtttacagaatttgcaacacaggatggacacgcacctgtccttgaaactacaaatgttggtagacatggcgtcgcaggaaggatgaggtgtgggattttgaaaaaggaaacaagagtaatgctcctactattttgattcccctaggctaaaattcaagttgcgggacctagagcttttctaagtcctaatattgggaaggaaattagttttttttttctgttttcccggtggcggagtagaagaagtatttattgagtaggaacaggggagcgtggcaaacttggctttccttttaacttttggagaagggagtggagtttgaattggagaggaggcaggtggagtttgaagggaacttctcaacggctttccctttctgctgtctaaaggagtcctctacacttcagctcccgccccttcatagcaattccctcagccttctccgatcgtctaatttaaagcttctcctcttttaagacatcccttccccagcattaagcccctcccccggagcgctccggttccctgctgtcggatctcgggctaagcatccctacccacgcctcctcttcccaggattcagaaactcccttctctttttctgccaggcgatcccggattctcctccgtcccgccccttttctcccggaccttcctccgctctgcgggtccgcgggcccctctcctggcaacccccggccctcagcgtgcttgcgctgtttctctcgcgtcctcccttccctcagctgtccctcgtgccccccgcagtcccctcaggtttcttcccggagcggctgttcccgggcgcgcggtggtgttggtggggcagagctgaagtcgctttagaggctcagtcggcgctggggtctgtcaccgaacacgttggttttcgctccctcttccgcttttcctgcctctccaacccggtatcagtttgaattgccagcgccgcgcaccgattggaagaactagagttagccccagtccctcattggaaggctccggggcctcccctcacgagagcttagtggcttgaagaccgtaggcaccgccccagtaacggtgctgagatcaattcggctttctggtcggctgagcttggctccgcctccgatctcattggccggcttcgggaggtttcggcaaaccctgccttagccctagtgaaagtggcaagacacgcccttcccgcttcttattggaagagggactacagtctccaccggcctctactctttattggttaaaattccccgcaacacccctcctctctaccccggcccaattggccatgccttagctcaagagtttgtgtttggtcgtcggttccaccttaatcccgcccatcagttctacttcggggttcaacaacccggggtggagcttaatctgtgaccacgcctcggcagtgctagtcacacctccaagttttgccagctcctccccctcattccgggcctctcggtatcagctcttcctattggctatgggccccatcggtcgatagaaaacgggcggtgattggtaaaggggtgggctctacttcccggcggggtcctgcggagttggcggaggcggcggaggctcctccagggactggggcaccgatctgcgtagaaacgggtggcggggaagagaggggaggagagctctgagtgggaagcggaaccgggggcctgggacccgtcgcgtcagagccaggtaaaggctccttccctcttccttttcttcctcccggccgccgggctggagccctgactgaacaaacccgggctggggcgggaaggagagggcgcggatgctgctcgcggcatcgccttagcggtgccgcccggaatccctcagaccgcccctcctccaccctctccaaatctcccagtacagcccataatacttctcaggactgcgagtctctccgcccatcactgtacagcctgggactccgtcctggctcacggaccgcagcgcagccagcacccagccgcctctccctttcctccgcacacgggcagccgcggtccaccgtagggcagtcgtcgttggcatcgcgcgtaatcatcggccggcctcctccagtgtctcccagccctggcggacagcccgggtcccagcctaggacccaggaggatgggtgttccgcgcagcttccggggctctccccgagtcccaccccccggcccgccccgatggacttctcttcgcccactcccatccctagaccacatctcggcccccacagttcctgacatccttgcgcttcacgcaacatcgcggcccatgatcatgccccaattcccctcacctctaaggcagccttctccttgccgcctcccgccttccgagcgtgtgcaactccagttgtccccgggctcccttccagcctcaggaccccatctcacacccgcctctcgcttcccgcttcccgctcgcctgaaccccgccgcctctgctccctgtcttgtttcctcagcgtggccccttcctccagccgcgggaagtgggagacgctagcgggagcttcctcctcccggcgctcggaggaaaaggaaagaccaagtagaaagggtcgccgctgcggcacgcgagggagctagtcgccgggctccgcgctcccgcttgcgtccctccagccccctgggcctcgtccggggccggatcttctcgggcaccgcctggtgcgaggagtcaggactgcgacctcaccgacctcctcccatccccagcctgggattgggtgggatatctgggatctctgagcttgggtgtcaaaaaaatattgggggtggcatttatagtcactatcgtccctagcttgagggaggcgacggctgccttccgctcgccgccccccggttttcccggctccgaccctatcctctaacccgtttcctgcttc

SEQ ID NO: 718 - DNA, 4001 bp, Homo sapiens
cagctttacctgggtaaatcaaaaaacttgtaaagtttctatcattatcatgaaattcatttaaaatgaattgtggttattaacctgcttcctctggctctatatccaaagacttagagaataactgtccactcatattttggataattactttccttttaataataaaatttcaataaataactaaattttgaagattcatgtagggcatatatatgttgattatggaaagggaaagtaccatttagagctagaaagaggtttatttgagtcaaataaaatggctattttaccaaataggaagcaaattcttaaggactctacacccaaaagcagttagtggctgaaaacaaacagattttaaaagggttcaattatgggaacaaatgtgtaatgtccaaaatagtctttattggagataaggattaaggctaagtctctatttttcatcccataaaaatctatttacatctctttcagagagagagagttttgaggaaagaaaactgaatttgatgaacaacggatctgatttaggatgccaattgcaaataatgatagaaaacggattttttttttttggtgcaaaatttcatggataaaaatgaaaaacttaaatgacctctcctctccaacagtacagaaaattttgcctgaatttacctaaagtctacgccacggacttgattcagtgaaataggatggttgggcagggcactgaaccagggatcaaacttaagagatgtgtggtcgcatgactgcaattgaactagaagcattacatcaggactgaccaccttggctaaaccacagactttgtccagacagtctgcccacttagatatattccaaggggatcatcaaactggtgggagtggctgaaacaccgaaatgataacctccttgttgactcccacagatccaagccataagtgttcccatttagttaaaagctaccgttgcccgccactagcatgacttacttggtaggagggatgtctgtagagaaaaggtctatttcagtatcagccagcaaaacagccttcattcccctagagctgagcacttgtttacagaatttgcaacacaggatggacacgcacctgtccttgaaactacaaatgttggtggacatggcgtcgcaggaaggatgaggtgtgggattttgaaaaaggaaacaagagtaatgctcctactattttgattcccctaggctaaaattcaaattgcgggacctagagcttttctaagtcctaatattgggaaggaaattagtttttttttctgttttcccggtggcggagtagaagaagtatttattgagtaggaacaggggagcgtggcaaacttggctttccttttaacttttggagaagggagtggagtttgaattggagaggaggcaggtggagtttgaagggaacttctcaacggctttccctttctgctgtctaaaggagtcctctacacttcagctcccgccccttcatagcaattccctcagccttctccgatcgtctaatttaaagcttctcctcttttaagacatcccttccccagcattaagcccctcccccggagcgctccggttccctgctgtcggatctcgggctaagcgtccctacccacgcctcctcttcccaggattcagaaactcccttctctttttctgccaggcgatcccggattctcctccgtcccgccccttttctcccggaccttcctccgctctgcgggtccgcgggcccctctcctggcaacccccggccctcagcgtgctcgcgctgtttctctcgcgtcctcccttccctcagctgtccctcgtgccccccgcagtcccctcaggtttcttcccggagcggctgttcccgggcgcgcggtggtgttggtggggcagagctgaagtcgctttagaggctcagtcggcgctggggtctgtcaccgaacacgttggttttcgctccctcttccgcttttcctgcctctccaacccggtatcagtttgaattgccagcgccgcgcaccgattggaagaactagagttagccccagtccctcattggaaggctccggggcctcccctcacgagagcttagtggcttgaagaccgtaggcaccgccccagtaacggtgctgagatcaattcggctttctggtcggctgagcttggctccgcctccgatctcattggccggcttcgggaggtttcggcaaaccctgctttagccctagtgaaagtggcaaggcacgcccttcccgcttcttattggaagagggtctacagtctccaccggtctctactctttattggttaaaattccccgcaacacccctcctctctaccccggcccaattggccgtgcctcagctcaagagtttgtgtttggtcgtcggttccaccttaatcccgcccatcagttctacttaggggttcaacaacccggggtggagcttaatctgtgaccacgcctcggcagtgctagtcacacctccaagttttgccagctcctccccctcattccgggcctctcgggatcagctcttcctattggctatgggccccatcggtcgatagaaaacgggcggtgattggtaaaggggtgggctctacttcccggcggggtcctgcggagttggcggaggctcctccagggactggggcacagatctgcgtagaaacgggtggcggggaagagaggggaggagagctctgagtgggaagcggagccgggggcctgggacccgtcgcgtcagagccaggtaaaggctccttccctcttccttttcttcctcccggccgccgggctggagccctgactgaacaaacccgggctggggcgggaaggagagggcgcggatgctgctcgcggcatcgccttagcggtgccgcccggaatccctcagaccgcccctcctccaccctctccaaatctcccagtacagcccataatacttctcaggactgcgagtctctccgcccatcactgtacagcctgggactccgtcctggctcacggaccgcagcgcagccggcacccagccgcctctccctttcctccgcacacgggcagccgcggtccaccgtagggcagtcgtcgttggcatcgcgcgtaatcatcggccggcctcctccagtgtctcccagccctggcggacagcccgggtcccagcctaggacccaggaggatgggtgttccgcgcagcttccggggctctccccgagtcccaccccccggcccgccccgatggacttctcttcgcccactcccatccctagaccacatctcggcccccacagttcctgacatccttgcgcttcacgcaacatcgcggcccatgatcatgccccaattcccctcacctctaaggcagccttctccttgccgcctcccgccttccgagcgtgtgcaactccagttgtccccgggctcccttccagcctcaggaccccatctcacacccgcctctcgcttcccgcttcccgctcgcctgaaccccgccgcctctgctccctgtcttgttccctcagcgtggccccttcctccagccgcgggaagtgggagacgctagcgggagcttcctcctcccggcgctcggaggaaaaggaaagaccaagtagaaagggtcgccgctgcggcacgcgagggagctagtcgccgggctccgcgctcccgcttgcgtccctccagccccctgggcctcgtccggggccggatcttctcgggcaccgcctggtgcgaggagtcaggactgcgacctcaccgacctcctcccatccccagcctgggattgggtgggatatctgggatctctgagcttgggtgtcaaaaaaatattgggggtggcatttatagtcactatcgtccctagcttgagggaggcgacggctgccttccgctcgccgccccccggttttcccggctccgaccctatcctctaacccgtttcctgcttcagctgaccacattgttttcctggatgtgtcccgtgccgagcaggct

SEQ ID NO: 719 - DNA, 4001 bp, Homo sapiens
caagaaaggaagagtacacagctttacctgggtaaatcaaaaaacttgtaaagtttctatcattatcatgaaattcatttaaaatgaattgtggttattaacctgcttcctctggctctatatccaaagacttagagaataactgtccactcatattttggataattactttccttttaataataaaatttcaataaataactaaattttgaagattcatgtagggcatatatatgttgattatggaaagggaaagtaccatttagagctagaaagaggtttatttgagtcaaataaaatggctattttaccaaataggaagcaaattcttaaggactctacacccaaaagcagttagtggctgaaaacaaacagattttaaaagggttcaattatgggaacaaatgtgtaatgtccaaaatagtctttattggagataaggattaaggctaagtctctatttttcatcccataaaaatctatttacatctctttcagagagagagagttttgaggaaagaaaactgaatttgatgaacaacggatctgatttaggatgccaattgcaaataatgatagaaaacggattttttttttttggtgcaaaatttcatggataaaaatgaaaaacttaaatgacctctcctctccaacagtacagaaaattttgcctgaatttacctaaagtctacgccacggacttgattcagtgaaataggatggttgggcagggcactgaaccagggatcaaacttaagagatgtgtggtcgcatgactgcaattgaactagaagcattacatcaggactgaccaccttggctaaaccatagactttgtccagacagtctgcccacttagatatattacaaggggatcatcaaactggtgggagtggctgaaacaccgaaatgataacctccttgttgactcccacagatccaagccataagtgttcccatttagttaaaagctaccgttgcccgccactagcatgacttacttggtaggagggatgtctgtagagaaaaggtctatttcagtatcagccagcaaaacagccttcattcccctagagctgagcacttgtttacagaatttgcaacacaggatggacacgcacctgtccttgaaactacaaatgttggtggacatggcgtcgcaggaaggatgaggtgtgggattttgaaaaaggaaacaagagtaatgctcctactattttgattcccctaggctaaaattcaaattgcgggacctagagcttttctaagtcctaatattgggaaggaaattagtttttttttctgttttcccggtggcggagtagaagaagtatttattgagtaggaacaggggagcgtggtaaacttggctttccttttaacttttggagaagggagtggagtttgaattggagaggaggcaggtggagtttgaagggaacttctcaacggctttccctttctgctgtctaaaggagtcctctacacttcagctcccgccccttcatagcaattccctcagccttctccgatcgtctaatttaaagcttctcctcttttaagacatcccttccccagcattaagcccctcccccggagcgctccggttccctgctgtcggatctcgggctaagcgtccctacccacgcctcctcttcccaggattcagaaactcccttctctttttctgccaggcgatcccggattctcctccgtcccgccccttttctcccggaccttcctccgctctgcgggtccgcgggcccctctcctggcaacccccggccctcagcgtgctcgcgctgtttctctcgcgtcctcccttccctcagctgtccctcgtgccccccgcagtcccctcaggtttcttcccggagcggctgttcccgggcgcgcggtggtgttggtggggcagagctgaagtcgctttagaggctcagtcggcgctggggtctgtcaccgaacacgttggttttcgctccctcttccgcttttcctgcctctccaacccggtatcagtttgaattgccagcgccgcgcaccgattggaagaactagagttagccccagtccctcattggaaggctccggggcctcccctcacgagagcttagtggcttgaagaccgtaggcaccgccccagtaacggtgctgagatcaattcggctttctggtcggctgagcttggctccgcctccgatctcattggccggcttcgggaggtttcggcaaaccctgctttagccctagtgaaagtggcaaggcacgcccttcccgcttcttattggaagagggtctacagtctccaccggtctctactctttattggttaaaattccccgcaacacccctcctctctaccccggcccaattggccgtgcctcagctcaagagtttgtgtttggtcgtcggttccaccttaatcccgcccatcagttctacttaggggttcaacaacccggggtggagcttaatctgtgaccacgcctcggcagtgctagtcacacctccaagttttgccagctcctccccctcattccgggcctctcgggatcagctcttcctattggctatgggccccatcggtcgatagaaaacgggcggtgattggtaaaggggtgggctctacttcccggcggggtcctgcggagttggcggaggctcctccagggactggggcacagatctgcgtagaaacgggtggcggggaagagaggggaggagagctctgagtgggaagcggagccgggggcctgggacccgtcgcgtcagagccaggtaaaggctccttccctcttccttttcttcctcccggccgccgggctggagccctgactgaacaaacccgggctggggcgggaaggagagggcgcggatgctgctcgcggcatcgccttagcggtgccgcccggaatccctcagaccgcccctcctccaccctctccaaatctcccagtacagcccataatacttctcaggactgcgagtctctccgcccatcactgtacagcctgggactctgtcctggctcacggaccgcagcgcagccggcacccagccgcctctccctttcctccgcacacgggcagccgcggtccaccgtagggcagtcgtcgttggcatcgcgcgtaatcatcggccggcctcctccagtgtctcccagccctggcggacagcccgggtcccagcctaggacccaggaggatgggtgttccgcgcagcttccggggctctccccgagtcccaccccccggcccgccccgatggacttctcttcgcccactcccatccctagaccacatctcggcccccacagttcctgacatccttgcgcttcacgcaacatcgcggcccatgatcatgccccaattcccctcacctctaaggcagccttctccttgccgcctcccgccttccgagcgtgtgcaactccagttgtccccgggctcccttccagcctcaggaccccatctcacacccgcctctcgcttcccgcttcccgctcgcctgaaccccgccgcctctgctccctgtcttgttccctcagcgtggccccttcctccagccgcgggaagtgggagacgctagcgggagcttcctcctcccggcgctcggaggaaaaggaaagaccaagtagaaagggtcgccgctgcggcacgcgagggagctagtcgccgggctccgcgctcccgcttgcgtccctccagccccctgggcctcgtccggggccggatcttctcgggcaccgcctggtgcgaggagtcaggactgcgacctcaccgacctcctcccatccccagcctgggattgggtgggatatctgggatctctgagcttgggtgtcaaaaaaatattgggggtggcatttatagtcactatcgtccctagcttgagggaggcgacggctgccttccgctcgccgccccccggttttcccggctccgaccctatcctctaacccgtttcctgcttcagctgaccacattgttttcctggatgtg

SEQ ID NO: 720 - DNA, 4001 bp, Homo sapiens
cagttaagaaagtgaaaaatggtcctctggagaataagacaagggatatagaaaagctgggcaaagaatgactgcttttccttataagtctgtttgtaatacttgatttttaaaaacctgcctacatgtattacttttttaatattactacagtaaaaaggaagtggggggaagctcatttattcttccccctccctaaatattaacacattttattttgagaaacatttttactaattagattctggatcattaagcaatctatgctactgcatttaaaaaacgtattgagtaattcacccaaagtaattttccctataatggagcattccaaatttttaagcagaatagaaagaaaataaagcaaacactttaattggctgcagagatattcttaaaagattatgacaaacctcggccaggcgtggtggctcacgcctgtaatcccagcattttgggaggccgaggtgggtggatcagttgaggtcaagagttcaagaccagcctggccaatatagcgaaaccccatctctactacaaatacaaaaaaattagccaggagtgatgtcgggcgcctgtaatcccagctactcggaaggctgaggtaggagaacttctagaaccctaggggcggaggttgcagtgagcagagatcacgccattgcactccagcctgggcgacagagccagactccgcctcaaaaaaaaaaaaaaaagaaaaaagaaaaaatattatgacaaacctctatttttgcattctaactacctcattctttttcatttaatattactgaggaagttgattccaaacctaatcattattcattgaaaaactaaagaaaaaaaaacaaaaaactagtcatttcatttgctttcagaagcataataaaaataaacatgaagggggtttcatgattattcaaatttatagacggaatctataaaacataaccaaaaatattgtcctgtgtgatattacttgctcctctacattccaactactggggaattaaaaataagtgtcataaacagtttcttagacatcttaaaattctatcctgcaactttgactttataatccaacaggaaggaaagtctgaagtatcaaaaagaaaattgacgtgaagcacaaatctatataacctaactctgacactttgaacagagcaaacatgtttagctgcaataacaacaacaataaaacaacaataataaaggtttcaaagtcctgtgcaaaaacaagctgagtcttccctctggaaaatagataatttaacaactttacagaaggacctgacaccacaatactcccgtgctaaattattctcttaaagcacctgcaaagcagagtaatctttcacatccaaaagccactccctgctcaaaaccacccgcatccaagccgaacctgagacctcaccagctgccctacctccagcgcgctctcccccgaccccacagcagcccctcgcggagctctcctctgctgtcttcctttttctttgccaagaacaccagaaaagggggtccctccagctcggccgtccagacccttcctctggctcagagcagtggcgagcccatcccaattccgcgcttcctttgcaggcctccctctggcgtggggaccctcctgctttcctatgcaagtactaaccaggcccgaccctgcttagcttctgagatgagacgaggtcgggggtgttcagggtggcacggccgtagaccctctggctttccgccgctccacctggcactccgagagctaacgccagcgatggagtccgcgccacccctgccccgaggcctctgccccaactgcgtggccgctcaactctccgcttcctcccgcccgcctctccaccccaccccgcccctggccctgtacctggagctccaggccaggtacagctggcctgcccacgccagcttcccagctgatgcctggcgctgagcagcagtctgacatggagaaggcggagtccttccggggtcaggagtgcgaaggtggagagaaagtggagggggccttccaggctttctgcgtgagggactacgtgtgaagcagctcccgccatttttgtttagggtagaggctccttcctcgtcaagtggatgcaaaaactatattcgaagaattgcatccttttacaaaccggtaaaaaaaaaaaaaaaaaactagtattgtagttcgtaacctgtcgggggatctagaacggttgtcaatctggtaaaaattatggagggtttcccctggaaaaaaaaaaatgtgtatacacatgctcattacattaaagaaaaaaaagttacacaatttcaaaaccctgaaaacaagattaagaacttctaccacaggccctcagccctcagatgaatgagtgttaagaggcattccaatccggtatagatgatgcatttattattgatttcatgtcctctttacctttttttctgtgtttcccactgaattaggcaaccgaagaatattgaatgtggcaatttattggcagagtagtcacctctctcaggttctaatacatagtaaactaatagggggccgggttaggaaaaaataacaacaacaaaacccaaggtactgtttctacgttcagtcttcagtcaaaacattccatcagaactgcagatttaggcggggcacggtggctgaagcctgtaatcccagcactttggcgggccaaggcgggcagatcacttgaggtcaggagttcaagaccagcctggccaacatggcgaaaccccatctctactaaaagtacaaaaattagccaggcacctgcctgtaatcccagctactcgggaggctgaggcaggaaaatcgcttgaacccgggaggcggaggttgtgtgagcccagatagtgctactgcaccccaacctgggtgactagagtgagactctgtctcaaaacaaaaaacaaaacaaaacaaaacaaaacaaaaaaactgcagatttaagaattccagttgctgagcatatttgtggtgaaaagccaaaataattctgttttcaaaattcccatttaaccaaatggaaaatagaatagtagtaccaatttatgatattattagattaataataactaacgatccacagactgggttttatgtgaaaatattttgcacttatagggtaaatggagctcttgagacttgaagaacctgaaatttgtaaggctattttcatttattttcccaatttcctcctctttcccatttcccacagcttccaaacattcaacgtaatgagaatagcagtaatgatgatgactaccactcaacacaactttcctgagaccatattatctccttaattccacaataaacattatgagaaaaatagtattacacggtgggtacagagtttattctttagcatgagaataagatatgtcacatttaggccaagtgaggtggctcacatctgtaatcccaacactttgtggggccgatgagggaggatcccttgaggtaagaagttcgagattagcctgggcaatagcaagaccctcatttctacaaaataataataaaatatataaaatagaaatatcacatttaatttatgtttataaaccaaatgtaatttgctgtaagcctcccttcttctggtttggcagagtactgcactcaatcttagccattattggatatattagttaacatattcgctacaagtaaaagaaaaccaaacaagtagtggtttaaaccagaaggacaggggactcaatgtcttctgatattggagacaaggaaaaaaaaattggagcctggattaattctgaaggccagtacctcccccagataaccaagccatcgtgtaatgctcactaaaccagagaatggagttcatggagtactaccagttgtttcttctgtacaagtactgcaatacatgctacagcaaccattaatgaatttaggggatcctatctgcataatatcaaaacaaaactgtgaagtcagactgcctgggtttgaatcc

SEQ ID NO: 721 - DNA, 4001 bp, Homo sapiens
aaaaactagccggacatggtggcaggcacctgtaatctcagctacttgggaggctgaggcataagaatcgcttgaacctgggagggaagggttgcagtgagctgagatcataccacttcattccagcctgggtgacagagtgagactccatctcaaaaaaaaaaaaaaaaaaaaaaaaatttaagcaatcaatggataataactaggaaacaatacatgtattatatacccttcattgtatatctcaccccacacatgaattaactcaagatggatcatagacctaaatatttagcaattatagtctgtatataatgtgattgattacagatctgtattttacaatgcaactgattatagcatctgtacatgaaatgcaatcaattacagattttaagaggaaaaaagcctattaatatctttcatggtcaacaaaactctacctctcctgctggtactcagtcctgcagtaggtgcacttcacaacagggtgtgcaatccgacattcctgaaatgaaatgaggatataattttaaaaggcagtcacaaatggaaacagccttcagtaggaagccgacctgggtactatttctagcatagctactatgcttgagtgagtcacttaaactttctgggccttatttttctcctctgtaatactggcatcacttccctactgttgatgtgggagttaagtaagaacttatatggattatatggaactagccataaattgtaaaacaaacatatatatgaacaagtcccagactgggaatcagaagccctgaattccaggcctggttcttctgccactgtgtgattttgcggtttacttgtgaaatgaaagtgctggattaaaattattatttatatatacataacttccttaaaatcatatatacatattttgaggccaaaaagggcactcaagcacttgcattcccccagacctggtatataaaaactggcaaatggaaagtcatgaccatctgaggcaaaagtgacaattatgagttatccaaatcagagacacaaactggattattggataacctcaacattattcttcagccagtttggtgactttttaactgttgcctcacagcacctctagtcacttaaaaagtaaaagtgggataaagcaacttaaaagaaaaagagaagttggaccttcaggagcaaaaactgatcagcagctagtcagggaagaccgaagaccaccaactggatgctgagaagtgatccctcggatctgtgagcctgactgtggggcttttttaaaacataaagccttgctgcctccgattctgagactggccgaaaagtgagatgcttaaaaaaaaaaaaaaaatcaagccttgctacctccgattctgaaactggtcgaaaagtgcccgtgaggagcccgagttcgacacattcctccaaggcagcacccaactttggagttcagtcccaggaggggcaggaggtccccaccagggagaccgcggcggcgggggaggcagcgcaaagggatcccgaaggcgaccagtcagggcaagcaggggacccgctgtccctcccccgacctcacggggtccgagaacaatccccacggttgctaagcacccggacacgccggccgcgggagcctggaccgggtcccggctcccgcacgtgccccgccggcccccagcggggtgggtgcggctcctcagcctggcgggcctgccacaccctgctccggggaccccgccgggcgtccccacagaatctggagctccgggccgcgcctcctgcgtccccagttcccggccgccgccccagcccgcgcaccttgcacagctgctgcccctgagacagcgcctcgaaggggaagcgctggtggcacttggtgcaggcgtagagcgccgccatgtccggcccgggccgcgctcaccgacccgccggcccggcccgccgatttatctgacagtctgaggcacaacccggcggcggctgcaggctgctggctgcggcaggcgggcgggcgcaggcgggtcggggcggacccgggcgggctggggcgggcacggcgactctagacgcccgctcactggtgggctttgacgtcgatcaagtgggaaggggcggaacacggagctttcgcccactctgattcggtctggcctggagtacgccactgtgacgctccaggccgcgattatgtaaagcgcagtcacgcgggggcgccacctggaggggacaggctcccggccgggacctcggaagagcttaggctccgccctacttgctcagcgttcccgccctcgctccgcctctccacggcctcaggcgcatctgcgcttctcgcgataccttcggggatttgtgatgttttggtttccatggagctgccctctgggagcacgaggggtacaattggaacgaaggcggcgcacagttaactggaactctgcagccgtccaagcccaaagaaggtggggagcttgggaaagaagttcctcataatcggagcaggaggagcccgcccagcctcgctcaaaggaggagacgagactctgagggacaatttagaagtgtgtcctcaatttaagacacctaaatagggaactgtggggctgtgggccttaggagagaaaaggagagccccagagagagcacccctatgctgcggaagagggactaaagagatggcagtccttccaggagggattggacagatattcaggcgtccggtggcctgcaggcccccatcagagtgggctgcaattggcccagacctgcttcctactttgttttctccggtttcacccccagcttctctcgcaagcaaccacctggtgattcctgacgaggcctgacttccggaaggcaagccacgccctccgggctcccctgcctctctttggctccagcttggcatgtataggagctgcccaaggaatgacagacttcttgttcttgaggtgttggcaaagcttcctgcactgctgacctatccaagtcctgccttgtagctgctcttgggcataggttactcttggctctgccaaccacccgtacaggactaattgcagttttacctcaacgtgcgctttttacaattaaaaactgacttaatggcttctatttccctgcctcaacaaaaaaaatttactctctctgaacccaaatctggctgcttccttgtaggatcccccaaagatgtgcattaatcattaggatcagaaagcaaagtttccaaatcactgttccacaactaactacatgaccttggatctatcactgaacttctcacggcctcgtttttctcaattgtacaatgaggtcattgtgagaatcaaaaccagtacatgagtcggggcgggatggctcacaactgtaatcccagcactttgggaggctgaggccagaggatcacttgagccttgggatttaagaccagcctgggtcggccggacgcggtggctcacgcctgtaatcccagcactttgggaggccgaggcgggtgaatcacccgaggatcacctgaggtcaggagttccagaccagcctgaccaacaaggtcaaaccctgtctctactaaaatacaaaaattacccgggcgtggtggcaggcgcctgtagtcccagctactcgggaggctgagacaagagaattgcttgaacctgggaggcagaggttgcagtgagccaagatcatgccactgaattccagcctggactacggggcaagactccgtctcaaaaaaaaaaaaaaaaagaccagcctgtgcaacacagtgggaccccatttctacaaaaaaacttttttaaaaattagccgggtgtggtggcacgagcctgtggttccagctactcaggcggctgaggcgggaggatcccttgagcctggacagtcgaggctgccctgagccatgattatgccactgcactccagcctaggtgacagagtgagaccctgtctcaaaatatatatgcaaatacaaataaaaacagtacgtggaggaaaatgtg

SEQ ID NO: 722 - DNA, 4001 bp, Homo sapiens
ctaaaaagatggtttgaccttttaaaatgggaactcccccaccccatatccatattaaatagacgaaccttgggagctctagagttttagattaataagtgaaatgaggttgaatttccagaaaaagggtttccctgtaggctgcagactggctaattagggtgttctagacctacattgtaacagcaggtagaaggcaggccctaaaccttttagctattgtcgttgccacctgctcagagtctagttctgaaaggaggcgggtgcggagttatgaaaatttggtaaatataaaagtcccggacgcgaccgcccgtagcctgcggcccctggcggttgaggagccgcggcgatccttggtcttcaccgcagcagccaagcccggcgcgcaccaaccggcgctgctgaaagttggagagctcccagctcgccgatagaattcggcggtgggcgccaggggaatcccttccagtgccgcaattaggaaagttttaaaaagtaaggaccctagacagacaagagatccatcctttcctttagcataagaaacaccccgcgccgcgccagccgaacgctgctcgcacaaggctatccgcccttcttggccgggacgcactcggtgccttccagctccccaccagaactggtccagggggcgcggaaacagagaggcaactgtgtccggcttgtggttccagacggaaacgcctccgggctccctggcccgggggacaagggttcgaaacttcaacagtcgcgagggcaaggacagaactaccaactcccgctcggatgcccgggacctgctcttccaagcccgctccggtttctccaaaggacgcgcggcacagcccatgcgcccccggcactccactccactcctctatggtttcccccaaactcttcccggggagccccacaaagcacagacggcgccctgaaactcgccaggcactcgccagccatccccacctccgcctctcgaaccctccttgtcgcgttcttcccgccccgcacctttctcctcgcgtttctgggaagtcagaagcaaaccacgagaaaatgccttcgcaaggagcctccctacacccgccctgtcactgaaacaaaagcgtagggaggagggaggtgggagaggaggcgggaggaaggtttagaaagacgatggggacagcagtaggaaggagctggggaggggggtcaaggtggcaagcagagctgggggcccagagtccgctcccgtgccgcgcggcgagtcgcttacatgcccaggtcgctgtaggtgttgaagaactccatctgattgcacgcctgaatccagcccaccacccaggtctcgtggcgggggatggggggcatgaccacgcgggcggaggctttgaagtagggggtcttgtagcgcaggacgatgggcgaggtctcctcgatgcgcgtggggcactggtcgatggtggcgcacacatcgtacaccacgatgttctcgcgccggatccgcgccttgcaggtgatgctttggatacagcccatcctgcagcccggtgccggcacggcgcggcgtggggcagcgcgggggcccgcgcgggcagccgggggcgcccgtcacgccggcatggcgacgcgccgctcgctcccggtcagactcagctcgcacctaggagcggggagccgccgggcatccttggggaagccccctcctcttgcagccgcgcggggtccccgctgccccgacgtccgcccacgcccgccccctcgctccggcagggcgcgcggagggtgcactcctaggaggcggcgggtgccctcgccggctccagcgcccgggcggagggcagggaggggagcggcgctgcgaggaatggtgcccaccccgggccggagccccccgcccctcgccggagaggaggaggcggcagcggcggcggcatggagccgggggagggcggcggtggcagcgcccggtctgtctgcctccgcggcggcagcagcagcagccgccgccgccgccgccgctgcatgaacctctgcaccacggctgccccccgcgtgcagcgcacccagcggcgggcgagcgggcggcccaagaggcaggcggaggcagcagcggcggcggcggcgaccggagctcccgccggccccgccccgtagccggaccacaccgacactcctcggcccggctgcctcggcccggggggcgccaggaggctgtggcccggggtggagagccccaacggctggagcagcacaggacgtgctccgcggaggaaactggctgtacgccatgagttttgtccctattcggctgccgtccgggtggggggggggtaatgtgtaagggtgggggtgtttaaagggccgctagcgccggggtggggccccgcacgtggggctgaggcggggcggggccctggtaggtggtgccctggggtgggggtgggggactagggcgggcccaagcgccaccgggtgggtgaggccgagcagggcgcggcgctgtccagagtccagtggggaacccggtagcccagtaggggctgtagagtgagtgtttcgggcagcagaagggttaggggaacagctttatcagagattggtcgttattcagaatatagcttgttggattagatttaggcttgagcccttttagtatcctaccttcagaaagggtgaagggcgggctccagcagcgttactaaatgcagtgtatttgcctctttgcctgactgggtttgttctggaagctcttctttccaccactgtgtgtagtggggataccggaagaatccctccgtactccagcactaagtctctcatatgccagagttttggcagacattgggcattgtgtacagtatgaccacggtcatgtgtctgatactgcagtctaatgtgccaaacaggaagaatatttagcagatgcttttactaggcatcttcttacatttttattttcaaagccaatagcttctaagtatttcttctgcgatcattgaacatttgctggatctgctgcccaagtgtgaaatactgactaacaggccgcaggaggtgctagagttagtctttagctaggacaggtgtgacgagtaatttaaaaattgattgagatctaaaagcactcttcatccttgttttaactgttctgacaccttggttcactttatagttaacaaaaaagcagtttttccctttgatgactcgtctctctcattttaccgtgtagccacagacctcaatcactggtcctttcattcagcaaaggctgactgcctgcctggcaggagccaaacatagtgctaggtactagggattcaaagttgaaaaagagcacatggatcactggagaaaataaacctgttaacaagttattatagtaaactgtgacacctgctttagtggggttgtgtatccagtgccgtggaaggccagacatgtaaatctctggccacatgtaaatccctcagtggtcagagagccactcagtggctctctggccactgagagatttacgtgtgactttgctcaagtagtgacatttaaattgaatactgacagactgtagagtctcactgaaaagagaaaggtgaatgagtagtacaggaccagcatttggcaaatgcaaaatgcatagagatatgaaagaactcatcctgtactgagggggagaaacaactcacagtcaaggcatttctcaaggtgttatgtgtcgaccatgggcatcagaatcactgtccaagaatcaattggttgttgatagaccatatcttttttctttttaaaattaagactacagactttattttgattttactagtttttccactaatgtctttttttctctagaatctaatccaagatatgatgttgcatttagtcattacatctccttattcttctcaatctgtgacagcttctcagtctttctctgtttttcatgaccttgacatttttaaagaggactggtcagatattctgtagaattgttcctcatttgcatttatctg

SEQ ID NO: 723 - DNA, 4001 bp, Homo sapiens
agagctctggtccaaggcgtaattatacggatgtggttgtgcttcagtcacaccaggagggacctggaaaaatacttctgggaatggcacgttgactcccaagccaccatagcaagactccagagcatgtttataaaccacagcttcacaacaggagcggccccgaggtttttctatctcttgctcaagtatggaatttaaataatcaaagatgatcttcctacttcacccccgtggttctgctatgtccaagttcagactgtaaacacactacgtgtagatttatctaattaaaatgcagttcaccagctgtgtgatgcttatgtcaatgaatgttttttaataaattaaaaacggttggcttggaatttaagtggttctgtaagaagcttagaaaatcttttcagtgagaattggaaatcacttcaatgccagctacagagtaggaagacaatatctctttgattaaaagtgttaaggctgctttctgaattcaattaagtcttagttttcagaacagataatgctcctgaaaaaaaagtatgcataccctgaatttttctaaacaatatcttaaatgcactagatacatatttaaaagattcctataacaatttattttttggcaaatttagttttgggaaaaggcagctttcctaatgttagatttcttaacaatttacctatagggaaaggagacaacctggacgaggtgaatggaaagggaggcttttaaaacgaggggattgggaggaggtgatgggggccagtaagatggtagaaaagaggaaaagtttttgatttcttcttgcctggcctacgcctggccgagaaagctggggaaagactcgctgttgcctaaatccctgcccttgtcctacttttagcgtcaccctaaatcatgtgtgttctggtccacaaacagctaatgtacttcccaagcacagagaaacactgagcccatggtatggagcttagacacaaggcgaagaactcacatggacagcacccagaccgggaggacagccacctcccacctttctcaagagggtttgggcaatcagcttcgcggggctgagggacccggccgcctccctcgcccggggtgcgcgtctgctttcgcagccatctgtgcgccggggccatcccgcggtaatcggatcacggacgcgcggcctggggcgccggaaagggggccgggctgttccaatctgctgtctacactggcggcggacaaaagttgtcctcttcgtggtaggaaaacgcaatcgcgttaatccgttgggccgctgtgaaagcctttcccccaccgggaaggtctgtttcactcggggagaggtgacaaggccgcccccgcccccaggccaggcacgaaccccgcacagcgcttccgggcgcccaggtttccgagccagcggggccggactgagggcgccgggcataagaaagccgccctctgcgcgcggggctctcccgcgggggttccaatcgtgggcacggagcacgcgagaaaaatgggggtcgttgggaggacggcgccggcgcctggggcggaggagcccgaaagggcgggtgggcgcggggacttccggacagagcgcggtccccgcgaactttcccgggacggcgagcccggccgggaagagccccagctcgcggagccccactcaccatctctttgcggagcagcgccagagcggcgtccaggttgggaggcttggcgggcagcgctgccgcccgggccccgccgccgcccgggcccccgcggctcagctcgtcctggatgcgcgacttctgcgcgtacagccgctccaggtgccgccagcccccagacgcgccgccgcccgacgccgagtgcagcagcccgctcaagctctttggcagcgggggcagcccgtccacccgcagcccccggaccgcgccgttgcccgcggccccgggcgccgcccgggccccactcatcgcgccgcggcccggccacgcgcctgccccgctgcagcgaaccaaggctttcccccggcccgcccccttcccggcggtgccccgcccacttcccctcccgcgccacgcccccccggccccgccccctctcctcgaggcccctgcgcgggccccgggtccgggtggcgtccgcgtccagcagccgggctcgcctccacccgggtctcctcctccctcgcgcccctccagcgccctaattcatctccaactccgcgtgactaccctctaaccccccgactcacctccagccccgtcacgaacccttctgtgccactccctagctccgaacctactaagccccccgcgacccgcagcttcccggttcacccccatctctgtccccacctcctctgaaccacctcccagcttcccggctcacccctagctccgaaccctctcacccgcgccaccccgaaccccagcttcccggctcacccgcatctctgtccccacctcctctgtgccaacccccagcttcccggctcacccccagttccgcccccacgccctctgtgccaccctcagctcactggctcaccctcagctccgaacccactcaccccccaccccaggcttccggatcacccccatctctgctcccacctcctctgtgccacccccagttcactggctcgcccccagccccgtctccactccctctgtcccacccctcaacgcccgctcacctccaacccggctccagacttcccccttacctgccagcgctcctcagctccttgcctcaccgatccctgccctgcccagggggcggcccagcttcagatcccacgaagcaggccgttgcagggggtgggggtaccgaggctctggctcacaaccggcaggacgtcgagggcaggaggcctggctctggtcccaggacccccggccctccccgagggcggaatccagcccgcctcctgctgcctcccactcgccgcggggggcggctgggggccccagacccgggcaggtcgctccttgccgccgggcgcgctggccttctcagcacggccttgtccagcagtacccgcagcagtcagcaagaacgccagacccacttttgaaacttcaaaacactagtaaacatgcctttcattctggccataaacacaagagtaactctaagtggaaatgtcaggaaaccagagaaagggattaaatctcggaaattatccatcagctcaggcaaaaataaacacgacgcacacctcagaggaaaagagaagagagagagagactctgcccctcccaggaaaagtaaaaatgacaggcagttataaccagattagagatagaaaagatcaagaagtaaacgctacagcccaaccgcagattaaaaactaatgcagtgtatagattggataactttaatgcccattcattattggctttaattataaagggatttaattttctagctacattcaaggggatcaaaattataaagtgttctgagcacttcagacacccaacataaaagagccctgcactttgggttgttttataccctttaccacctcctagagcccaccccagaagcagtgtctttgaaattggcacaatattctccctggacggttgcaagtgggtgagactgatatgaagaagctttagtgcaggcggtgtgattgacagcacccaggcttcccaccccacccactgcccagaattttccgcctcttcactgtgcctcaccttctactaattacctagtcacatttctggatgtcaggtatttattcattcacttatgtaaacggtgggtgtcttcaggagagtgaccagtctgcctgtgtgggagtaagggagaggaaggggtgggaagcattttgacattcggttcacaccttagcatgaatttttttttttttatgagacagtctatcactcaagctagagtgcagtggcgtgatctcagctcactgcaacctctgcctcctgggtcaagcaattctcctgtctctgcctcccaagtagctggaattacaggcatgtgc

SEQ ID NO: 724 - DNA, 4001 bp, Homo sapiens
ttgtttctcttccaaaaaatgaaatggctggactagatatattctaagcttccttccacctctaaaaattcaatgaatctcattgtaaatctaaatctaaaatttcaatgaatcttagactagtgaagcacactgtaaaatctatctgtacagagcttgcacaactatgccctgaaatttcatgagatcagtgttcaacctatcatcttcttgccctagctcccatacaaaggattttcctttgtgatcaagggtacctcatgactgcctctgtgggtgaagctgaacatcctttgaatgatggctgaagtcttcccttaagcttctcagtgacttcaagaaaaaccattctaatgtggggaattgattatccatgttttaaaagcttacatcctataaaacatattgtaaataaagcttcaatgtaatctctttagggcatttaaaagaggaaaggacgtttctcagaaacatctgtctctgccttcatttcgccttctcttcccaggagttacagccactggcgtgtgtgccaggaccaggatgtctgtggaaggggacaggcctggagccacttctcagggggcaaaggtccagggttgtatatgtgtgtctctttccaaagtcaagtggaagtgattttgaattgtgtgcagtgctcagctatattgattgtgagcaattcaattcacttcacatttttaaagcagctcaaggaatcatagaccagagattctgaattagccagaattcctcttatagtgtacagaaaccaaagtgtgggacagaatttaaggcattccattaacatagttctgtgctgaggatcatctttgggaactcaatgtacatgcgaaaaaagactcacctatttgcttctccaaagatgatgctgtgtgcatctggctggtagactagtaaaacagaaagagaaaagatgtataataaaaataaaattctttaagcaaaagaggcagaatcgtcaaataaaccaagccctggaaagagaatccaaatacctcagaagttctgctaacttgggctttggccaagcaattttgcctcactgtccctcagttttgtgatttggaatcgtaccaattttcaagatttagtttggtcatctgaacaaatttacttccaagcaaaacttaaaagttttgtttgtttgttttttactccttaaatcaataggtatgaggcagtaagtggttcaacagactgagttgacaactgaggaaagacaaactgttgggctctgattctttacaaagtaaaaaatattcccttcacccctatgagcctccatttctctgtctatagaatagaataactagaacaacccatttctaagaaaaaaaaaaaaaggattgaaaagcactttgcaagccaggcagtgggccctccatccccttatgcctggtgcctccagggcacagcagtctgccggcaggcttacctctcggagttctgccagctccttctgtaggtggaagagctgaaacatccccaggcccaatcctaccaaggcaaccagaaccatgaaaaacatcacaaggagacacaggcctgtgctgtggttccctctcttcttcaggggtggcagcggtagtggaggcagtggtggcggcggcggcggaggtggtagtggtggcggtggcggtggtggtggtggcctcctttgaccaggccttctgggcacagaggttggacagggaagaactgtgcctggaggggcccagggagagctggcactgctgtccacccagtagatctggggatatgggtaattgaagggctgctgcatggcagctggtgagtcaggccagccccagcaaacggttttacttcttctcagtcctgtagaggctgaggtgtcaaggacgggaccctgttgctgactgctcaagaggaggcaagctggatctctcttatagagtttccatagctaagggaaacacctctgtctttctctttctctatctctctctctctgattctgcttctcaaagaaacacccactcactttgcagctgaagctgagaagcctcaagaagctcagagcaaacccctggaagtttccgcccacaattttctgataacagccttcaaggcctcagttgctgtcgctgtgctacccaaacaggttagtaggctatgctcaccttcctgggatcctgcagagcaggtcagcatgggggtatagccctgttagtgtgaactgctcccagctacaggagaatggtcagtggggctataattttatgaattataattgcatgcttttttatacattataattgtataattttaagaattctaccatatacacaaccaaaaaactatttaaaaatcccaaaataactctaacaaaaattgttcagaaccgtattttttaaactataaaaattttactgaaaatggctctgaggggagagaccatggagtcatggccagagaagtcactcccacattttagtttttgcaggaggaaaacatctgttgccatcatctcttccccacacacaactaccatttaccctgacctgccgatcaccataatttacaggttaaaaacctgctacacccactttagaaattagatcagaggctgcaaaccagtggaacccacagagctgctttgtatttcgcaatgttttcattttcattgtttgcccagtttatttatttacttatttatttaaatagagacagagtctcactctgtcacccaggctggagtgcagtggtgctatcgtagttaactgcagcctcaaactcctgggctcaagcaatcctcttgccttggcctcctgagtagctgggattataggcataagtcactacacctgactaatttattcttttttttttttgtacagatggggacttgctatgttgcccaggcttgtctcaaactcctagcttcaagacatcctcctgcctcagtttcccaaagtgctggaattacaggcatgagccactgcactgagcccaactgaccacttttaatatcaacattaaaaatattttaaaatatatatattaaatacacattaaaatacatatttctattctgttttgaaatatcagaatatcagacaccctcgaggccatctctgcaaacccaatcagtgggaagtatgtagcagctgcccctgagaatgagagacaggagttctgggtcacccagcctccaccactggcctgtgtctcacacaccacctcactatctgaaaggcctgcctggtccctgccaacatttctgtgtgctgcccctgttatggttgccagatgaaatacatggtgcccagttaaatttgaatttcagataaataatacattatttttaggacaagtaggtcttaaacatgtccaaacatggaatatactaaacaattattcatcatatatctgacattcaaatctaactctgtgtcctatttctttgttttgcttttttttttttttttttttttttggtagttgttgttgttgtttaaagctggcctctctacttgggctcatctcaccatttcctctggcctcacataccatttatatgccaataacttccaagtagttagcttcagtcctaatcattctccaatagaagccaaataaatcccccataaatcaaaatttttcatttttttcatgtttattacttttcaaatttcgttagtttttatatcatgctttgggatttccattactatcattcaggcccactcacctgtaccacaccaaccccaagggtactatttctctgatacattctgcccatcccaccccatccccaaccctgtacaacccctttctcctgaggccactctttctggtggcaacttcatctcctttcttttcctctcccccaacgtttaactggtcacccaggactgtcgcttttacctgagacctgttccttaccctcccctcagtgtactgcccccctgccccatcctcgctactcccatttttcttactgctgttgcctgggg

SEQ ID NO: 725 - DNA, 4001 bp, Homo sapiens
caaagggaaggaaagtcatttcctgtccaaaggaaggaaggaggcagggatccagccagccacccagaccagctagaggctgcagccttggggcagagaatgtgcagctcagggggggtcacccccacagtcctccttcctactccttgttccctacaaagaaaaaaaaaaacaaaaaaacctctggggccacctctaagctctgttctttttttttttttttttttttctgagacagaatcttgctctgtggccgaggctggagtgcagtggcgcaatctcagctcactgaaacctccacctcccaggttcaagcgattgtcctgcctcagcctcctgagtagctgggaccacaggcacacgccaccacccctggctaatttttgtatttttggtagagacagggtttcaccatgttgaccaggctggtctcaaactcctgacctcaagtgatccgccctcctcggcctcccagagtgctgggattacaggcttgagccactacacccggcttaagctttgttatttatttatttattttgagacagagtctcattctgtggcccaggctgcgcagtggtgcgatctcggctcactgcaacctccgcctcctgggttcaagcgattctcgtgcctcagccgccgaatagctgggattacaggcgcgcgccaccacacccggctaatttttgtatttttagtagagacggggtttcaccacgttggccaggctggtctccaactcctgacttcaggtaatccgcccgcctcggcctcccaaagtgctgggattacaggcgtgagccaccgctcccggccagctttgttctttaatgaccggataaagcagtctacctttgggtacggaattaaatttaggcagaagtggcggggtgtgccccaacccctcccaccctgcaacttaggggaggggttccctcaacctctttcccaccccagggaaacagaggaggtagagagctgggttcacacgcggccccacttctttcctgcggggtgaccccgaataggtcacagaaactctctggcctcgttttttcataaagtgagaatgagtgtgtccctagggcggctgagaggatatataaggaaagaagactcagggtctaggcccttggaaggtgcaaagagaaggacagctggttaggcagcagctgagagggagaagcagcccgggggctgggctcggctgggggtgcctccaggacccggacagaacctacagcgtcattaagagcaggaatctgggcgcggccccagcctctccccggggtcctcaggcttgggtgggaggtgaggggtaggggccgacgccaagatcatcccagggcacacacctgggtatcgcccatctccacaccttctcagcccccgacgggcgcgtgaggcccagagaggagcagccccgggacccgtccctccccttgcctgaccctggctaggaaaaggggcctggagcgcccccgggctccggaaacgcgggaccctccgcaggcagccgagcagggcggccgccggggtcaccgctgggcgccgccggagctttaattcgatccatgtgcgggactccggccttttgtgcgggagcttccgccctgcgcgccgggtccccggctcccgctcccgggctgggactcggccctccgccggcctcactgagccctcgccccggacctgccgactccccgactccggggagagagaccaagagactgggacgcaaagggcgtgaggaccgcaccccccacccgcaggcccctccaggggcgccgcgccgggggtcccggctggcgaccgagcaggctccggccgagcactgccggcgctgtcacctgtgtgcaccggggacagggacggagggacgcgacccccacccacccggcccgcttacctgggccgcccgcgccccggcggctccgatccgacgcccgagccagcggagcccggagccgctgggcctcccgtcccctccgcccgtccgccctccccgccccctcggctccctccgccccgccgccccgcgccgctttaccataaaaggtgaggctcggggggagggggcgcgggattcccgccccgcggaagcggcccctacctgccccccaacctgcccggccgcgccccgcgccgccccttccccctccctttgttccctggacgacgcctcccctcccccttggcacaggccagggggtgggaatgggggggaatggggatgggggcgatgggggaatgggagggatggggagtgggggtaggagaatggggagtcggggtgggtttccttccctccccgctgcccatcccctcgcgttcttcatggaccccgagtggtccctgccgtcccccttccctcgctctcctgggttggcaaccccacctaccctgtccggcggaggtgagcgcttactttggctctgggatccgccagggtcttgcgtcaaaccgaccagggttctgcggccgtttactaagcgtgagacccggagcagtcacgccacctcctgagcctcagtgtcttcatctgtaaagtggaggtagccactgcctacctctccaggttggcctgaggataaaaggtgacagttacagccaggactgtgattaatagtggttaatatatgctgggttgggggctttttccgggagtgttcctgagggtgggggtctcggagacccccagtggagcaggtcaccttgttctgctctcctgagcggtaagccctctgcaggtgggtcccggtgtcccgggggacaggccgctccaggagctctggaaggcagggcccggctggccctgtggctgaacccctccctccacatccagtgaccctccccctcccagctggagcaattaggacgggagcgggaggggaggcagagcctggactctggggcccgggatggggccgggatggactgcctgggtccctggaggcctcagggacattgtggggaaaggaatctgggtctgattcagaggcagacagattgttcttttgattaaagccacagtggctgaggcttgaggagcgctggacccagcgccatctgcggggtggccagacaggatctggcccgtcctgcaacccctcagctacagtcacccctccagggtggctctggggctgtttctgagggaggctggtttatgagggtcagaggaggctgcctccgccctcacccactgatcatcgcccctcccatccctcttgtcgccccttttcccatttgatcctctcagccaagctgcagtaacagcagcagtcccaggagctgccattgataggggctttctaggtgctggtacccatcctcatccccatcctaatcccacaagagccatgagcaccagggctgatgattcctgttcacggtcaaggacactgaggccccgagaggctcaaggccacactaggggcaaatggcagagccaaattcaaaccagagccgctgtgtccctgggcacacagctctgctagtctcaagaacaggtaccagtgccatcctttacagaatcggaagctggggcttggaggtgctgagagttctgtgcagcagggcgaggctgggactcaaggctgtctgagtccctgctcggctcattcctggcttggcagtgatatcctgcccctgccccccaaaactccagctttgcagcaccctttggaggagacttccccataccctctgaacgacagagacgggaaggactcaaaggaggaaggtgcgatctgggggttttcaggcgcttttggctgtagaacccctttgcaaatgcttagtgacccagaagtttatttaagagataaaagtggagctgcctgccctcacctccatgacagcccctgaaccacctgttgcacccccaggtgggatagtgaggcaacgaagagttgatttggggccttgttcaaggtcacactgacttagtctaggacccaggcttcccacatttgctctgggacagtccaagggga

SEQ ID NO: 726 - DNA, 4001 bp, Homo sapiens
cctggtgaaaccctgtctctactaaaaatacaaaaatcagctgggtgtgatggtgggcgcctgtaatcctagctacttgggaggctgaggcaggagaactgcttgaacctggggagcagaggttgcagtgagccgagatcgcaccactgcactcctgcttgggtgacagagcgagacttcgtctcaaaatatacacacacacacacatacacacacacacacaaattagctgggcctggtggtgagagcttgtggtcccagctccttgggaggctgaggtgggaggattgcttgagccagggaggttgaggctacagtgagccgtgatcacaccactgcactgcactgcactgcagcttgggtgacagaataagaccctgtctcgaaaaaaaaaaatgcaaattctcaggctccacggcagatctgctgaatcagagatacttggggtgggagcctgcggctgtgctggaatggacccagtgactgtgttggtacaggcccgggtgatgctgctgctgactcagcggaagtgagagaaagaggctccgatgagctcacggagtcaggaaccaggtcttggagaggcagtaagagtgctgtggcctctcccagtgcctgcctcccggtgcagggcccataggctatgatgggcgggcaggaattcaagagagaagcagggggacccgaggccacagggcaggtgggcagaaagggggtcctggacccgctcgaggatgactctgagaggacaagtactaagcagatggcagatggcagccttcggtgtagacggcttcaagcagctggcagcatccccagggcccggggccagcctttgtgtcctgcagtcagaccaggcgcatgaccaagctggtcacctaaaacttatctcacttcagggagactgaaccccaagatccccgtgctctgcttgagggtattaaattggcagacgaaacggccagccagccatgctgaccagtgacaggacagcccttcccaggcaagtttgatcttgttcccacactcccaagatcctcttcccataatcccaataacccatgaaaatgtcccggaaattctgacatctagcctctatttcccgggctcccttgcccacccagaaggggcacatctttttgtttcccgttgatgtgtgaattttgtcaggatgaataatgaatgaatgaatgacgctggagcctgccctttcctccccacctctgcctctgacgtggtcttccccaaagtcccctcagctcttacctccattgaagagctgcataggtgcagccggcactgtggctgcagctctgccaggggttgtccaggggctgggcctccccgccaagccagcctcgggtgtcttcatgggggcaggagcctcccaggggcggccacgccgggcctcacaaactgcctgcctcacttcctccgccacggccacatcgcggcgcgggggtgccagggtgataaagacagacgatgccaccctcttctcaggctttgaggccatggcttcagctcctggtgtggctagggacagagtggggtacagcacaggattgccacccagacacacagccaccctcccccgagaggagagagcctccctcctcccaaaaagacaggccagccaccctaccatctcaacaactcagtccagcacccagcccagccagagaaggggtgggggtgtcctgctggggaagacaggacccaccagggaacttggccacaggggtgagacccaaaagtcctgactgcccctcccccgaacctgcacacctaggggagcaaagggcagccctcaccaatgatcactcttccttgtctcacacccgcgaggaaggaacagatgcttcagctcccagccccagcagggctgacttccgttcccagtctggagtcccgcctgcctgctgggccacaccccaagtgacctccctcacctgggatcagattctcctagaagggctgaagtcctggaggttcaggccagctctgctttgggagggaaagagaacagatcaggatctgccagggcgtcagggctaggctccggcggcagagtgggcagggcacagtgagagctgccctcaccaagaccggctctgccctgagcatgttatactcattaactcataaacactcacacgttatgctcattaactcataaacactcacaaggtggctgcagggcaggcactatcatcacccacctaacacatcaagaaatcgagactcagagagaagtcacctgtccagggtcacacggtggtgaggtggcactggaacccagagcccatgctcttggccactttgctctgctctgacctttctcagccctgcacatgagccagcaccctccttgcttgctttctagtgccagactctctcactccacccaatctccaaaacctgggtcctggttcaggcctgggcagtgggcagggggcaaggggagagatggggaggctccatggcctctggtctcacctcctaaccctgatctttctagagcatcaatctctttctcctttactcaaaaaccttccatgggccgggcatggtggctcacagctgtaatcccagcattttgggaggccgaggcaggtggatcacttgaggccaggagtttgagaccaccctgccaacatggtgaaaccccatctctactaaaaatacaaaaattagccatgcgtggtggtgggcacctgtaatcccagctacttgggagggtgaggcaggagaatcgcttgaacctgggaggccgaggttgtggtgagccaagattgcaccactgccctccagtctgggcaacagagcgagactctgtctttttttatttatttttattttttgagacggaatcttgctctgttgcccaggccggagtgcagtggcacgatcttggctcactgcaagctccacttcccaggttcacgccattctcctgcctcagcctcccgagtagctgggactacaggtgcccgccaccacgcccggctaattttgtttttgtatttttagtagtgatggggtttcaccatgttaaccaggatggtcttgatctcctgacctcgtgatccgcccacctcagcctcccaaagtgctgggattacaggcgtgagccatcgcaccccggtgagactctgtcccagcactttgggaggcagaggcaggtggatcacctgaggtctggagttcgagaccagcctggccaacatggtaaaaccccatctctactaaaaatacaaaaattagctgggtgtgctggcgggcgcctgtaatcccagctacttgggaggctgaggcaggagaatcacttgaacccgtgggagtggaggttgcagtgaggtgagatggcaccattgcactctagcctgggcaacaagagcgaaactctgtctaaaaaaaaaaaaagaaaaaaagtatggctctccaccacctcaggatgaagtccaactgcggcagcctcagcctctttgagcccctggaccactcgcccttcctatgtcctctctcttgccttgcagtgtttcttctatggttttcctgtcctgcccccacagggtgaatttcagctttctcttagaggcccagctcaaacatcacctcttccacaaggcaccccccgattcctggccctctccaggggcagtttcctgctgccaagggtggacgaaagcgatgatagccccagggcaggacaggctggctcacaagctcactatcaatgcgtctgaccggtgtctgcattctttgtgtgcctagaggatatcagagcgcaggcatcaaaacccagatctggccacccgatggctcacgcctgtaatcacagcactttgggaggtaggcgatcacttgaggtcaggagttcaagaccatcctggccaacatggtgaaacactgtctctactaaaaatacaaaaatttggcctggcgtggaggcttatgcctgtaatcttagcatttttggagggcaaggtggttggatc

SEQ ID NO: 727 - DNA, 4001 bp, Homo sapiens
tgagcttagatcacattactgcactccagcctgggtgacagagccagaacctgtctcaaaaaaaaaaaaaaaagccgggtgcagtggctcacacctgtaatcccagcactttgggggactgaggcaggcagatcacctgaggttggaagtttgagaccagcctgaccaacatggagaaaccccatctctacgaaaaacacaaaattagctgggcgtggtgggcatgcctgtaatcccagctacttaggaggctgaggcaggatattcacttgaacccaggaggcggaggttgcagtgagctgagattgcgccactgcactccagcccgggcaacaaaagcaaaactccatctaaaaaaaaaaaaattaggctgggcgcggtggctcacgcctgtaatcccagcactttgggaggctgaggcgggcagatcacctgaggtcaggaatttgagaccagcctggcaaccctggtgaaaccctgtctctactaaaaatacaaaaatcagctgggtgtgatggtgggcgcctgtaatcctagctacttgggaggctgaggcaggagaactgcttgaacctggggagcagaggttgcagtgagccgagatcgcaccactgcactcctgcttgggtgacagagcgagacttcgtctcaaaatatacacacacacacacatacacacacacacacaaattagctgggcctggtggtgagagcttgtggtcccagctccttgggaggctgaggtgggaggattgcttgagccagggaggttgaggctacagtgagccgtgatcacaccactgcactgcactgcactgcagcttgggtgacagaataagaccctgtctcgaaaaaaaaaaatgcaaattctcaggctccacggcagatctgctgaatcagagatacttggggtgggagcctgcggctgtgctggaatggacccagtgactgtgttggtacaggcccgggtgatgctgctgctgactcagcggaagtgagagaaagaggctccgatgagctcacggagtcaggaaccaggtcttggagaggcagtaagagtgctgtggcctctcccagtgcctgcctcccggtgcagggcccataggctatgatgggcgggcaggaattcaagagagaagcagggggacccgaggccacagggcaggtgggcagaaagggggtcctggacccgctcgaggatgactctgagaggacaagtactaagcagatggcagatggcagccttcggtgtagacggcttcaagcagctggcagcatccccagggcccggggccagcctttgtgtcctgcagtcagaccaggcgcatgaccaagctggtcacctaaaacttatctcacttcagggagactgaaccccaagatccccgtgctctgcttgagggtattaaattggcagacgaaacggccagccagccatgctgaccagtgacaggacagcccttcccaggcaagtttgatcttgttcccacactcccaagatcctcttcccataatcccaataacccatgaaaatgtcccggaaattctgacatctagcctctatttcccgggctcccttgcccacccagaaggggcacatctttttgtttcccgttgatgtgtgaattttgtcaggatgaataatgaatgaatgaatgacgctggagcctgccctttcctccccacctctgcctctgacgtggtcttccccaaagtcccctcagctcttacctccattgaagagctgcataggtgcagccggcactgtggctgcagctctgccaggggttgtccaggggctgggcctccccgccaagccagcctcgggtgtcttcatgggggcaggagcctcccaggggcggccacgccgggcctcacaaactgcctgcctcacttcctccgccacggccacatcgcggcgcgggggtgccagggtgataaagacagacgatgccaccctcttctcaggctttgaggccatggcttcagctcctggtgtggctagggacagagtggggtacagcacaggattgccacccagacacacagccaccctcccccgagaggagagagcctccctcctcccaaaaagacaggccagccaccctaccatctcaacaactcagtccagcacccagcccagccagagaaggggtgggggtgtcctgctggggaagacaggacccaccagggaacttggccacaggggtgagacccaaaagtcctgactgcccctcccccgaacctgcacacctaggggagcaaagggcagccctcaccaatgatcactcttccttgtctcacacccgcgaggaaggaacagatgcttcagctcccagccccagcagggctgacttccgttcccagtctggagtcccgcctgcctgctgggccacaccccaagtgacctccctcacctgggatcagattctcctagaagggctgaagtcctggaggttcaggccagctctgctttgggagggaaagagaacagatcaggatctgccagggcgtcagggctaggctccggcggcagagtgggcagggcacagtgagagctgccctcaccaagaccggctctgccctgagcatgttatactcattaactcataaacactcacacgttatgctcattaactcataaacactcacaaggtggctgcagggcaggcactatcatcacccacctaacacatcaagaaatcgagactcagagagaagtcacctgtccagggtcacacggtggtgaggtggcactggaacccagagcccatgctcttggccactttgctctgctctgacctttctcagccctgcacatgagccagcaccctccttgcttgctttctagtgccagactctctcactccacccaatctccaaaacctgggtcctggttcaggcctgggcagtgggcagggggcaaggggagagatggggaggctccatggcctctggtctcacctcctaaccctgatctttctagagcatcaatctctttctcctttactcaaaaaccttccatgggccgggcatggtggctcacagctgtaatcccagcattttgggaggccgaggcaggtggatcacttgaggccaggagtttgagaccaccctgccaacatggtgaaaccccatctctactaaaaatacaaaaattagccatgcgtggtggtgggcacctgtaatcccagctacttgggagggtgaggcaggagaatcgcttgaacctgggaggccgaggttgtggtgagccaagattgcaccactgccctccagtctgggcaacagagcgagactctgtctttttttatttatttttattttttgagacggaatcttgctctgttgcccaggccggagtgcagtggcacgatcttggctcactgcaagctccacttcccaggttcacgccattctcctgcctcagcctcccgagtagctgggactacaggtgcccgccaccacgcccggctaattttgtttttgtatttttagtagtgatggggtttcaccatgttaaccaggatggtcttgatctcctgacctcgtgatccgcccacctcagcctcccaaagtgctgggattacaggcgtgagccatcgcaccccggtgagactctgtcccagcactttgggaggcagaggcaggtggatcacctgaggtctggagttcgagaccagcctggccaacatggtaaaaccccatctctactaaaaatacaaaaattagctgggtgtgctggcgggcgcctgtaatcccagctacttgggaggctgaggcaggagaatcacttgaacccgtgggagtggaggttgcagtgaggtgagatggcaccattgcactctagcctgggcaacaagagcgaaactctgtctaaaaaaaaaaaaagaaaaaaagtatggctctccaccacctcaggatgaagtccaactgcggcagcctcagcctctttgagcccctggaccactcgcccttcctatgtcctctctcttgccttg

SEQ ID NO: 728 - DNA, 4001 bp, Homo sapiens
ctccctgcccaacccacagtcaggcccttgagagctttcacagagcccagagcacacagtgagtcctcagtcaatcttactgagtgaacctcattgaacacagcacttctccttccttattaacatttttttggccacatctttatgatgtggggatttacaccggcccctttggcaaagaggaaactgaggccaaaaaaggcttaacagcttctcccagaccacatcgcagaacggcaggaagacagaggaaaatgccaggccctgaagtcacatcacctgcccaggcagatgcccacagctctctggggagctaggcccagtgtcctcacctctccagccctccctccggccctggccccatcggacacctgatgctccccgaaaggtgcacctcacccagtcccctcttctggccccggggcctggcactcgaggccccagatccaattacagctccccccaccctctctcttacacacacaactccccacattgttgccggcggaaagttatctggcccctggaagctgcctgcctgcgaggctgactcactcacctggagtgggccccagagtccagggtatagctgatccctgggaaaaagcaggagccagttctggagccctacagagggtgtggccagaaggccgtggattgggagcaagggctgcgagagctggaattttcagggctggaggcgggggaatggggggtgagggggggcctgagctttcatcagtctgtttgccaccgcctaacccaagcaatgcccatccccagctggacctgatgaggaaagagtgagggctgtctgcaggcaggtcttgtttccatcctgactcagcaggcaacccctgcaggccccgcagggagttggagggatgggggtgaggggtcttgggtgccagagaggatgactgggcagcctgggaaggccctgagcaccagccaaagctgcccccaacgctccctcaccgctagtcgggtccccactgggcatctcaccaccccggggaggggcagcccctccagacaagggagctcaggaggaaggcaggaataggtgaggccaggcctgggaccccaaggaacccacggggattcagacggcccaaggcccagagctggaagagctgatgaaagaaaaggctcgcagcctccctcccagacgcatcccaggcccccgccagacagaccctcaggaagctgggaggcgggaatgtgggggtcctctggtgctacttcctggctaaatgggacccaggagttctctctccttgccagtcgcctctcaaggcctcccgccagaccaagatagcagagagacgtgctctttggagaccgcctctagggcttcgctggcgtgaaagtttgccgcgccaggtctccgggtcccctcgctctctgacgcccctctgtgcagcgctcgcccgccgaccccatctcccctccccgccgcagcgagcggtccaggcgtcggctacctgggtcaccgtctccgtccatcgctgcggagggcggtcgcgagaggaggagccggagcgctgcgggctgcgcgagtcccggggcggcgagtcccggcgctgtccgcgtctgtgtcggtcccggcgaccgcgcctcttaaaggcccccgacccgacccgccccgccccgcctctggccccgcgcccggccgccccgcagtcccagcagtctgctcgaggcccggggctgcgggttcctcagcggaccgaggaggctgggaaaggtcaggagtcgttttttttccaactggggaggggtccgatttggggcatctcgcagctcgctcctgggggactgctgggaggaggcggctaggggaggcacggagaggctgggtcaggccgagggtgaggggcgggtggcccaggcggagtcggagtataggaggtgccttccgccccaccccccacaccaggtaattttcctacgacgcggtgggggtgcgtccctggcccagcgctgcgcggggcggggcgcggggcgcgggggcggggcctggcgggccggggcggggcctcgctttccaggcaagcgcaggtccaggcggtgcagcttgggcggcccaacggatcgtgccgcggcggccgagcgcaggtgaccggcaggagggggcgcggggggcgctggggagggggcgcggctgggcgggggctgccgggaaggctcctgggttccgggtcgcgccgcagttgccgagggaggcctggcaccgaccaggcccaggccgccgagcttgcccgggctgcgctgcgcggctgcgaacgggggctggggtcgccatcgatgtacaggggtccgagcccagactttggggggcattttaaggcacagcgtgggaaggggaggctgcaggcgcgctggcggacttggggctggcggagcccagccgcggggctgggggtgggagtgggggtggggagataggaagggcccttccctgtcgcccaccctcttgccactcccacctaggcaggagatcatgtcctctgagatcttgagaaggtggctggagccctttggacctccgcgggaggcagtgataattagcctcctcctcccatcatgttctgaggatgggagagaggatggtgacggcaccggaggcctggggtgctctgcccggctgcgcattatatccccattaaagactggcctactgaaaaaggctggccctggaatcaaagaagatccgggcttcttccccctctgcccttatttttgaccttgggcagtgccttccacctctattgtgagaggccagagaaaaaaatcagagctcaccttttattaaagtacctgatgtgtcccaagctccttggaccgccccagtgacccctggaggtaaggcatccatttacagagaaggaaacaggctgggagaggcaccatgctctcccgagataaatggcagagcagggatgaggcctgcagcatagcttttcaacagctacaggagggtgtccagaagccacaagccatggctgtggggaacatcaacgagctgcccgagaacatcctgctggagctgttcacgcacgtgcccgcccgccagctgctgctgaactgccgcctggtctgcagcctctggcgggacctcatcgacctcgtgaccctctggaaacgcaagtgcctgcgagagggcttcatcactgaggactgggaccagcccgtggccgactggaagatcttctacttcttacggagcctgcacaggaacctcctgcacaacccgtgcgctgaaggtggggtacaggccgggtctggcatgcctccagtacacagtcatgacaccaggaacatgtattgagcacttagtatgagccgggtactttggatggtttaacacctttacttctctcacagtaacccaaagaggtagctactgttagtgcacacatttttcagatgggcaaactgaggccaagagtggtgtttcttattcttactatactcttttttttttttttttttttttgagacggagtttcactctgtcacccaggctggagtacagtgacacaatcttggctcactgtaacctccacctcccaagttcagcctcccaagtagctgggattacaggcatgtgccaccacacctggctaattttttttttttttttagatggagtctcgctctgttgcccaagctggagtgcaatggtgcgatctcggctcactgcaacctccacctcctgggttcaagcgattctcctgcctcagcctcccgagtagctgggattaccggtgcccgccaccacgcccagctaattttttgtatttttaatagagacacagtttcaccatgttggccaggctggtctcaaactcctggcctcaggtgatctgcccgccttggcctcccaaagtgctgggattacacgcatgagccaccgcgcccggcctcttattctgctcttaagattatttccccagtgacctttcctaggcgagggaatgttggccaactgagac

SEQ ID NO: 729 - DNA, 4001 bp, Homo sapiens
aaaatctgagtttgaaattataaatttataaccttaaaaggccagaaaactgcttaaaaattaagaatgcagctgaatatctcacctgacagagatgtcatttattcataagttgtgggatgtgttttaactctagttaggacaggctggttcccccctccccactacatttttttaaaatagtaaaatgatcaacaaacaaataaaactcagtttttctcaacacttacaaaacagaactgtgaatattccaagatttacaaagccattgtctggttgaatggttcaattcaatcaaatgttatatgcccaattttccaaacactgtatatgtacagcgcgaattttgattaaacgccactgtttgtaaaaatctgaaggaatatttaagattctacatgaaattctagaatgaaaacgttttggaaattcagaggcaatcaattgtgaaatatctattttcagctgaagaaattttccatcctgcagactggcatggttgaactgctgtgttgactagaaaaaaaattggccatcagtttgaattaatatttataagttctcttttaaaaatgttatgatttcctttaaaaatgtaattataatccacttgaaagtggaggtgtatgcctacaatatagcatattgagtaataagaagatgttatacacagcacattcagaaatatctttgtcctcttaaaaacaattcccagcacagatttagcttctccatggaatcggtttgcaatcacttcaaaatgtccacctccttcaatttctttaccacttaaagataatttcattgaaaggcagcaaaatatctaactgaactaacaatcaccacatcttcaaacctctggagtgaagtaaaaccccaatggcaaattcattatttttaaaaatcatggactgacctattgtgattttaaggtataaagaaacctctcctaaagcaggtgggtgggcgtaaatcactagttaaaaataaattgcaaaagagaaaaaacccgtcaaggggtaagttgcttctctacggtgggaagcgttaggatgaggcaaagcaggaatggtcatttcccaaggctctactttagtggtcaattagggcgctggggctaacgctaagtaaacacgttcgaattcttcggaacctctacctgggtttggggtcactgagccaccttagtctactcaatcttctcgaacaagaaaacttgggtggttggggtggggaacaattcgttattcttgcaagataaaccaaacctggctgggatcatctgcctacttctgagttttctccccaaacccaggccgggggctggaagcggcatacaaaaggcaggcgacatgacctctccgggtctactctcgggccaggcggaaggtgggaagaccaactccgctacccctcccgtagagggcccgcttccgggcggggggcaaggagcccccaaggcgaagtcccctcaggaagtaaccccagctccgcagctaggacgcaatcgggaaccagcccactcctgctgactgacgccaagggagagttcgggacgggagcggctccctcccagatctgtagccggctggggctcgcggggggctcccttcccggggaacgcgctcccttctcatctcccagacctcggccggggggagagggaggcaggagttctgcgggggcctcaccaggcggagctggctaatttcgtcgtaggacataaagctgaggatgttctcgatggctacgatgggcagcgccacaagcgtgttgttttgaggcagctggtccggagccagcgcgggggctgggagcgcctgggaccccggctgcgggtgctgtggcgcgggcggtggaggctgtcgctgggtagagccggaggccaaagaggaaccgccgtcgccttggccgccgcctccttcctctgccatccgctcctccgccgctgccgccatcttgggggcttgattccttacccccacagcaaggggaacagggacacttccggtgcgtcacttcctcctcctgcagccgccggggaaggggtacctggaggagtggggaggagcctgtgggataacaggcggagagagactcacagggtgcctttcaagtggaagtcagggaagatcatgtaaacctcaagaaaggtggtcatcctagacccttttgtctaagattagtaactacttgagagcaaggaaaccctatttattaaaatgaacttcactgtgcagttttcttaaagggcttcctgacaatggatgataaagatgttgcctagtaagtgtagatggaaataatgtagttagactagcaccattttttaggaatcatagaaatgattgatttaggcaaataaaaaggtatgaaatatcaataagaactacaacatgaatgaaccgtgagaacatattaagtgaaataagttagacacaaaggaccacatattgtatgattgcatttatataggatgtcttaaataggcaaatccatagagataaaaagtagattagtggtcgccagaggctgggggaaatggggaaatgagtgctaatgggtgaagggtttcattttcggggtgataaaaatgctctggaattagcggtgatggttacacaaccgtatgaatatacaaaaaccactgaattactatatactttaatgaattttatcatatatgaattgtattctaataactgatttaggcaagaatcatcaaaaggtactaaaactaggaggtaaacgtgatgaggaacatgatatttccatagtctcaaaataactccccataaattatgtattatttacaaagatgaaaagaaatagtttacaaggctgggcgtgttgactcacgcctgtaatccagcactttggaaggctgaagcgggagaatcactttagcccagaagttggagaccagcctgggcaacgtggagaaaccccatctctacaaaaaatacaaaaaattagccaaatgtggtggctaggtcctatggtcctagctactcgtgaggctgagatgggaggattgcttgagccacacgagttcgaggctgcagcgaaccgtcagcctgccactgcactccagcctgggcaacagagcgagaaaaaaaaaaaaagtttacaatagagaaatttggtggacaccatcataaccaaatgatcaagactaacgccacagttataggaggagccaatatcatatgcctattaatataataccctgaaaaggacgcagcataatgtagtattcatgcaaaaaaagcacgagttgcgtttgaggtagacatcgctagatgacgggcccataaattattcaaaagtgttaacgttacaaaagacaaagactaagggtttgtggcagattaaaggatactaaagagacagggcaactaaatctatgggtgatcctggatgggatcctggattaaggaagaaataactatgaagaacgttattgtgacaactggcaaaatttaaaaatggacagtatattagattatactgtaatcatattaaatttttcgatttgggtaattgtattatggtcatataagacaatgtctttgtctttaggaaatacacattgaaggataagcatgcttctattattttcctttatttatttatttatttttttgagatggagtcttgctctgtcacccaggctagagtgcagtggtgcgatgtcagctggttcgagcaattctcctgcctcagcctcctgagtagctgggattacaggcgcccaccatcacgtctggctaatttttgtatttttagtagagacgggatttcaccatcttggccaggctgctctcgaactcctgaccttgtgatccacccacctcagcctcccaaagtgctgggattacaggcagcaatggcgcccggccgcatgctttgtattttacactttgctttcttgtgcttctcagatattgcgtttttaaaaatgaattgaaggtttgtggcaacccttgagcaagtctctt

SEQ ID NO: 730 - DNA, 4001 bp, Homo sapiens
atagaaaaggaggctgggcacggtggctcaagcctggggtggggcagggtatcgcttgagaccaggagtttgagatcagcctgggcaacatcggtgaaaccccgtctctactaaaattacaaaaaaaaaaaaaaaaaaaaaaaaattagcgggcgtggtggcgcacacctgtaatcccagctactcaggaagctgaggcaggagaatcgcttaaacccaggggatggagattgcagagagccgagactgtgctactgcactccagcctggatgacagagtgagaaactgcaaaaaaaaaaaaaaaaagaaagaaagaaagaaagaaagaaagaaagaaagaaaatggtcaaataataacctaaacagttgtcattttaacaatgaaaagctttttaagatacgcaacatgcctatggatcaatgtagattgaatcatctatttatactggcttgtcaaaagcaaacagttactgggtataaaatgacaacatacaatagaaaagacacccaatcagattacacacgtgaatacactcaaagttagcaatttaacacagcatcactaatggccataagatatacagacttaattctaaatattcaattctaaatgatggtacttcccccaaattttccttgcctctttaaatccatgatgtcatcattcttaagcagaagtaaagccaatttgttacaaaagatattttggtgtgtccaagcaaaagcaatcgcctcaacaattctgcatagcacaagttcagtgaagccatcattcctcaagaaagagaccacaaggcttcaaaccgacttccctacatgacagaaacacaatcgaagtctcccaattagcatttaaacagcaataaaagttgttctcaaaaaggaacaacatagtttcaacgtcggggccagcaactgccagcaagtaaaactggtaatgtgtcagaatcttcatctagatcgatcagaatcccaccacagaaaaatccagactctggcaattaagaaatgaggcttttattttcctaacagaaatcgggagatttaacagacaaagcaattggttattctgaatcttaacaaaccgaaggtttcaaacgaactcagcgctgaagttactctgcagcgaccatcaagatctcacaatcgttttctcttcgcttacaaattcgttcccaccctccaccgttccctttgcacacacaattctcgccaagagaagccttccacagtcacagcatggattgctgtctcaagcaaggagatccgcagttcccatttctctaagggaacactcaacaagctaggggataggaaaggccttttgtgttttatttaacgtaaaccaattccaaaattatccctttgcagctgcaggttcagagatgctagcccccagccgcagccccaattttgatgggcacccgacccccgactcctctctcgcaaaggagtgaaatgttcggaggagcgatgaaagattacctgacaccctaaagccatccttgcccgggccacacaccccttcactgcccgggtgaggggacgagaaccaccctgctgaggagagggggtgggttcgctcccaacccaagggctggctggaaaggagctgtcctcctcctcgcctcactcgaggacggcgatagcaagtcaccctgcccaaccaggaccgacccccgcgtgggatacggggcctgcgtcagaccccgggcgcccgctgccccttgccagtcccgggcataaagggcagaaggcgccggctcccctctgcggcccggggaggaggagaggcctcacctggcccagcccgctccacgctctcgggttcgctccgctggcgacggtaatgagggagccagggacagggccagagcagaggcgctctgcctcaggccgcgacagccgtgctcggggctcctcacagctggcgggaccccgagccgcccggagccgccatcttcctccactcaaacgccgccgccgccgcagctgctgctgctcaggccgggagaagacagcgcagagcgcgcatgcgccggggcgggcgcggcggacgcgcgcgcactcacgtcagcgcggcgggatggcgaggggcggccagggggcggcgcagtgttgagaaaggccgtggtcacaggccgaggttctgtggagggtggaatgcgctcgggggagctaggcctccgcacccgccttcgccgcgtctctagcgtcgacctgatagccgcacccaccctccgctgcactgtctggggcaactgggtggttttcccggtggtttgagactaacatttagccaggaattaactcacttctaccccgagggcccgatgagcagagagggctgtggcggatgtgagtgctcttggatatcgccaaggggagggaaactgtgcttgaggtgtgcaggagaagtcttcccttaaccgtagcctcgtagcaaccactgtgagttcttactagctccacttttcagatgaggaaactgaggcacagaaaacgatcacttatttgcccggagtcacacacctatcagtggaggtggggcggcgcgggaaagaggatttaaactcaggcttgtctggttcccaagctcctttacttcctactagctaggttataggatccagcaaagtcccccttctcaagggagcaacctggtgtgtaggtgagaaccttcatgagcccagccctacagcatgtggtctaaggaaatgccagatacagagtcaaaggcttcagtctaaactctgtaagccaaaaaaacaaaacaaaacaaaacaaaaaactaagcccccaccccccccccaacaccaaaccatctgaacggacttcctcctaggccagggcagtctaaaatgtaaccaacctgagagactggttcaggccatgacgggaagcaggacatgagacatgcctcattacatccttcagcattgacatcaacacaacagaccttaagactggtaagaaacatttacaatctgttctctctggagcccacctgccacttggaggcttcacgtgcgtgataaaactttggtgtccacaatcccttatcataacccagacattcatttctattgataataacttttttttttttgagacagggtctaactctgttgcccaggctggagtccagtgatgagttcttggttcgctgcaacctctgtctttcaggctcaagctatcctcctaccttagcctcctgagtaactgggactacaggcgggcaccaccatgcctggctaatttttccattttttttgtagacacagggtttcgccatgttgtccactctcatctcaaactcctgagctcaagtaatccacttgcctcggcctcccaaaatgcttggattacaggcgtgtgccaccgcaccaggcctattgataataactatttcaactcattgccaatcagaaaatgtttaaatctgcctataatgtggaagcccccacttcaagtttccggtctttctgcaccgaaccaatgtagtttttatttatttatttacttatttttatttatttgtttatttttttgagactgagtcttgctctgtcgcccagactagagtgcagtggcaccatctccgctcactgcaacttccgcctcctgggttcaaccgattctcctgcctcagcctcccgagtagctgggattacaggcgcccgccaccgtgcccagctaatttttgtattttcagtagaaaatacaaaattcagtagaaaatacggggtttcaccatcttggacaggctggtctcaaactcctgaactcgtgatccactcacctcggccttccaaagttctgggattacaggtgtgagccacggcgcctggcctttttatgtatttattgagacagggtctcactcttcgcccaggctggagtgcagtggtgtgatctccactcactgcaacctctgcctcccaggtccaaacgattctcgtgcctcaacctcctgagtagctgggattacagacatgtg

SEQ ID NO: 731 - DNA, 4001 bp, Homo sapiens
tcactgtactccagcctgggtgacagagtgaaactccgtctcaaaaaaaaaaaaaaaaaaaaaagagtatagtaagaataagaaacaccactcttggcctcagtttgcccatctgaaaaatgtgtgcactaacagtagctacctctttgggttactgtgagagaagtaaaggtgttaaaccatccaaagtacccggctcatactaagtgctcaatacatgttcctggtgtcatgactgtgtactggaggcatgccagacccggcctgtaccccaccttcagcgcacgggttgtgcaggaggttcctgtgcaggctccgtaagaagtagaagatcttccagtcggccacgggctggtcccagtcctcagtgatgaagccctctcgcaggcacttgcgtttccagagggtcacgaggtcgatgaggtcccgccagaggctgcagaccaggcggcagttcagcagcagctggcgggcgggcacgtgcgtgaacagctccagcaggatgttctcgggcagctcgttgatgttccccacagccatggcttgtggcttctggacaccctcctgtagctgttgaaaagctatgctgcaggcctcatccctgctctgccatttatctcgggagagcatggtgcctctcccagcctgtttccttctctgtaaatggatgccttacctccaggggtcactggggcggtccaaggagcttgggacacatcaggtactttaataaaaggtgagctctgatttttttctctggcctctcacaatagaggtggaaggcactgcccaaggtcaaaaataagggcagagggggaagaagcccggatcttctttgattccagggccagcctttttcagtaggccagtctttaatggggatataatgcgcagccgggcagagcaccccaggcctccggtgccgtcaccatcctctctcccatcctcagaacatgatgggaggaggaggctaattatcactgcctcccgcggaggtccaaagggctccagccaccttctcaagatctcagaggacatgatctcctgcctaggtgggagtggcaagagggtgggcgacagggaagggcccttcctatctccccacccccactcccacccccagccccgcggctgggctccgccagccccaagtccgccagcgcgcctgcagcctccccttcccacgctgtgccttaaaatgccccccaaagtctgggctcggacccctgtacatcgatggcgaccccagcccccgttcgcagccgcgcagcgcagcccgggcaagctcggcggcctgggcctggtcggtgccaggcctccctcggcaactgcggcgcgacccggaacccaggagccttcccggcagcccccgcccagccgcgccccctccccagcgccccccgcgccccctcctgccggtcacctgcgctcggccgccgcggcacgatccgttgggccgcccaagctgcaccgcctggacctgcgcttgcctggaaagcgaggccccgccccggcccgccaggccccgcccccgcgccccgcgccccgccccgcgcagcgctgggccagggacgcacccccaccgcgtcgtaggaaaattacctggtgtggggggtggggcggaaggcacctcctatactccgactccgcctgggccacccgcccctcaccctcggcctgacccagcctctccgtgcctcccctagccgcctcctcccagcagtcccccaggagcgagctgcgagatgccccaaatcggacccctccccagttggaaaaaaaacgactcctgacctttcccagcctcctcggtccgctgaggaacccgcagccccgggcctcgagcagactgctgggactgcggggcggccgggcgcggggccagaggcggggcggggcgggtcgggtcgggggcctttaagaggcgcggtcgccgggaccgacacagacgcggacagcgccgggactcgccgccccgggactcgcgcagcccgcagcgctccggctcctcctctcgcgaccgccctccgcagcgatggacggagacggtgacccaggtagccgacgcctggaccgctcgctgcggcggggaggggagatggggtcggcgggcgagcgctgcacagaggggcgtcagagagcgaggggacccggagacctggcgcggcaaactttcacgccagcgaagccctagaggcggtctccaaagagcacgtctctctgctatcttggtctggcgggaggccttgagaggcgactggcaaggagagagaactcctgggtcccatttagccaggaagtagcaccagaggacccccacattcccgcctcccagcttcctgagggtctgtctggcgggggcctgggatgcgtctgggagggaggctgcgagccttttctttcatcagctcttccagctctgggccttgggccgtctgaatccccgtgggttccttggggtcccaggcctggcctcacctattcctgccttcctcctgagctcccttgtctggaggggctgcccctccccggggtggtgagatgcccagtggggacccgactagcggtgagggagcgttgggggcagctttggctggtgctcagggccttcccaggctgcccagtcatcctctctggcacccaagacccctcacccccatccctccaactccctgcggggcctgcaggggttgcctgctgagtcaggatggaaacaagacctgcctgcagacagccctcactctttcctcatcaggtccagctggggatgggcattgcttgggttaggcggtggcaaacagactgatgaaagctcaggccccccctcaccccccattcccccgcctccagccctgaaaattccagctctcgcagcccttgctcccaatccacggccttctggccacaccctctgtagggctccagaactggctcctgctttttcccagggatcagctataccctggactctggggcccactccaggtgagtgagtcagcctcgcaggcaggcagcttccaggggccagataactttccgccggcaacaatgtggggagttgtgtgtgtaagagagagggtggggggagctgtaattggatctggggcctcgagtgccaggccccggggccagaagaggggactgggtgaggtgcacctttcggggagcatcaggtgtccgatggggccagggccggagggagggctggagaggtgaggacactgggcctagctccccagagagctgtgggcatctgcctgggcaggtgatgtgacttcagggcctggcattttcctctgtcttcctgccgttctgcgatgtggtctgggagaagctgttaagccttttttggcctcagtttcctctttgccaaaggggccggtgtaaatccccacatcataaagatgtggccaaaaaaatgttaataaggaaggagaagtgctgtgttcaatgaggttcactcagtaagattgactgaggactcactgtgtgctctgggctctgtgaaagctctcaagggcctgactgtgggttgggcagggaggagaggctgcatatgaggaggttaggggctggtgggcctggagacttgggtctgggtcctgccacctgtccccttccccagtgcctggcctgttcccaccaccgccttggctctccagggcctagcccatgggaactccccatccgtaggtctgagagctgtagtcttcctgatcacccagagtggccccgtctcctcctcactggctctccctcgtccaggcatcttgggcactcggtgtccacttactcaaggctgtgatggcccagctgaagccgactgggatgcaagagacagtccggctgccgcggtgacatctgcctgcctccttacaattcagaatgcccttgtccccttcctcaggggatttggacgtctgtcctgtttgtatggcctggcacaatgattacccccattttatagatgagaaaactgagggccacggatgggaaaagga

SEQ ID NO: 732 - DNA, 4001 bp, Homo sapiens
tggccttgtgtcttgagcagaattagtctcagttggccaacattccctcgcctaggaaaggtcactggggaaataatcttaagagcagaataagaggccgggcgcggtggctcatgcgtgtaatcccagcactttgggaggccaaggcgggcagatcacctgaggccaggagtttgagaccagcctggccaacatggtgaaactgtgtctctattaaaaatacaaaaaattagctgggcgtggtggcgggcaccggtaatcccagctactcgggaggctgaggcaggagaatcgcttgaacccaggaggtggaggttgcagtgagccgagatcgcaccattgcactccagcttgggcaacagagcgagactccatctaaaaaaaaaaaaaaaattagccaggtgtggtggcacatgcctgtaatcccagctacttgggaggctgaacttgggaggtggaggttacagtgagccaagattgtgtcactgtactccagcctgggtgacagagtgaaactccgtctcaaaaaaaaaaaaaaaaaaaaaagagtatagtaagaataagaaacaccactcttggcctcagtttgcccatctgaaaaatgtgtgcactaacagtagctacctctttgggttactgtgagagaagtaaaggtgttaaaccatccaaagtacccggctcatactaagtgctcaatacatgttcctggtgtcatgactgtgtactggaggcatgccagacccggcctgtaccccaccttcagcgcacgggttgtgcaggaggttcctgtgcaggctccgtaagaagtagaagatcttccagtcggccacgggctggtcccagtcctcagtgatgaagccctctcgcaggcacttgcgtttccagagggtcacgaggtcgatgaggtcccgccagaggctgcagaccaggcggcagttcagcagcagctggcgggcgggcacgtgcgtgaacagctccagcaggatgttctcgggcagctcgttgatgttccccacagccatggcttgtggcttctggacaccctcctgtagctgttgaaaagctatgctgcaggcctcatccctgctctgccatttatctcgggagagcatggtgcctctcccagcctgtttccttctctgtaaatggatgccttacctccaggggtcactggggcggtccaaggagcttgggacacatcaggtactttaataaaaggtgagctctgatttttttctctggcctctcacaatagaggtggaaggcactgcccaaggtcaaaaataagggcagagggggaagaagcccggatcttctttgattccagggccagcctttttcagtaggccagtctttaatggggatataatgcgcagccgggcagagcaccccaggcctccggtgccgtcaccatcctctctcccatcctcagaacatgatgggaggaggaggctaattatcactgcctcccgcggaggtccaaagggctccagccaccttctcaagatctcagaggacatgatctcctgcctaggtgggagtggcaagagggtgggcgacagggaagggcccttcctatctccccacccccactcccacccccagccccgcggctgggctccgccagccccaagtccgccagcgcgcctgcagcctccccttcccacgctgtgccttaaaatgccccccaaagtctgggctcggacccctgtacatcgatggcgaccccagcccccgttcgcagccgcgcagcgcagcccgggcaagctcggcggcctgggcctggtcggtgccaggcctccctcggcaactgcggcgcgacccggaacccaggagccttcccggcagcccccgcccagccgcgccccctccccagcgccccccgcgccccctcctgccggtcacctgcgctcggccgccgcggcacgatccgttgggccgcccaagctgcaccgcctggacctgcgcttgcctggaaagcgaggccccgccccggcccgccaggccccgcccccgcgccccgcgccccgccccgcgcagcgctgggccagggacgcacccccaccgcgtcgtaggaaaattacctggtgtggggggtggggcggaaggcacctcctatactccgactccgcctgggccacccgcccctcaccctcggcctgacccagcctctccgtgcctcccctagccgcctcctcccagcagtcccccaggagcgagctgcgagatgccccaaatcggacccctccccagttggaaaaaaaacgactcctgacctttcccagcctcctcggtccgctgaggaacccgcagccccgggcctcgagcagactgctgggactgcggggcggccgggcgcggggccagaggcggggcggggcgggtcgggtcgggggcctttaagaggcgcggtcgccgggaccgacacagacgcggacagcgccgggactcgccgccccgggactcgcgcagcccgcagcgctccggctcctcctctcgcgaccgccctccgcagcgatggacggagacggtgacccaggtagccgacgcctggaccgctcgctgcggcggggaggggagatggggtcggcgggcgagcgctgcacagaggggcgtcagagagcgaggggacccggagacctggcgcggcaaactttcacgccagcgaagccctagaggcggtctccaaagagcacgtctctctgctatcttggtctggcgggaggccttgagaggcgactggcaaggagagagaactcctgggtcccatttagccaggaagtagcaccagaggacccccacattcccgcctcccagcttcctgagggtctgtctggcgggggcctgggatgcgtctgggagggaggctgcgagccttttctttcatcagctcttccagctctgggccttgggccgtctgaatccccgtgggttccttggggtcccaggcctggcctcacctattcctgccttcctcctgagctcccttgtctggaggggctgcccctccccggggtggtgagatgcccagtggggacccgactagcggtgagggagcgttgggggcagctttggctggtgctcagggccttcccaggctgcccagtcatcctctctggcacccaagacccctcacccccatccctccaactccctgcggggcctgcaggggttgcctgctgagtcaggatggaaacaagacctgcctgcagacagccctcactctttcctcatcaggtccagctggggatgggcattgcttgggttaggcggtggcaaacagactgatgaaagctcaggccccccctcaccccccattcccccgcctccagccctgaaaattccagctctcgcagcccttgctcccaatccacggccttctggccacaccctctgtagggctccagaactggctcctgctttttcccagggatcagctataccctggactctggggcccactccaggtgagtgagtcagcctcgcaggcaggcagcttccaggggccagataactttccgccggcaacaatgtggggagttgtgtgtgtaagagagagggtggggggagctgtaattggatctggggcctcgagtgccaggccccggggccagaagaggggactgggtgaggtgcacctttcggggagcatcaggtgtccgatggggccagggccggagggagggctggagaggtgaggacactgggcctagctccccagagagctgtgggcatctgcctgggcaggtgatgtgacttcagggcctggcattttcctctgtcttcctgccgttctgcgatgtggtctgggagaagctgttaagccttttttggcctcagtttcctctttgccaaaggggccggtgtaaatccccacatcataaagatgtggccaaaaaaatgttaataaggaaggagaagtgctgtgttcaatgaggttcactcagtaagattgactgaggactcactgtgtgctctgggctctgtgaaagctctcaagg

SEQ ID NO: 733 - DNA, 4001 bp, Homo sapiens
gcactccagcctgggcaacagagcaaaactgtctcaaaaaaaaaaaaaaaaaaaaagagaaaagaaaaatgctttgatggaaaaaaaaaataacaaaaaaacccaatgtggccaagtcttctaagttctgagaagcaactgtaagcatttgaaaaaaaatgtaaaagttgtcaattaaaaatgcttgtagtctaggcaacatagtgagactctgtctctagaaaaaaagaaattaggtcgggtgcacagactcaggcctgtattcccagcacttcggtaggccgaggcgggcggatcacaagatcaggagttcgagaccagcctggccaatatggcgaaaccccgtctctactaaaaatacaaaaattagctgggcgtggtggcggacgcctgtagtcccagctactcgggagggtgaggcaggagaatcacctgaacccgggaagcggaggttgcagtgagccgagatcgtgccactgcactccagcctgggcaacagagtgagaatctgtctcaaaaaaaaaaaaaaaaaaaaaaaaggccgggcgcggtggctcacgcctgtaatcccagcactttgggaggccgaggtgggcggatcacgaggttaggagatcgagaccgtcctggctaacacagtgaaactccatctctactaaaaatacaaaaaattagccgggcttggttgcaggtgcctgtagtcccagctactcgagaagcaggtgcctgtagtcccagctactcgggaggctgaggcaggaggacggcctgaacccgggaggcggagcttgcagtgagctgagatcgcgccactgcactccagcctgggcgacagagcgacactccgtctcaaaaaaaaaaaaaaaaaaaaaaaaaaagaaattagctaggcctggtggcccgtgcctgtagtcccagctatgcaggaggctgaggcaggaggaacgcttgagcccaggaagtcgaggctgcagtgagccgtgatcatgccactgcactccagcctgggtgacagagcaagactctgccataaataaataaataaataaatgctggcagcttctaaaggcactgtctagactctagacgaaataaaagtcactgggctccaagctagaggcatctaggcaccaatagcttcccaccgtggtgaccgaagtctggtctctggcccagtccgcattttcttgcgccccttcccccccccggccctgggcattttgtggtggggaagtccatgccagccctaggaagccctctcacaccgatcggggtccccaactgcccggcccggcgtctcgtgctcgccttctccgcacccaccctcccagcaagctctagtggcattgttacttcaccggtttctcggaaacagaaactgtggctggggcaaggcaagcgccggatctcgcaggcgtgtgggggcctggaggtcccttgacagttctccgaacccggcgccggcctcgggatgtggccggggtggaggcggccgcagagcctccgcctgggtggccccggggccaggcccccagtcgaagtccgggcccagccgcccgcgccccccacccctggccgcccggaccagcgcccgcaggctccgtgaacgcccaggcgccggagaccccggctccccactcgcccgccgcccgtccccccggggacgcgacctgggcgcagcggcggagctccaggtcggcccgagcctacggcctcggcttcgttgtcgctgggccccgccgccgcgtcacgcgctgcgctcggtccccacccccgccccggaccccgctgccgtccctctcggcccggcccctaaccctcgccgcgggaagacgaacctgggatccccagggcccgggccctcgctgcggcctgcgtgtcctgaagctgtctccccctccaggcggcgggcggctcagcacccacacctgcacccgcctcctacgcagggccgaagctcccgaacgcgcggccgctccccggacctccgcactagttccttccttatgcggcccagggctccacccttgacccgcggtcccctccctagaggcaggacctgacacccagtgggctccttctttccctagggcgtgacctccgcaggcttcatagactcaaaggtaaaaaacctgaggtgctaggaggtggctaacgcctgtgatcccagcactttgggaggccgaggtggggaggatcgcttgaggtcaggagttcgagaccagcctggccaacatggcaaaaaccctgtctctactaaatatacaaaaattagccgggcgtggtggcacaggtctataatcccagctcctccggaggctgaggtgggagaatcgcttgaacctgggaggctgcagtgagtggagactgtaccactgcactgcagcctgggcgacagagccagaccttgtctcaaaaaataaaaaacctctgaggttttttatcaggattaagttcatgaatttcttccatcagtcaacaaatatttagcaagcaccttgttcaggcaaccaccaagggttgtgcaggctgtgtactgcacaaggggactggcccaggacacattaattgcagtcagggctacatgttctccgtggaaggccgtccttttgcagtttgccatgggctggtgggtggtgatcctgccctggccaaagcccttatctagctcacccttgactgagatagctaaatgtgaggagtacttattgagcactggattatagtccatgttcacactgctataaagaaatacccgagactgggtgatttataaaaggaaagaggtttaattgacttatagttccatatggctggggaagcctcaagaaacaatcgctgggcgcggtggctcacgcctgtaatctcagcactttgggaggtcgaggtgggtggatcacgaggtcaggagattgagaccaccctggccaacatggtgaaactccatctctactaaaaatacaaacaaaattagccgggcatggtggtgggcgcctgtagtctcagctactccagaggctgaggcaggtgaatggcgcgaacctgggaggcagagcttgcagtgagctgagattgcgccactgcactccagcctgggcgacagagcgagactccatctcaaaaaaaaaaaaaaaaaaaagaaaagaaaagaaaaaaggaacttacaatcatggtggtggaaggtgaaggggaagcaacgaccttcttcacatggcggcaggagggagccggggaaaccgtcacttgtaaaaccatcagatctcgtgagaactcactcactatcatgagaacagcatgggggaaaaccgctcccataatccaatcacttcccaccaggtctctccctaaacacccaggattaccattcaagatgagatgtgggtggggacacaaagcttaaccatatcacgcaccaactgtgtgccaggcaccattctaaatgcttcggcttcatccaatgtccgtaaagctgttggcaaagagtaacaccaggaggcagagcctgggtggcactgctgatctggcacaaggtggactcaagagctgcccagagatgtccacacaccccaaccccagcctgtggctgggcctccagaggaagccagcagtactggacggctgccaggtgagatacctgcagctcactgaggggtctgcccatgaacctgtttctgtgatggcctggttcctgaaatgccaacccctctgtaccttagacagaagccatgccattgtaccatctgcaggtccaggcaggaccacctaaagtctgcctttccttccagaaaccacagggcacaggttagactgggcacaccttttatttggctgcatgcagtagggcgaagtcaggagaacactgctatctttccagcaggacaagaggcaagttccaagggtggttggctgggagacagaggtcttgggaatggcagttctaggggtggggtgggggcttggaatgctctccaagccagagggggccgggcctggatttggga

SEQ ID NO: 734 - DNA, 4001 bp, Homo sapiens
accactggccagtttgtgacacaggctgtgcaggagggaatcacaaagaggaaaacagggaataggggaaaagagaaggcagaggaagtaggagaacagggagagaaaaggagaggtaggaggtgaaagaagggaaaagggaagagagaagacagaagcagagaaaagtagagagtccatggggtggccctgagcttgttttcctgcaactagacttggcaagttgtcccctcagcttggctctgcccagccctctccactaaggcctttccctgctctacccagtttgagccccaagaatggccagatctttaaaagtccataggctctttatgcatctttctgtgccttcgctgtagcaagtcccctagcttgggcactgcgatggcagtctcagacctttccctgccttacaaagcttcctgtccccacctggagactctcccagggtgtttgttcctgcacctaactcataatttgattaatattcaccaagtcctggctgattctggggctggtacctagactcccccgggtgaatttttctaaagcactaagtgctgatgcagcacatgttggggccaaagtctctgcatcataccatccagttcctctgaagtcaccggtgcagcaatctctgggcttcagggagaaaagccggctccgtggggcaatgaggaagcaggagtatgagataaaatgtttccagggagttatcagctttgattggaggctgggaggataatactcaacggaatgtctccaagtcaccctctctgccaatgaccttcagaaatcctttctccaggagacagggggccataattcagtagcctggggccacaggcttctgttactgcacactgcgttttaggggatgagaccatatgaggggactctcttgtccctctcatcctgctgggaagggcatgcacctcacctcagcttcagcacaggctgcttgctgcatgacttcccagatgcctactggccctccgagccccagttcactcctatcccctccccacatcccctgggcagcagataagaagggaaggagtcagtgtagtatagaggagagagcacagaaccaggactcaggaggggctgcagcagcctcaggctgctgcaataacttggccaatgttctgttcctctcctctacaaaagaagagctttgactgcatgttctccgtgtttcttctctttctaacgtttttttggttctaaattacccaggacttctaaggaaccatgcactctggtgggtgtgagcagaataatagggagctgagagggagcccctatgttctggactctagaacccttacctggcctcctgggaaggagcccacctgctctgggaagggcactgaggagcatgtgtgacagctatggctgcagttcaccccccacattcagaggcaagatcccaacctccaggagaaagcatcatttcaccttttgttctccaggcttcactgtggcctctccatccatctcagtccagaaacaagatccaggtggacttttcttctccttatgagatgcaggtgtttggacgacttctagttgctctcctttaaacctggagactgagaagtcaaggtggtattttggaaagcagctggagctagcaacggaaggtcggggtgcaaggcgtagctctgccactcacctcaagtcacttctctttggattttattatttataagaggaagccagtcctaatcccttgtcattcttactgtcacttattcctgaagaacttttccaggagtggtaacagtagcttcaaaaaagaaaacactgatccatatccttcctcctcttgtgtccccttcaggggtctcagactatttagggtgccccagcttaccagcccattcaggcatctcccggacaagtgatgcaacaacttgggcaggagggcagggaaaattcaaaattcaggagaggaattcccctgccatttggctggcagctggtgccctccagctgacctggcccctccaactctcatagagaagaactttgggcagcttgggtcactgacttcagagttgcatgatctggtggttactaattcacgtccctgacaaagcataatacagtaaatgagatgatcttcatggaaagaggacactgagaagtgtggcttacccaaatagatgacacagttgaaaaataccccaatatttccctttggaaaatagtttatgggtttttcttttccttgtaaaagatgtgatcttccagtctctgttggtctcaaactgacattaaaatggcttgtacagctgaagcactcaacaatgaatgggcacaaggggatggggggtgctgcaagctgcaattagggaccttcactaggacccctgatagatatgataatacggcacctctgaccaattagaaagggcaactcttccttaagaataaattcagttggtatattgttgtgtaatttgctgtagccatagatggcagcatgtattctccatgcatttccccttccaaatttgaaggcagattgagggtagaaattgagtcactgaaagcaacagaagaggaagagaaacaactctatggggtacttggagtttggccatgacaggacaattgtgcatagtgtgtgctggtaactgtgtgcacagctgtgtgtgctgctctcccacgacttggtcagcagcttccagtgctagagctccagatcttcacctccatctatagcctctcatattagttaaaatacatctacaatgtgaatggtatctccttagtaatggtgctcttgagcagtgcacaacctgaagaactgtatacagtggccttgccttccgagactggtttccagaaatgagtgaccttcatgtaggtggtagagaggtagctaatgcctggccagattctccccttcccctcctcatggagcagtatagtgtcatgtttgatcacatagattctggagtcagactccccactcctctcagttaagatctcagttctactttttactgggaaaatgacatggatcaggttactttttctctttaaacctagttttcctaatctgttaaacaggagaaaatagcacctatctcataaagttattatgtggatcaaatgtgataatccatataattcaaagttcttagcatgcagttaattttcattaaacattagctgagaatattattagcttggcttgtagcaaaggaagcaggtgttttatcatgatcaaactctcaaaaaaaaaatgccttcgacggttttcttccattcaagtgtcccctccctccctccctccctcccttccttttcctttccattattttggcatttgaaagataaaaaattcatcaatttgtctagggacacttctgaattaaatttatattcttaagtaaacatttgtcaaattttcactattttgtaaatgttgctgccatttgcatccttaaggtcatatttttctgttttacctacttctgaacactttgaagactttttgattacagaaaccaaaaattatagtaaagtacaattaattgtaatgcactggtccagtttccagagcactttctcagagccatgaagtcccttctctgaagctttatggaggagaaaactccatactggctgcttctcttgggggtacaattgaatttgcttatccagcacaaagccccaggggcttctttacatatatatatgacactataacctgattttaggccctagactctggaatcaggctttgaccagacatcaaatctgggaagagctttgtccattccctgtcctccagctcccacctccaatcccccagtttgcaaatgactttgtttgttaaacatacacacatgagagtaaaaaccagtaaacagaaagctaacccaagaaagaaaagctacttgtgctgtaaaacagtccatatggatctctttcttctccaaaatgtgctttctaatgtgtaatgaagagcagtggacagaggt

SEQ ID NO: 735 - DNA, 4001 bp, Homo sapiens
aagggaggattcttgttttatataagatgctggattgtatttgttagctaacaggaataattcagtaagcagagagggaataagggaagtataagttaaataattgaagaagttaagcccttgcataatcaagaagagagaagtggctttcactcattcaatttaaatctttcttgaacataacacaggtgtttctgccataacatgtaacatacatttatttttttaaattgttttgcattctgcaaaaataactaaaactaacaagtctttgagaggaaaaaaagactgttacagatcatgaaaacctaccatcagagcagtaacataaacattagtatttctaccaaatgaactatgcagttaaaaagatatgttaaatttgtaataaataaaattaacagtaaatctaggacttgatcactttcaaaggttggtggaagaagatgacaaagagaaaatacacaaaagcaggggaaaaccagagaacaaacatgctcaagatacacttgtggtaaaactaagccaagagaaaaccttgaagtgaatagttactgtgcagaatattctattccttgccatgttctactgtgctagtaagatttgtgttagctgttccttggtagttcaaaatattaacttgctagaaaaaaatcttgtttcaaccaacttcaatgttatattgacattattccttggcttgcctatagcatatagactaatttgcattacagaaaaatgcattatatcagagaaactgcaatgtatttcttgatttgttaagcagttgccatgtgcatagcaatatgtggaatactgcgtagaatacaaaaatgcagaagggagttcatccaaaccacaatgactttattaaaaacttgatttccataagcaggaagaataatggagaaactaggatgtgttctaataaaaatataagcacaggtaactgttaatattttttgaacactgactgtattcaggcattgtgctttatcctatttaatactcacaggaatcctatgaaacaggtactatcagcatccttgtttttaatgaggtagggaggtttagattatacaactagtgaatggcaaagccaggatttgaagcttagaggtctgaatggtagggatcttaaacatgaggaagaaaggcattcaacaaggtgctccagcactttggccacaacatttgggataacttaattattccctccaataagttgagagtttgtggtcatcttttgacttaaaatttatgaggcaagatactgatggagaatctgacactgctagggtactgatggagaatctgacactgctagggtttgcaggaaaaggcaggttagaagtaatggacctgagagagagggtgctagagttagcctccattgtgtggcacctacttaagtacccctgagttaggtgggcataaaggaaagtgacaagaacttaagccatattgtccctctccctcaaaggggacactctctgggtgaggggaactctaataacaagaggctctggagtgggcggcctgcaatgagagcagaggaaagtagaattgattgaaccataagttaataggtcattctttttgctgtgcagatgcatgggacataggttcttctggagaacctacaaaggtattcccatgagagcacctatatttgaatcactgcaaatgagaaagaacaatgaataatgctagagaaatggtgacaactagcaaaaaggttacactaccacaatctgacctccacttatgaggtagtgttcacacaggaatagcagttaaaacaaaacaaggagccgacagctaatacagcatggagagttgctttcttcttcctactctcaaggaaggggctgatatctggaagagggagggatgtgagtagtgtggccatcaccctttacctcccaacacataacaagccactggagccataaacttaccccatgctcggtggtagacaggtggaggatgctggagactgaaaagaattttgaacagaagataaaattaaattgattaattttataaaatcaaaattaattagatttgattgtgcctaataactccaatgagactgttttagtagcataaagtgattaaaaggttatggaattagtctaagaagtcattaagggaggctactgcccaagaagaatgggtccacagcagtagtagtaatttcaaaaataatgatttcatgtttacacctcacaagttgagacttctttcaacacagttgtgtgtatgaaatggaaagattgtactacaagtgtgctaaggtcctctgcaggcccaacatctagatgttttctggcaattagaattgcaggagttcaggaagataacagttcagttacttgaacaatttggtcctaaggtggcttctaaagagcagtgactgctactggctagttgatgagtccttcactctcctatcttgcctgccaggttgacagttcaagatctacagtaaccttgccttctatgcctctgactctgagctggcagaaaagaaagagcagcaggaggtcgtgatagatttgaaagtggaagtcaaagaaagaaaggagttggaagcagaatagtggaaagatggcaggactgacgataaccatgggatatttgttagaagtgacttggggaagacatgttatttctagtttcctaatgagtttttatcataagtcttaaagtataggaaaaatgttaaaaaggaaaggatcatagtcataaccaatttaaatttcttcattttagggattgagaagcccgaacccctcagaatgttttgtgagaattatatatctaagcaattaattagtggaaaatgcagtactaaattgtgaggctcctgttgttgtttctgctgctgctttagttgaagatacaggaccaaggaaaggatgagagaacaggtgccctcaaggattattatagtccatcatggggagaaagtcaattaaaaagtgaacaaattattgaacaaaatataccaggtagtaacacagagagaattaaattagaatgatgagatagagttagtggatggttaaaatatttaggttaatcacatactgaaatgataagagtgcagtagagctctgttgataacccaggttaactgaattaccagagtaaatgacattcaccatcgcttctgcagtgcagactgacagatgcacactacacactaaatgaccacatccagtaaactctaacagaaacaccaggagatagtagtgtcacaaaaccaaggcagaagagcatttcaagagggagagtgattaatagtgttaaatgtttcagttatgaagtagggaaagaaccaagaatagtccgatgaatttggtaattagaaaaatcttggtgtagcccccatgatccagggtctgtgtctctaccatgcaagccctagatctcaatggtaaactcactggagctgaccagtctctgagacattactcaaacttacaaaataacttagtatgtgaatgtattcatttttaacagtaagtgtaccagaccagtcatttctatatggctttcactttctggtgaatgtaagcaattcatatattaaaatgcatgccagaagattacttattgctcccatattactccattcttaccttatcatagcatgtatcacaatatatgaaaattgcatctttcctggtctagctccttatcacatcctcattgaagtcaatgactatattagtttagttcactgctctttatctgatactcagcacagcagagagcatgcttagatttttaatatgtatttattagagaggcaaatgagcaattaattcattgattattatatcaagatgttacaacctaataaatcatcctttccttcctcagaggcaagtctttatctatctgcacacatatataatatataattttatatttatatataaatatacatacatatataaatatgcctatatacatatataatacattat

SEQ ID NO: 736 - DNA, 4001 bp, Homo sapiens
ctgttactctgccctattactcactctctgggtctctgagaggggaagttttgtgcaatttaaaaaatcaaatcaagtctgggctccagagactgctctcaccccgtatcagaggaccagtagggaacatgtgactaacgtcagtcaattgctgacatcggtcaagtactttttattctgcaacactctttcacacacacgatattgcacaaatcttaaaactaccctgtgagggaaacatcatcatcgccattttatgggtgacgaaaccaaggctcggaaaagctaagtaactcactcagagccacagagttaagtgacagagctggaactcaaatgcaggttttctgcctctaaagcccatgctttcctttgtgcctcagcgggcctcctccctcctcatcccacggcagcagaccagtggctaacttaatacttgctcccaccttctcagctaggctgctggaattcctccccagtcattctctttcaatttccacagtttccctgaagtttactgacctcctcctccccaacacccagctgccaccaacacacacacaccaatccagcacagacaacacagagtgaacgaggagtgagaattcttagatagtggctggagctgtagagcttcagagaccttcccatttctgcctctatttctcagctgacgctcaggtctctggaactggggatctcatgctgcccaccctcattatcaactgctgacagaatggagcattaacaatgacccatagaaacagcaatcccgtctgtttgtcttggctatatccttgccttactcccaagcacaagaacagagtcctaccttcctaaagggttatctctctctctctctctctctctatatatatatatatatgtgtgtgtgtgtgtgtgtgtgtgtgtgtgtgtgtatgtgtgtgtgtgtgtatatagatagatagatagagatatatatgtaaaatcttttttttttttttgagacggagtctcactctgtcccccaggctagagtgcagtggtgcgatcttggctcactgcaacctccacctcctgggttcaagtgattctcctgcctcagccttctgagtagctggaattataggcaccaagggtgctttgtatattaaaccagctagagatcagctcccagcagacaagaccaaaggcaccccatgggaaatgctcatcatgagaaatgaggcttttcaccagaccagctcttcatgccatacaaccagacccttcccctgccactttctatcaaccctgaaaagagaaaagtcagccaggcacagtagcactttgggaggccgaggtgggagaattgcttgaggccaggagttcaagaccgatgtggccaacatagtaagaccctgtctttttttaataataataatagctgggtgcagtggctcacaccagtaatcccagcactttgggaggtcgaggtgggtggatcacttgagtcaggagttcaagactaccctggtcaacatgacgaaacccggtttctaccaaaaatacttaacttagccgggcgtggtggcgggcacctgtagtcccagctactcgggagcctgaggcaggagaatcgcttgaacccaggaggcagaggttgcagtgagtagagattgcgccactgcactccagcctgggtgacagagcaagactccatctccaaaataataataataatacggagaaaagtctggaatgaagtaagaaggcaacaagaaaggagggaactatgagtctagtgccctgggtcggggctggagaggactagcctcagggtctccctatgcccacctacccactgtcagccttccttcacctgtgtttgacttggccctcagacccaagctctggacttccaccctggagccagctcacgctatccctcaccaaaccctcttacctgcttgttcaaccaaaaggagtaagagcaagaccactgctggaatcatcttgggctggagatcggccgttctgacagcactgtgcagctgtgctcagcgagcagttccctgaccacagagtccccctcttcctgccacgccttcccccatgctttggccccttccccttcctgcacaagagaccgggcggctcccggaagggccaactaagggagttgggagatctgggctcttaagcgtcagcccttcaatgaccaactcctaacccacagaatgaggagactttcacgctcaggaaaggctgtctacatctgccattttccactccacctggttcagatttttttttttttttttttttttgagacggactcttgctttgttgcccaggctggagtgcaatggcgccatctcggctcaccgcaacctccgcctcccaggttcaagcgattctctcagcctcccgagtagctggcattacaggcatgcaccaccacgcccggctaattttgtatttttagtagagatggggtttctccatgttgatcaggctggtcttgaactcctgatctcaggtgatccatccgcctcggcctcccaaagtgctgggattacaggcgtgaggcactgcgcccggctggttcagagatttatctgtgtgaaactgcccgtcaacattccctcagaccccactatagccctttccctcccaactttaccccaggtcttgatttgagtggtttaccaagttatgtgggcactgagaaggtttgggcaaggagggaactgaggcgaaagaggaaatggggaatagagaagtggaaaggacaagagtcagagaagggggtggagacgagcaggaaaaattgctaagacctgactgaatctaacaggaatggagggttaatgaacattcttaggtttacagtccgagtgaaggacactaagatactgagacactaagataccagaagtttaggcctaggggccgcaagacggctaatttattataatttctccttttttagtacatgcacagaaagcctgacagccaagtgtacatgaacatacacacacacacacacacacacacacacacagaggccaatttccagtgaggaacaggctccacagaagaagctgataggcaggggggatcaaacgctgctcccctgctcaccgatctacttctccaaatacaatatcttgggtacctaggtgagaggatggaggaaaaaagtgatgttacttatcttcctgttgtgaggcaaaacaaacaaaaaaagtggtgttacccaagatccagaacccattactgtgctcaaaagattgaggacccgagtccatgccatggcctatggtgaacaggaagtgttctccttctgtccccagtgggcgtcccgaactcctttgtctaggatacctctactacacaataggcctcgtacctatgatggcaacgacatctgccaacatgtgtcccttagacatcttgtccaaaccagcctagggagattgagatggcaacaatgttagttaagacttgcaaggtgggaggagaaagaagagttcataaaaacctcaaccaaggtcaggtttaattcattggagttatagttactgggattgattcttaccagatgggcaaaaccaggagccttgatcttgcatcgataagggcggctgctgccatcagacaccaggtacaccccaaactctccctgttcaaggaagaaggttgggtgtctgtattaacatgaagagtatttttctctgccaacaaaacctctattcattctgttttctctctcattgatgaatgagctatttgttaaacatctatctttagctacctactctacatatggtcttttccttcccctcctctccttaccttgggagcctcaatggcagtatatgtggctcctggaggaacttggtagccctcagtatacaacttaaagtgatgaatcagtgactccatggaagtctgaagagaggaaacagggagcatcaataaaccatatccaaactctgtctcctaggcctcccccagcacagaaaataatctct

SEQ ID NO: 737 - DNA, 4001 bp, Homo sapiens
atataataatgctaatatatacatatatatgcataatatgtatatatatattagcagttttgtttctgtggaaggtgactgcagatctaggttttgggtgggaggaagatatttcattgttcattattgctcatttgtttgaattattattatttactatgtacaggcatacatttggaataatgatacaatcttagggcctaagtcttactctagacatcctacttagagctggcctagctgaggtactgttggtacacagtttaaggaccctgctgtgatgttttgagtatactgatttagtttcacctggtaggtacatagtgctgagacctgcacccagataaatcgacacacacacatctggcatccagaaaggagagaacgcagaggaagaccttgtggtttccggccctcctggtccaagtcataattacctctgtggatttccagctgtatggggtcacttcgccctgagagacctctctggcacctgtattcaccactgtcattgacactggcagaggtgattctgtagctgggggtcgaggtctgagtggctgtgccattgagaaaccactgtgtagagctgctcccaggcagatggagcacctcacagtgcaaggttacggtttcctcttggaacacgctgacccatggaggctgcaaagtgatcactgcctttgtggtgtctacttggagattacaagaagaaaaagaaaaagatcaagtggagtaaaggggagggctctgagcaactggtgaggcttttgtggatagcacaagggaaaaatacatatttagatttatttgaaaaataggcaagtggaaacctacaaaagccagcctttaagagtgtcctcctgctgcagagacctctgttcattgttattaaatcctcatctgggtgttgggaatctggggctcctgaggattaaattactgatgtaggtttttctgttgggagcaatgaagcagggttttagacttgggcaagccaagcggagctgttttccttatcctctgagctatactgtctctgagagtacattgcagggcttcagcagcttgtacattggaaacggaggttcaaactcctctctttgaagccttcagtatttgcctggctctttctgaggagaaaaaacccactctgctttcttgtaaaggggactggtttaggggatgttgggaaacccagcagactacttcagtgtcagcagactactttagtgtttgtgcaattctggccctttcctgctgttatatatacattcaggcatttcgctcagaggaaagagctcattcagaaaactttagaaagaaagcttacaaatcatagtttttatgaaaatcatgctctgaatatgggagattttacataatttataaatctttcttctttctctgctttccctatatgctcttctgcaggttaataggacccatcctttggaagtaggaaagtggcatagaaggagaagctgagttagagatcactcacccacttgcccatcaactggaactgcaagagatcagagaataaagatatcagttggtccaaggaaaataatgaggaagagagaattggggagacagaattaatgtagactctgagggatcaactcagatctcttgagtttctatttctctttctcaaaatccagtactaacagaactgaacaagctacaggtggttatcaaggaaacttcactgcggtgcgtccaggcttaatgctacctcagggttgcccttcccatccttttcataaaataagctctaataaaccatggaagcacagatacaagttgcttcatactcatgagttctacccagagttaccacaggaagacaaaactcttgactcacaacagccacagcctgtacccttctaactgtcccctctgagtccaacttaccccaaaggagcagagttgtcaagaaccacatgttgtctccaagctggtgggagcagtgaaatctgtaacatgcaagatattgaagaggttctgctggtggctccagagccaaattagaaaagaggaaggaaattgccttttctgaccattttcatcatgttgcttttctgggaaatacatctcaaattcttgaaacatgcttttcccatgctcatacctgttagcccatctctcccagtttgaatctctgattttcaggttatgaactctcagaatccagggaaaaggctaaagttgtattgacattctattctatttttaccctctaccgtttctgtttcttacggttagaatatggcaaaacctcactctttataattggttcaatgcctggctaatgcctccaaacaatcatttgaatccagaagtttctatatcagcctctatgaggccatgggaaaagttactcatctacaagagctgccctaatacaaaccagcctctgctcctctaggggacacagacaggatcaatctcccattttggttaaaaaagaaaacaaactctcttcctgaaagacatcatgaatttggagtgtttattttggctaaatccaaggtaattaattgtttaatgtggatgctatggagaagaaaaataactcatgcacatggatagcaatatcttcaagaaaagagtttcagagtacaagtggggagctctgtgccaccaaactgaggtggctcctgagacagagttgtaaccccataaaaagatttttaggtattgtggtaagagagaaagagagctaaatggaaactaaatgagagctaaaaaaagagagctaaagagagctaaatgaattcaatgagtgcagagagactttggcaatcttactagcagagaatgaaaaatgatgacaaatcatgctgtaagttggtgtactggccccagtttctcaccgctccctgaatctacactctctccacagcctcatgagggtatgtctctgactcttgactgtggctcatcatgagactttcattggccagcgaaatgtgaatggaaatgacatggtgctaatttcaaacttagcacttaggaagcttcacacattatctctcaccctcttgttctcctgtgattgctgagacaagaacattttttagctagtcagccacagtgcgaaacagagctgtcctagacattgtggcttgaggcagagctgcctcacctgccctgcaaacttgtaagtgagaactaaatgcttacctttatatgctactgagatttgaggattgctatacgagcaagagctgactgacacaaatgaaaagcaaggaagaaaggccgggaagaactcagggtgttctgaagagacgagagaagcctcagcttgttaaaatttatattcaaagcctatatctgtaactattttactattttgtctccaaagttttctactgtatgcatgtaccataatttatttcaccaacttctcttcatgaacatgtaggttatttctaattttttactgtgtgaccagtaaaaaagactgcttactaccaaaatagtcttgtgactacctttaaacatttgacttattttttccttaggacacattcctagaatcagtagtgcttactcaaaggaaatgcgcattttttcctttggataagatgctatcagattgtctatgatcattatcctcatcactgcataaattttagagtgcttattacatgccagacaaatatgcttgatacatgttttcttatttaagcctcacaataatccatgagtagacactagtatctccattttacaaatgataaacctagtgaaagaggaaatcagtaatttgtccaaggttgtaaaaaatagaagcaggattcaaaatcagacagtttgatttcctttacgtactcactgatggagtataacagtgcccaccccatgccttgcgattcctgctttgtagtaaaatagctacttctttgaaaaataagtgaaatcatttcattgatcaggataacatgagggaattaggattgttgtgtaagaggaatgtaagatctata

SEQ ID NO: 738 - DNA, 4001 bp, Homo sapiens
taataatgctaatatatacatatatatgcataatatgtatatatatattagcagttttgtttctgtggaaggtgactgcagatctagggttttgggtgggaggaagatatttcattattcattattgctcatttgtttgaattattattatttactatgtacaggcatacatttggaataatgatacaatcttagggccgaagtcttactctagacatcctacttagagctggcccagctgaggtactgttggtacacagtttaaggaccctgctgtgatgttttgagtatactgatttagtttcacctggtaggtacatagtgctgagacctgcacccagataaatcgacacacacacacatctggcatccagaaaggagagaacgcagaggaagaccttgtagtttccggccctcctggtccaagtcataattacctctgtggatttccagctgtatggggtcacttcgccctgagagacctctctggcacctgtattcaccactgtcattgacactggcagaggtgattctgtagctgggggtcgaggtctgagtggctgtgccattgagaaaccactgtgtggagctgctcccaggcagatggagcacctcacagtgcaaggttatggtttcctcttggaacacgctgacccatggaggctgcaaagtgatcactgcctttgtggtgtctacttggagattacaagaagaaaaagaaaaagatcaagtggagtaaaggggagggctctgagcaactggtgaggcttttgtggatagcacaagggaaaaatacatatttagatttatttgaaaaataggcaagtggaaacctacaaaagccagcctttaagagtgtcctcctgctgcagagacctctgttcattgttattaaatcctcatctgggtgttgggaatctggggctcctgaggattaaattactgatgtaggtttttctgttgggagcaatgaagcagggttttagacttgggcaagccaagcggagctgttttccttatcctctgagctatactgtctctgagagtacgttgcagggcttcagcagcttgtacattggaaacggaggttcaaactcctctctttgaagccttcagtatttgcctggctctttctgaggagaaaaaacccactctgctttcttgtaaaggggactggtttaggggatgttgggaaacccagcagactacttcagtgtcagcagactactttagtgtttgtgcaattctggccctttcctgctgttatatatacattcaggcatttcgctcagaggaaagagctcattcagaaaactttagaaagaaagcctacaaatcatagtttttatgaaaatcatgctctgaatatgggagattttacataatttataaatctttcttctttctctgctttctctatatgctcttctgcaggttaataggacccatcctttggaagtaggaaagtggcatagaaggagaagctgagttagagatcactcacccacttgcccatcaactggaactgcaagagatcagagaataaagatatcagttggtccaaggaaaataatgaggaagagagaattggggagacagaattaatgtagactctgagggatcaactcagatctcttgagtttctatttctctttctcaaaatccagtactaacagaactgaacaagctacaggtggttatcaaggaaacttcactgcggtgtgtccaggcttaatgctacctcagggttgcccttcccatccttttcataaaataagctctaataaacagtggaagcacagatacaagttgcttcatactcatgagttctacccagagttaccacaggaagacaaaactcttgactcacaacagccacagcctgtacccttctaactgtcccctctgagtccaacttaccccaaaggagcagagttgtcaagaaccacatgttgtctccaagctggtgggagtagtgaaatctgtaacatgcaagatattgaagaggttctgctggtggctccagagccaaattagaaaagaggaaggaaattgccttttctgaccattttcatcatgttccttttctgggaaatacatctcaaattcttgaaacatgcttttcccatgctcatacctgttagcccatctctcccagtttgaatctctgattttcaggttatgaactctcagaatccagggaaaaggctaaagttgtattgacattctattctatttttaccctctaccgtttctgtttcttagggttagaatatggcaaaacctcactctttataattggttcaatgcctggctaatgcctccaaacaatcatttgaatccagaagtttctatatcagcctctatgaggccatgggaaaagttactcatctacaagagctgccctaatacaaaccagcctctgctcctctaggggacacagacaggatcaatctcccattttggttaaaaaagaaaacaaactctcttcctgaaagacatcatgaatttggagtgtttattttggctaaatccaaggtaattaattgtttaatgtggatgctatggagaagaaaaataactcatgcacatggatagcaatatcttcaagaaaagagtttcagagtacaagtggggagctctgtgccaccaaactgaggtggctcctgagacagagttgtaaccccataaaaagatttttaggtattgtggtaagagagaaagagagctaaatggaaactaggatgaattcaatgagtgcagagagactttggcaatcttactagcagagaatgaaaaatgatgacaaatcatgctgtagattggtgtactggccccagtttctcaccgctccctgaatctacactctctccacagcctcatgagggtacatctctgactcttgactgtggctcatcatgagactttcattggccagcgaaatgtgaatggaaatgacatggtgctaatttcaaacttagcacttaggaagcttcacacattatctctcaccctcttgttctcctgtgattgctgagacaagaacattttttagctagtcagccaccgtgtgaaacagagctgtcctagacattgtggcttgaggcagacctgcctcacctgccctgcaaacttgtaagtgagaactaaatgcttacctttatatgctactgagatttgaagattgctatacaagcaagagctgactgacacaaatgaaaagcaaggaagaaaggccgggaagaactcagggtgttctgaagagatgagagaagcctcagcttgttaaaatttatattcaaagcctatatctgtaactattttactattttgtctccaaagttttctactgtatgcatgtaccataatttatttcaccaacttctcttcatgaacatgtaggttatttctaattttttactgtgtgaccagtaaaaaagactgcttactaccaaaatagtcttgtgactacctttaaacatttgacttattttttccttaggacacattcctagaatcagtagtgcttactcaaaggaaatgcgcattttttcctttggataagatgctatcagattgtctatgatcattatcctcatcactgcataaattttagagtgcttattacaagccagacaaatatgcttgatacatgttttcttatttaagcctcacaataatccatgagtagacactagtatctccattttacaaatgataaacctagtgaaagaggaaatcagtaatttgtccaaggttgtgaaaaatagaagcaggattcaaaatcagacagtttgatttcctttacatactcactgatggagtataacagtgcccaccccatgccttgtgattcctgctttgtagtaaaatagctacttctttgaaaaataagtgaaatcatttcattgatcaggataacatgagggaattaggattgttgtgtaagaggaatgtaagatctatagcctggaaggataaaatactttctttctaataag

SEQ ID NO: 739 - DNA, 4001 bp, Homo sapiens
cgtggtggctcacgcctataatcccaatactttgagagcctgaggagggaagatcacttgaggccaggagctgaagaccagcctgggcaacatactgagaccctgtctctataaaaataaataaaaacaagtcacttggcatggtggtgtgtgcctggagtcccagctacttgggggaaaaaaaaaagaaatactatctagaagcattttctctacagactctattaaactgaacactgtcagatgtttacataaagctaaatcagatcacgtgactcctttaattaaagccatctcaactcactcaggaataaaagtcaaaatagttgcaacagcctatcagcctctgcctgatctacccttcaccctcccctcacctctgacctcatcttccagactgaattctacactcccacctccacacacctgtctggcagcctcctgccttagagcctttagaggtctatttcccccaacctctctgctttaccgcattgccacaggaggagggtagttttttaaagtagggatttccttctgcttctcccacactcagctgtttgtggcctcgtaacccccttgctcaatcaagactgaggcaaaaacaacctaacacatgctgagaaaattattagaaattcccccttcccccaccacgcatgctaagcaaagagggtgggtgaaatggggaatgaatgagcaactcacaacagtgcttcccagtaagcagtccacgcccactctttcctgcaaacctctgtctgtaaacagatttcatccgtcctggccctcccaggtccaccctggggccttcctccactgaccggaaagcacagtcagatgcacagggtcgctgaggctggtctggccagtctggcacgtgtactccccgctgtcattgttgttggccttgaacctgtagctgggctgcgtgtgggtgggaatgagattcccattgtggaaccactgaatggagtcgctctcagggctgcgagccccctggcatgtcagagtcacagagtcctcctggagcacgttgatccacgggggctcaagtttcagcacagcctttgggggagctgctgaggggcagagtggaaaggggtgtggaataaataaccctgaagggactgtggatgccaaaggagctcccaagggaggtcaggcacccaagagtcctattgtagatgtagttcaagatctgtacttgcagcggcctcattcccttgggtcttcagtggatctaagaagcaaatcccagaccccactaaaatgggggaactgcccatgctgaacccaagcttgattttcagtggaatagacatacccccccgccgccccagcaaacacagcatcatattatgaggatacaacactgtcaatacaaggaagcaaagggcatactcaccagcttgactgtctgcagaagctgtaaaagagaagagagtggatcaacgtcgagcaggagaacacggcttcaaatttagctgcgtatgtgaaatgctggggaggtgagcttgggctcttccttctccaggacccatctcaagatcctgtttccagttgatcttttataaaagtattcacttcatatgtcccctttatctcatttcctgttcctcctcatgactacaaagtacacatgaatgtttggtgcagaatggactttccagggactatgaaactacctctgagttctgaccttaggaaccattggaacacttaagaattcagggtcctctctcctctttcaatctatcccctgcttccagggcccaggcctgctccttaccacactggtacctggagtccaggcagtaggagtgtctgaaattgccccatttcagaatgaccctcactcacccagcagcagcaaaactgtcaatggttgaagcagccacaggtttctgggacatacattctgagacatttgggtctccatagtcatcccagcactgtgccaacgtccagtgggttttaagagacaagcttagaaaagaggaaggaaatggtttcatcttcttgtgcagctgtcgtcagtcctcaattctgtttctgctaaccaatcaggaacaattccagttaggagttgagtctgctttatagataagtctattacacaccagcttgtgtccttgtgaaaaccccggggaggggttactgttctgctggccggtatacccctccttagagtattctttttctgtttaagataattcctggtcggccgggcgcggtggctcacgcctgtaatctcagcactttgggaggccaaggcgggtggatcacgaggtcaggagatcgagaccatcctggctaacacggtgaaaccccgtctctactaataatacaaaaaaaatttagccgggcgcggtggcagatagtcccagctactcgggaggctgaggcaggagaatggcgtgaacccgggaggcagagcttgcagtgagcccagatagcgccactgtactccagcttgggcgaaagagcgagactccgtctcaaaaaaaaaaaaaaaaaaaaaaaaaaaaagataattcctggttaaaatcttatccaaaggcattagagcagtttgcttccaacaggagccaaaaatgaccagcaatgcagcctgacggagaagaggggagaagagcctgggaagaagataatgtccagctattttttatacccataggacagaaacttaaagtagaaaattaccttgtttttcacaatattttctcctactgaaattttcttttcttgaaacgggaaccttttctcccactgaaactgcaagtagttttccctctatgttttccattacagaaattgtaaggaactacccatgcggagcagttgatttgcacacatatttatatctttcaaaaatggaacacaaataatggggttataaattggcaaacatttttgaaggggatttaggcactatctattaaacatttgaaatttgtaagccttatcacctaaaaattccatttcaaaaaatacatccaatagaaacacttaggtgtgaaaaaaaaaatcaacaagaatattcattggagtattgtagcgtataaggaaaaaagtcaagattagaagataatagagacagttcaagaccatcctgggcaacagagtgaaatctcatctctataaaattaattaaaaagtaaataaaatgggggattttattaaataaaaaaattattatttttgtaaatttaataaaataaaatagtaactgccttatagagttgttttgaaggttaaataatgtcagataaattaattgtataaagtacttagaataataacaaaaatatcagaaaatgttaaataatttaattactatctttatgctactcttttatggatgggcctgtgagaagatagtgacacccctgtatttagtgggtggtattttacctgaaaagggtgctcattcccagtgcctaaggaagaatgtttcccagagcaggtggagagccactgttggtgcagtgggaatcttgctcgccatagtggttgctagttatcatgcccatagtctggacctcctgagagtcaaggcatacaggatgcagtccagggtgggaagtatagcaacgtatgctccatggagtggcaagttgggagtaagctagtaaagacccccagggaggtgccagcagagctagagacatattctgtggagagtatcttacagagaatgtgacagggtatatgggtctgagagggggctggttatggtagattcagacattgtgatcatggctaggactagagagattcctaggggaatacccatacactgaaaattaaatgcacacttcatttctatacaggcaaaagaatgttatcctcacatatgcaggtggcaaaggaaggagcaacaaattgttctcaggccatctatactctgcttacccaagagatatactataccccacctcagtccaactgtaaaatttcaggacaatgattttgtatctaaggtagcctttaaaaaa

SEQ ID NO: 740 - DNA, 4001 bp, Homo sapiens
aaagaagaggaagagcgagagaaaaaaaaggaaaagatgaggaaaggagagagaagtcaccaattatgtatccattccacagttaataaatagtagtaaataccaaatatcctcccacccggtgtacttattgcttcacaataagttcattgacctcgtatttccggtcaggaaggctgtcagtcatgttcactgataagtctccaagtcctagaacagtgcctgcacatagaatttggagagtcagcaggagcaaaggtggtaaaaacagaaagtgcagtgtacatactgcctggctgtagaagaagattcatgtggggtgcaatggagaacacagtgtgcagggcagaattagagtttttgcagtgggcaatggagcagcacggaaggcatttattaaatgcactgacacagccatagctggacctgaagatgccgtggccttggtgggcagcatggatgcaggggaggggagacaggatcaatcaagaccccatcagagggtgctataaaaattgagttatcaagtgatgaagacgtaaatgtggcagccccaataagaatggaaaaaatggggtaaatctttgatgacttagtaaaaggcaaatgggaaaaaataccaaagatctttcccaggagtcttgcccaggtggtagagaagcacatcacctctctaggcctgaacttccccacatgacaaatgaggtagttcactttactttctcttctactttaatccattccatcctattcatgggggaatactctgtcttccttacctctttctcctgtagcccagtatcatcctgcattgacagccaagagccgagggcccccagagctgatcacgtttcactagtaatcacatcacacaacttggctgagtggcaatatgctttcctctagaatgtgagggtggaagccccaggaactgagcttggagagatagtcctggcagtaagtctcccctacttggcctcccctaggcttttcaaaccactcagcaaaatcagtcgtcgtcccctatccaacagctgagaacatggttagaaaagagccctccattttggccaaagaccctgtctctcttgctgatcagatgcagtacttccccatcatggtctgtgtggtcaaaagcagcatgcatgatttctctggtcccacaacagatgactccagacttacccaggtttttgtattctcagagtcccttttccctggataacccagatctccctgtgcttctgcctaggggaatattcttacacatgaagacaataggcttctgctacacaaagtggtttcaggggcacagagaatggccactgccacctcctcccaaaaatgcatcttacaacttcctccctaccccttacccaaggcagcactggccctcctgcctaagatttggtcttttgtgaagcataaatttcaaagaaggcaaacactctggccattcatttatcattcaagtataggttactagacttttctcagagcgggttctgatgtggaaagcaacagaacatcaagagtctgggtgttcagtaagattgggtgaaagacactgaaaaaaccctgaactctgccacattggatgactttccaaagccagcagagtcatcagggtttcatcttcaccagcctgccttccctcccctgggtgtcctgacggtcttcccatgccacccctcatccttgcccagggttatccccaactgaggttcccgttcctctctccctcctgggggccctgactcacccaggaatagcacagctgtccacagaagcatatgaccccaaggctggggggacttgcagtcagcccagtcactctcagtggcaaggacaggtaagaatgacaggattcccatcactccctggagcgagctggcgcccagagcacagcagtcacagccttctctcaaagcttggcggattctaccctagagggcaaacaaattctggagtctgaaaggggaagtgaaaaagaaatgttctgttttatcacaggctcctccctttccaccctctttcctctcagtctttccctcctagaagattcagagcttcccagaataaatctggtgtagcccatgttcaaattcacagaaattttagaaactagggaaacaactcccttcttcttcctctgaggccacagctggcctgggcctctgggagaaagagggaaatggtcaccaaaactcagctcagaacctcctgtttcagtctctatcctcctgagaaagggtgatgcaggacagcgtgcaccagcaatcttctagtacttctacttccatttggagacccaggccctggaatctggatgcttcttgaaattgagcatggggactccaggccacctaccatcatttaattttctctattgtcataatcccagactcactgctgagttgtggaacaaggacaaggaggtatgtcaggatggcaatagaatgaccacactcatcctcattattcccctgccctcattcattctttttcttattcattcttctatttaatgaatatcccaataagtatctattgagcaccaatctgtgccctggttttgtatcttggtcatttttgccaccctcatttccatccctgttctcactgcaacggcatggtgaaagagcatgggctttggagctgtgttaggtttcgggttgaatgccaggtggcttctcagagtgtcaggttccaatctgtaaaagtgaagattattgtgcctaccatttaagcacggtttctcagcctgagcactatggacattgtgggccaaattattcttgtgaggaccttccctgagcattgtaggatgttccgcagcactcctgggctctacctgttagatgccagtggcactcccagttgtgaaaacaaatatgcccccagatattagcaagtgttccccaggggatgaattgcccctggctgagaaccacagtactacaggtttttggaaagtaaaagagaatatgagggttagcaaagtgcttggtacatcgtgggtgtccggtgaatgctagttctcttttcttgcgttctgtcatcatcctcattaccatttgttcaccctcaacatctccaaaacacgagtttctctggaatctctcctggggcccctttctggggactctttcccaaatgccttctcaggaagcaggctgtaatactttaatacttaaggaaatgacactgtaaaaccttgttatcacactctgtggtcttcagaaaccttcgacagccccacccactctgacgcgtgcttttactactgcccccgttctacccccagatccatctccagctcttatctaatttttaggttaaaaattagttttttttttaactggcaatgtgataacaatgagctggcatcaatactttataaatatcattagaaacaaaggcatacaatatataggtaacacactaagaaaccaaaattaatagttactatgtaagcatgtgaattcttactgtaaaaccaagggtatctgagacaggtggcaattaatttagaagtttattttgccaaggttaaggacatgcctggaagaaaacaacacagaatcacagaaacagtatgtggtctgtgactttctccaaagatgaatttgagggtttcaatatttagaggaaaagcaggctggaggggaaagaggaagagtatggtaatccacgtgttgtaagggaaaagtagcaggtaggggaatagtcaattatgtgctgtcttgctctcggtaaattggcacttcatgtaagataaggtagaaacgagtaacctgtggagtttttcctttctttctttctctctctttcttcctttcttgcttccttcctttctttctttctttctttctttctttctttctttctttctttctttctttctttctttctttctttctttcctttcttccttccttccttctttctttctttcttcctttctttctttctctttctttttctttctttcttacttg

SEQ ID NO: 741 - DNA, 4001 bp, Homo sapiens
gggacggtgtagtgggagagagagtaaaaaagaagaggaagagcgagagaaaaaaaaggaaaagatgaggaaaggagagagaagtcaccaattatgtatccattccacagttaataaatagtagtaaataccaaatatcctcccacccggtgtacttattgcttcacaataagttcattgacctcgtatttccggtcaggaaggctgtcagtcatgttcactgataagtctccaagtcctagaacagtgcctgcacatagaatttggagagtcagcaggagcaaaggtggtaaaaacagaaagtgcagtgtacatactgcctggctgtagaagaagattcatgtggggtgcaatggagaacacagtgtgcagggcagaattagagtttttgcagtgggcaatggagcagcacggaaggcatttattaaatgcactgacacagccatagctggacctgaagatgccgtggccttggtgggcagcatggatgcaggggaggggagacaggatcaatcaagaccccatcagagggtgctataaaaattgagttatcaagtgatgaagacgtaaatgtggcagccccaataagaatggaaaaaatggggtaaatctttgatgacttagtaaaaggcaaatgggaaaaaataccaaagatctttcccaggagtcttgcccaggtggtagagaagcacatcacctctctaggcctgaacttccccacatgacaaatgaggtagttcacttcactttctcttctactttaatccattccatcctattcatgggggaatactctgtcttccttacctctttctcctgtagcccagtatcatcctgcattgacagccaagagccgagggcccccagagctgatcacgtttcactagtaatcacatcacacaacttggctgagtggcaatatgctttcctctagaatgtgagggtggaagccccaggaactgagcttggagagatagtcctggcagtaagtctcccctacttggcctcccctaggcttttcaaaccactcagcaaaatcagtcgtcgtcccctatccaacagctgagaacatggttagaaaagagccctccattttggccaaagaccctgtctctcttgctgatcagatgcagtacttccccatcatggtctgtgtggtcaaaagcagcatgcatgatttctctggtcccacaacagatgactccagacttacccaggtttttgtattctcagagtcccttttccctggataacccagatctccctgtgcttctgcctaggggaatattcttacacatgaagacaataggcttctgctacacaaagtggtttcaggggcacagagaatggccaccgccacctcctcccaaaaatgcatcttacaacttcctccctaccccttacccaaggcagcactggccctcctgcctaagatttggtcttttgtgaagcataaatttcaaagaaggcaaacactctggccattcatttatcattcaagtataggttactagacttttctcagagcgggttctgatgtggaaagcaacagaacatcaagagtctgggtgttcagtaagattgggtgaaagacactgaaaaaaccctgaactctgccacattggatgactttccaaagccagcagagtcatcagggtttcatcttcaccagcctgccttccctcccctgggtgtcctgacggtcttcccatgccacccctcatccttgcccagggttatccccaactgaggttcccgttcctctctccctcctgggggccctgactcacccaggaatagcacagctgtccacagaagcatatgaccccaaggctggggggacttgcagtcagcccagtcactctcagtggcaaggacaggtaagaatgacaggattcccatcactccctggagcgagctggcgcccagagcacagcagtcacagccttctctcaaagcttggcggattctaccctagagggcaaacaaattctggagtctgaaaggggaagtgaaaaagaaatgttctgttttatcacaggctcctccctttccaccctctttcctctcagtctttccctcctagaagattcagagcttcccagaataaatctggtgtagcccatgttcaaattcacagaaattttagaaactagggaaacaactcccttcttcttcctctgaggccacagctggcctgggcctctgggagaaagagggaaatggtcaccaaaactcagctcagaacctcctgtttcagtctctatcctcctgagaaagggtgatgcaggacagcgtgcaccagcaatcttctagtacttctacttccatttggagacccaggccctggaatctggatgcttcttgaaattgagcatggggactccaggccacctaccatcatttaattttctctattgtcataatcccagactcactgctgagttgtggaacaaggacaaggaggtatgtcaggatggcaatagaatgaccacactcatcctcattattcccctgccctcattcattctttttcttattcattcttctatttaatgaatatcccaataagtatctattgagcaccaatctgtgccctggttttgtatcttggtcatttttgccaccctcatttccatccctgttctcactgcaacggcatggtgaaagagcatgggctttggagctgtgttaggtttcgggttgaatgccaggtggcttctcagagtgtcaggttccaatctgtaaaagtgaagattattgtgcctaccatttaagcacggtttctcagcctgagcactatggacattgtgggccaaattattcttgtgaggaccttccctgagcattgtaggatgttccgcagcactcctgggctctacctgttagatgccagtggcactcccagttgtgaaaacaaatatgcccccagatattagcaagtgttccccaggggatgaattgcccctggctgagaaccacagtactacaggtttttggaaagtaaaagagaatatgagggttagcaaagtgcttggtacatcgtgggtgtccagtgaatgctagttctcttttcttgcgttctgtcatcatcctcattaccatttgttcaccctcaacatctccaaaacacgagtttctctggaatctctcctggggcccctttctggggactctttcccaaatgccttctcaggaagcaggctgtaatactttaatacttaaggaaatgacactgtaaaaccttgttatcacactctgtggtcttcagaaaccttcgacagccccacccactctgacgcgtgcttttactactgcccccgttctacccccagatccatctccagctcttatctaatttttaggttaaaaattagttttttttttaactggcaatgtgataacaatgagctggcatcaatactttataaatatcattagaaacaaaggcatacaatatataggtaacacactaagaaaccaaaattaatagttactatgtaagcatgtgaattcttactgtaaaaccaagggtatctgagacaggtggcaattaatttagaagtttattttgccaaggttaaggacatgcctggaagaaaacaacacagaatcacagaaacagtatgtggtctgtgactttctccaaagatgaatttgagggtttcaatatttagaggaaaagcaggctggaggggaaagaggaagagtatggtaatccacgtgttgtaagggaaaagtagcaggtaggggaatagtcgattatgtattgtcttgctctcggtaaattggcacttcatgtaagataaggtagaaacgagtaacctgtggagtttttcctttctttctctctctttcttcctttctttctttctttctttctgtctttctttctttctttctttctttctttctttctttctttctttctttctttctttttttccttccttccttccttccttccttctttctttctttctttctttctttctttcttt

SEQ ID NO: 742 - DNA, 4001 bp, Homo sapiens
gcattgcactccagcctgggtgacagagtgatactctgtctcaaaaaataaaattaaaaaaaatgaaaataaatatataaataactattattgagcatctatgccatggcctaaccttcacatgacacattcacattgtatgcactccatatggggattcttggaattgtgcaatgcagcagtcctatatctactgtctgacaggctttgacattttgcccaagacctacttagagctaggactacaactctgataccattcagtgggaccacacatcatctcatcttagcttttatctctaagaatatcatctctggctcttaccaagtatttcaggaccctttgtttcaccctttattggtgattttcctcttccccttcatcaactcaccgatatggacttctagctgcaccgggtcactgagggtggagaggtttgtctggcacctgtactctccactgtcgtcgactgtggcagcgtcaatgaagtagctcgaggcctggcttgagatgaggctctcattgtgaaaccactgtgtggaattgtcctcaggggagtaggctccctggcacttcagagtcacactgtccttctcgagcaccctgtaccattgaggctccaggaacaccacagcctttgggagatcttctgaggagccaagataatgtggggtgaggacagggagaggagcaggctctacactgccattcccagggagcctcaaagccagaatgagctcattgcaaacccatgcttggtggctcagtcttagagcatcttggccccatttttggcctgttcagtatcttaaggaaagctggccagagaagcacagggccaagttctgctgtgttggaggaactatccctgctaaccccacatcagcattttcccattcaacaagcatttcccaatatcttatggcctttgtccccatatgtgccccactgggtcaatccaagaccatgaagctgactcaccagtccgcatgccagctgaaactgcaagaaaaaagataaatcaaatattgagtaggggcagagatcagagtgattagaacatagagtgagtttaaaactcccctgccctcctctgccccaggagcccaattttcccaagaatcaggatgtttctggtggaaaccttgctacctgctctctggtctccactgttcatgcctcttgcgccactgtcaacacaaatccctattttcaacactgctcccttaccccttgctccctgtgcaaactcacaaattaagggtacaggttgaatttccctgaaccaagctacagaaagagcctcaacccatatccccacaagaaagggtagaaattgaaaatcatagaggagaaccctggaatgtcaaactgaaagagacagaccctagggaccatctagtcgaagctctttggttccacagagtgattctgggacccagaggggtgaagtgactggcctcactcatgagtatgccccaattggaaccagcattctcctcatttctagccccatcttggcttgtcctaggagctcaatccacagctatagatgtggtgaggggtcccatcccttcgtgggagtctcattcgtagcctgaaaaggggtctctgctgaacccaaggcatctcaaacttctccctcaaccagggagaccctgacttacctagaagtagcagagcagttgggaggagcagctgccacatgatgccacactggagtggacaagtcaccaaagatatccggagccctaaagggaccaaaccgactagacaggaggaagtaaacagcctttccccagcccctccacccatctctgtcacccaccaatttccttttcttgaaacttcatctgacttctcagtctgaagtctggcaagggagccccaccatagaacaggaccaggaaggaaagagcctggaggcaaggtgggtgggtctgccccctttactccctcaaaggtctgtggctgagcatctgaggacacacacagaatctgccagagtgtgccctcagccatcccaggatgcttgccccatctcctggatttggatccacccagcaccaagaatgggacagtgagaccctggggatgagattcaaggtgggaggagcattctctgagggcttccttcatttcacctcagaacttgtcactctcctgcctcgcccagacccatctatctccagctgaggccctgcctgcacacagaaagtggtcctttcaaatcttcagaccactagcagtgtctctgcctcaatattatctccacgcagaatttctttcaaaattcaaaattcaaaatctatatgctcctgggatatgtaatccacaggagctactgactttttagtgtgatttgatcattagatttccaggttagaagaaacccaggtagggtagagaaatgggccctggaagaacaagtcaccagcgaaaggctgaaaagatcacagaaaaggtgggggtggggaggggcgaggacaggaactctttaccttcctcgtgttacccaggtcctgcggatttagctcaggcccctccgggccactggatctgggctggtctgtcagcctaggagccggggctccagggctccttaccagaaaaggtggaggggggtggccaggaagtgggagggttgttaacctcttctcttctctccagattctcccccgtaaccccacgttggttactctcacaatggtccaggtcccaggcagaaaatcagatgactctgcttgatagtgccactcccccagtggattcgtggacatctgggacaggtctcacctggcttagaaaagcccaggaggcgagcagcaggcccgtgtgggcacctgatacttgttaggggtggagtggaggcaggggctgacacaggtgcccgccaacctttgctataaatgaatgctctttctactccagaatgacctaaaaaccactactcaggttttgttttttatttgtgtgtttcatttggctcctgggtggagttaattgatcctcccattgccatccacgtacccacccctccccccgccacacacagagtcttgcagcagccccttctccacaggcccttggattggacaatggaaatgaacccaggcagccattccagttctccttctcaagtgactcatctacgccttgcaaaatccagacaagtatctggaaacttaaagttccttgctgtagcacttcggatgcttatctgggaaacctaaagcagaaacaaagccttcagggctaaggatggtctctgaggcaaaaagcggatatccctcaattctttcttcttttcagatatccaggtggctttctgccacgtgacttctgatgcaaggccttcactttgttttccttctttgaggtcttattttcttatttgactcctctttggtctgtggctctccaatggagggaggaattcttagctgccaaaagggtgggctagataggaagaagaggagagagcacaggaggagagaaagggactgcaacaggatgggaagctttcagggggttttcattaagtggttgttgaacaattctcaaattgagtgttgttggatttctaagggttaattttacagtaatggataaaatgcaaaattttggcctatggtggcttattgtaatcccagcactttggaaggccaatgtgaggtggaagaattgcttgaggccaggaatttgagaccagcctaggcaacatagaaagaccccatctctactaatatagtaataataataatagccagatgtggtggtgcatgcctgtagtcccagctacccaggaggctgaggcaggaggattgcttgagccccggagttagaggctacagtgagttatgttcatggcactgcactctagcctgggcgacagagtgagaccctgactcttgggggggaaaaaaaaaaagcaaaatttttacaaaagggtagatggtcttgggatatcatatattgaagtgtttatcttcatgtttgc

SEQ ID NO: 743 - DNA, 4001 bp, Homo sapiens
tcgagcaccctgtaccattgaggctccaggaacaccacagcctttgggagatcttctgaggagccaagataatgtggggtgaggacagggagaggagcaggctctacactgccattcccagggagcctcaaagccagaatgagctcattgcaaacccatgcttggtggctcagtcttagagcatcttggccccatttttggcctgttcagtatcttaaggaaagctggccagagaagcacagggccaagttctgctgtgttggaggaactatccctgctaaccccacatcagcattttcccattcaacaagcatttcccaatatcttatggcctttgtccccatatgtgccccactgggtcaatccaagaccatgaagctgactcaccagtccgcatgccagctgaaactgcaagaaaaaagataaatcaaatattgagtaggggcagagatcagagtgattagaacatagagtgagtttaaaactcccctgccctcctctgccccaggagcccaattttcccaagaatcaggatgtttctggtggaaaccttgctacctgctctctggtctccactgttcatgcctcttgcgccactgtcaacacaaatccctattttcaacactgctcccttaccccttgctccctgtgcaaactcacaaattaagggtacaggttgaatttccctgaaccaagctacagaaagagcctcaacccatatccccacaagaaagggtagaaattgaaaatcatagaggagaaccctggaatgtcaaactgaaagagacagaccctagggaccatctagtcgaagctctttggttccacagagtgattctgggacccagaggggtgaagtgactggcctcactcatgagtatgccccaattggaaccagcattctcctcatttctagccccatcttggcttgtcctaggagctcaatccacagctatagatgtggtgaggggtcccatcccttcgtgggagtctcattcgtagcctgaaaaggggtctctgctgaacccaaggcatctcaaacttctccctcaaccagggagaccctgacttacctagaagtagcagagcagttgggaggagcagctgccacatgatgccacactggagtggacaagtcaccaaagatatccggagccctaaagggaccaaaccgactagacaggaggaagtaaacagcctttccccagcccctccacccatctctgtcacccaccaatttccttttcttgaaacttcatctgacttctcagtctgaagtctggcaagggagccccaccatagaacaggaccaggaaggaaagagcctggaggcaaggtgggtgggtctgccccctttactccctcaaaggtctgtggctgagcatctgaggacacacacagaatctgccagagtgtgccctcagccatcccaggatgcttgccccatctcctggatttggatccacccagcaccaagaatgggacagtgagaccctggggatgagattcaaggtgggaggagcattctctgagggcttccttcatttcacctcagaacttgtcactctcctgcctcgcccagacccatctatctccagctgaggccctgcctgcacacagaaagtggtcctttcaaatcttcagaccactagcagtgtctctgcctcaatattatctccacgcagaatttctttcaaaattcaaaattcaaaatctatatgctcctgggatatgtaatccacaggagctactgactttttagtgtgatttgatcattagatttccaggttagaagaaacccaggtagggtagagaaatgggccctggaagaacaagtcaccagcgaaaggctgaaaagatcacagaaaaggtgggggtggggaggggcgaggacaggaactctttaccttcctcgtgttacccaggtcctgcggatttagctcaggcccctccgggccactggatctgggctggtctgtcagcctaggagccggggctccagggctccttaccagaaaaggtggaggggggtggccaggaagtgggagggttgttaacctcttctcttctctccagattctcccccgtaaccccacgttggttactctcacaatggtccaggtcccaggcagaaaatcagatgactctgcttgatagtgccactcccccagtggattcgtggacatctgggacaggtctcacctggcttagaaaagcccaggaggcgagcagcaggcccgtgtgggcacctgatacttgttaggggtggagtggaggcaggggctgacacaggtgcccgccaacctttgctataaatgaatgctctttctactccagaatgacctaaaaaccactactcaggttttgttttttatttgtgtgtttcatttggctcctgggtggagttaattgatcctcccattgccatccacgtacccacccctccccccgccacacacagagtcttgcagcagccccttctccacaggcccttggattggacaatggaaatgaacccaggcagccattccagttctccttctcaagtgactcatctacgccttgcaaaatccagacaagtatctggaaacttaaagttccttgctgtagcacttcggatgcttatctgggaaacctaaagcagaaacaaagccttcagggctaaggatggtctctgaggcaaaaagcggatatccctcaattctttcttcttttcagatatccaggtggctttctgccacgtgacttctgatgcaaggccttcactttgttttccttctttgaggtcttattttcttatttgactcctctttggtctgtggctctccaatggagggaggaattcttagctgccaaaagggtgggctagataggaagaagaggagagagcacaggaggagagaaagggactgcaacaggatgggaagctttcagggggttttcattaagtggttgttgaacaattctcaaattgagtgttgttggatttctaagggttaattttacagtaatggataaaatgcaaaattttggcctatggtggcttattgtaatcccagcactttggaaggccaatgtgaggtggaagaattgcttgaggccaggaatttgagaccagcctaggcaacatagaaagaccccatctctactaatatagtaataataataatagccagatgtggtggtgcatgcctgtagtcccagctacccaggaggctgaggcaggaggattgcttgagccccggagttagaggctacagtgagttatgttcatggcactgcactctagcctgggcgacagagtgagaccctgactcttgggggggaaaaaaaaaaagcaaaatttttacaaaagggtagatggtcttgggatatcatatattgaagtgtttatcttcatgtttgcttttctttcttctccttccctttttcttccttcccctcctcttctctccttttctcattggaaggccaggcacagcagaagtttctgactatggaattcagttgattgtcatcctctaggacttacagtttcttagggggagaacatcagataagtatttgaagtgctagagggactgtgacagtatttatgaaatgctgtgtatgcacaaagaagacagtggctaattctatctgagggaggagtgtacatggaagagagaacactttaattagatcgcaaaatattcagcaggaagatttttgagagaaataggcattccaggcaagaggagcagcatgagcaaagacttggagtgaagtagactgtcatgtttgcagagctggctgtagttccacaagtgtagttggatgtagttccacaagtgtagtgagtactacaaaggagaagcacaggttccaaaaggattaagatgtctgggtctcacaggaatctggaggaaatcccaactctgccacttatttaaccttctagccctcagtttccttatctgtaaagtgaggctaacaataatggcactcatggcttaaatgag

SEQ ID NO: 744 - DNA, 4001 bp, Homo sapiens
ataaataactattattgagcatctatgccatggcctaaccttcacatgacacattcacattgtatgcactccatatggggattcttggaattgtgcaatgcagcagcctatatctactgtctgacaggctttgacattttgcccaagacctacttagagctaggactacaactctgataccattcagtgggaccacacatcatctcatcttagcttttatctctaagaatatcatctctggctcttaccaagtatttcaggaccctttgtttcaccctttattggtgattttcctcttccccttcatcaactcaccgatatggacttctagctgcaccgggtcactgagggtggagaggtttgtctggcacctgtactctccactgtcgttgactgtggcagcgtcaatgaagtagctcgaggcctggcttgagatgaggttctcattgtgaaaccactgtgtggaattgtcctcaggggagtaggctccctggcacttcagagtcacactgtccttctcaagcacgctgtaccattgaggctccaggaacaccacagcctttgggagatcttctgaggagccaagataatgtggggtgaggacagggagaggagcaggctctacactgccattcccagggagcctcaaagccagaatgagctcattgcaaacccatgcttggtggctcagtcttagagcatcttggccccatttttggcctgttcagtatcttaaggaaagctggccagagaagcacagggccaagttctgctgtgttggaggaactatccctgctaaccccacatcagcattttcccattcaacaagcatttcccaatatcttatggccattgtccccatatgtgccccactgggtcaatccaagaccatgaagctgactcaccagtccgcatgccagctgaaactgcaagaaaaaagagtaaatcaaatattgagtaggggcagagatcagagtgattagaacatagagtgagtttaaaactcccctgccctcctctgccccaggagcccaattttcccaagaatcaggatgtttctggtggaaaccttgctacctgctctctggtctccactgttcatgcctcttgcgccactgtcaacacaaatccctattttcaacactgctcccttaccccttgctccctgtgcaaactcacaaattaagggtacaggttgaatttccctgaaccaagctacagaaagagcctcaacccatatccccacaagaaagggtagaaattaaaaaccatagaggagaaccctggaatgtcaaactgaaagagacagaccctagggaccatctagtcgaagctctttggttccacatagtgattctgggacccagaggggtgaagtgactggcctcactcatgactatgacccaattggaaccagcattctcctcatttctagccccatcttggcttgtcctggtagctcaatccacagctatagatgtggtgaggggtcccatccctttgtgggagtctcattcgtagcctgaaaaggggtgtctgatgaacccaaggcatctcaaacttctccctcaaccagggagatcctgacttacctagaagtagcagagcagttgggaggagcagctgccacatgatgccacactggagtggacaagtcaccaaagatatccggagccctaaagggaccaagccgactagacaggagggagtaaacagcctttccccagtccctccacccatctctgtcacctgccagtttccttttcttgaaacttcatctgatttctcaatctgaagtctcgcaatggagccccaccatagaacaggaataggaaggaaagagcctggaggcaaggtgggtgggtgtgccccctttactctcccaaaggtctgcggctgagcatctgaggacacacacagaatctgccagagtgtgccctcagctttcccaggatgcttgcccccatctcctggatttagatccacccagcaccaagaatgggacagcaagaccctggggatgagattcaaggtgggaggagcattctctgagggcttcctgcatttcacctcagaacttctcactctcctgcctcgtccagacccatctatctccagccgaggccctgcctgcacacagaaagttgtcctttcaaatctttgaccactagcagtgtctctgcctcaatattatctccacgcagaatttctttcaaaattcaaaattcaaaatctatatgctcctgggatatgtaatccacaggagctgactttttagtgtgatttgatcattagatttccaggttagaagaaacccaggtagggtagagaaatgggccctggaagaacaagtcaccagtgaaaggctgaaaagatcacagaaaaggtgggggtggggaggggtgaggacaggaactctttaccttcctcgtgttacccaggtcctgcggatttagctcaggcccctccgggccactggatctgggctggtctgtcagcctaggatccagggctccagggctccagggctccttaccagaaaaggtggaggggggtggccaggaagtgggagggttgttaacctcttctcttctctccagattctcccccgtaaccccatgttggttactctcacaatggtccaggtcccaggcagaaaatcagatgactctgcttgatagtgccactcccccagtggattcgtggacatctgggacaggtctcacttggcttagaaaagcccaggaggcgagcagcaggcccgtgtgggcacctgatacttgttaggggtggagtggaggcaggggctgacacaggtgcccgccaacctttgctataaatgaatgctctttctactccagaatgacctaaaaaccactactcaggttttgttttttatttgtgtgtttcatttggctcctgggtggagttaattgatcctcccattgccatccacgtacccacccctccccctgccacacacagagtcttgcagcagccccttctccacaggcccttggattggacaacagaaatgaacccaggccgccattccagttctccttctcaagtgactcatctacgccttgcaaaatccagacaagtatctggaaacttgaagttccttgctgtagcacttcagatgctcatctgggaaacctaaagcagaaacaaagccttcagggctaaggatggtctctgaggcaaaaagcggatatccctcaattctttcttcttttcagatatccaggtggctttctgccacgtgacttctgatgcaaggccttcactttgttttccttctttgaggtcttattttcttatttgactcctctttggtctgtgactctccaatggagggaggaattcttagctgccaaaagggtgggctagataggaagaagaggagagagcacaggaggagagaaagggactgcaacaggatgggaagctttcagggggttttcattaagtggttgttgaacaattctcgaattgagtgttgttgggtttgtaagggttaattttacagtaatggataaaatgcaaaattttggcctatggtggcttattgtaatcccagcactttggaaggccaatgtgaggtggaagaattgcttgaggccaggaatttgagaccagcctaggcaacatagaaagaccccatctctactaatatagtaataataataatagccagatgtggtggtgcatgcctgtagtcccagttacccaggaggctgaggcaggaggattgcttgagccccggagttagaggctacagtgagttatgttcatggcactgcactctagcctgggcgacagagtgagaccctgactcttgggggggaaaaaaaagagcaaaatttttacaaaagggtagatggtcttgggatatcatatactgaagtgtttatcttcatgtttgcttttctttcttctccttccctttttcttccttcccctcctcttctctccttttctcattggaaggccaggca

SEQ ID NO: 745 - DNA, 4001 bp, Homo sapiens
gagtcacactgtccttctcaagcacgctgtaccattgaggctccaggaacaccacagcctttgggagatcttctgaggagccaagataatgtggggtgaggacagggagaggagcaggctctacactgccattcccagggagcctcaaagccagaatgagctcattgcaaacccatgcttggtggctcagtcttagagcatcttggccccatttttggcctgttcagtatcttaaggaaagctggccagagaagcacagggccaagttctgctgtgttggaggaactatccctgctaaccccacatcagcattttcccattcaacaagcatttcccaatatcttatggccattgtccccatatgtgccccactgggtcaatccaagaccatgaagctgactcaccagtccgcatgccagctgaaactgcaagaaaaaagagtaaatcaaatattgagtaggggcagagatcagagtgattagaacatagagtgagtttaaaactcccctgccctcctctgccccaggagcccaattttcccaagaatcaggatgtttctggtggaaaccttgctacctgctctctggtctccactgttcatgcctcttgcgccactgtcaacacaaatccctattttcaacactgctcccttaccccttgctccctgtgcaaactcacaaattaagggtacaggttgaatttccctgaaccaagctacagaaagagcctcaacccatatccccacaagaaagggtagaaattaaaaaccatagaggagaaccctggaatgtcaaactgaaagagacagaccctagggaccatctagtcgaagctctttggttccacatagtgattctgggacccagaggggtgaagtgactggcctcactcatgactatgacccaattggaaccagcattctcctcatttctagccccatcttggcttgtcctggtagctcaatccacagctatagatgtggtgaggggtcccatccctttgtgggagtctcattcgtagcctgaaaaggggtgtctgatgaacccaaggcatctcaaacttctccctcaaccagggagatcctgacttacctagaagtagcagagcagttgggaggagcagctgccacatgatgccacactggagtggacaagtcaccaaagatatccggagccctaaagggaccaagccgactagacaggagggagtaaacagcctttccccagtccctccacccatctctgtcacctgccagtttccttttcttgaaacttcatctgatttctcaatctgaagtctcgcaatggagccccaccatagaacaggaataggaaggaaagagcctggaggcaaggtgggtgggtgtgccccctttactctcccaaaggtctgcggctgagcatctgaggacacacacagaatctgccagagtgtgccctcagctttcccaggatgcttgcccccatctcctggatttagatccacccagcaccaagaatgggacagcaagaccctggggatgagattcaaggtgggaggagcattctctgagggcttcctgcatttcacctcagaacttctcactctcctgcctcgtccagacccatctatctccagccgaggccctgcctgcacacagaaagttgtcctttcaaatctttgaccactagcagtgtctctgcctcaatattatctccacgcagaatttctttcaaaattcaaaattcaaaatctatatgctcctgggatatgtaatccacaggagctgactttttagtgtgatttgatcattagatttccaggttagaagaaacccaggtagggtagagaaatgggccctggaagaacaagtcaccagtgaaaggctgaaaagatcacagaaaaggtgggggtggggaggggtgaggacaggaactctttaccttcctcgtgttacccaggtcctgcggatttagctcaggcccctccgggccactggatctgggctggtctgtcagcctaggatccagggctccagggctccagggctccttaccagaaaaggtggaggggggtggccaggaagtgggagggttgttaacctcttctcttctctccagattctcccccgtaaccccatgttggttactctcacaatggtccaggtcccaggcagaaaatcagatgactctgcttgatagtgccactcccccagtggattcgtggacatctgggacaggtctcacttggcttagaaaagcccaggaggcgagcagcaggcccgtgtgggcacctgatacttgttaggggtggagtggaggcaggggctgacacaggtgcccgccaacctttgctataaatgaatgctctttctactccagaatgacctaaaaaccactactcaggttttgttttttatttgtgtgtttcatttggctcctgggtggagttaattgatcctcccattgccatccacgtacccacccctccccctgccacacacagagtcttgcagcagccccttctccacaggcccttggattggacaacagaaatgaacccaggccgccattccagttctccttctcaagtgactcatctacgccttgcaaaatccagacaagtatctggaaacttgaagttccttgctgtagcacttcagatgctcatctgggaaacctaaagcagaaacaaagccttcagggctaaggatggtctctgaggcaaaaagcggatatccctcaattctttcttcttttcagatatccaggtggctttctgccacgtgacttctgatgcaaggccttcactttgttttccttctttgaggtcttattttcttatttgactcctctttggtctgtgactctccaatggagggaggaattcttagctgccaaaagggtgggctagataggaagaagaggagagagcacaggaggagagaaagggactgcaacaggatgggaagctttcagggggttttcattaagtggttgttgaacaattctcgaattgagtgttgttgggtttgtaagggttaattttacagtaatggataaaatgcaaaattttggcctatggtggcttattgtaatcccagcactttggaaggccaatgtgaggtggaagaattgcttgaggccaggaatttgagaccagcctaggcaacatagaaagaccccatctctactaatatagtaataataataatagccagatgtggtggtgcatgcctgtagtcccagttacccaggaggctgaggcaggaggattgcttgagccccggagttagaggctacagtgagttatgttcatggcactgcactctagcctgggcgacagagtgagaccctgactcttgggggggaaaaaaaagagcaaaatttttacaaaagggtagatggtcttgggatatcatatactgaagtgtttatcttcatgtttgcttttctttcttctccttccctttttcttccttcccctcctcttctctccttttctcattggaaggccaggcacagcagaagtttctgactatggaattcagtcgattgtcatcctctaggacttacagtttcttagggggagaacatcagataagtatttgaagtgctagagggactgtgacagtatttatgaaatgctgtgtatgcacaaagaagacagtggctaattctatctgagggaggagtgtacatggaagagagaacactttaattagatcgcaaaatattcagcaggaagatttttgagagaaataggcattccaggcaagaggagcagcatgagcaaagacttggagtgaagtagactgtcatgtttgcagagctggctgtagttccacaagtgtagttggatgtagttccacaagtgtagtgagtactacaaaggagaagcacaggttccaaaaggattaagatgtctgggtctcacatgaatctggaggaaatcccaactctgccacttatttaaccttctagccctcagtttccttatctgtaaagtgaggctaacaataa

SEQ ID NO: 746 - DNA, 4001 bp, Homo sapiens
ttgctttgggaggtggcttagggcattacatgtctgagagcgagaaggagattgaggtcctaacaccaaattcattaatttattcaataaaaattattggccaggtgtggtggctcacgcctgtagtcccagcactttggaaagccaagaccggtgaatcacctgaggtcaggagtttgagaccagactgaccaacatggtgaaaccctgtctctactaaaaatacaaaaattagctgggcgtggtggcgggtgcctgtaatctcagctactcgggaggctgaggctggagaatcactacaacccaagggggcagaagttgcagtgagctcagattgccgcattgcactccagcctgggtgagagagtgatactctgtctcaaaaaataaaattaaaaaaaatgaaaataaataaataaataactattattgagcatctatgccatggcctaaccttcacatgacacattcacattgtatgcactccatatggggattcttggaattgtgcaatgcagcagcctatatctactgtctgacaggctttgacattttgcccaagacctacttagagctaggactacaactctgataccattcagtgggaccacacatcatctcatcttagcttttatctctaagaatatcatctctggctcttaccaagtatttcaggaccctttgtttcaccctttattggtgattttcctcttccccttcatcaactcaccgatatggacttctagctgcaccgggtcactgagggtggagaggtttgtctggcacctgtactctccactgtcgttgactgtggcagcgtcaatgaagtagctcgaggcctggcttgagatgaggttctcattgtgaaaccactgtgtggaattgtcctcaggggagtaggctccctggcacttcagagtcacactgtccttctcaagcacgctgtaccattgaggctccaggaacaccacagcctttgggagatcttctgaggagccaagataatgtggggtgaggacagggagaggagcaggctctacactgccattcccagggagcctcaaagccagaatgagctcattgcaaacccatgcttggtggctcagtcttagagcatcttggccccatttttggcctgttcagtatcttaaggaaagctggccagagaagcacagggccaagttctgctgtgttggaggaactatccctgctaaccccacatcagcattttcccattcaacaagcatttcccaatatcttatggccattgtccccatatgtgccccactgggtcaatccaagaccatgaagctgactcaccagtccgcatgccagctgaaactgcaagaaaaaagagtaaatcaaatattgagtaggggcagagatcagagtgattagaacatagagtgagtttaaaactcccctgccctcctctgccccaggagcccaattttcccaagaatcaggatgtttctggtggaaaccttgctacctgctctctggtctccactgttcatgcctcttgcgccactgtcaacacaaatccctattttcaacactgctcccttaccccttgctccctgtgcaaactcacaaattaagggtacaggttgaatttccctgaaccaagctacagaaagagcctcaacccatatccccacaagaaagggtagaaattaaaaaccatagaggagaaccctggaatgtcaaactgaaagagacagaccctagggaccatctagtcgaagctctttggttccacatagtgattctgggacccagaggggtgaagtgactggcctcactcatgactatgacccaattggaaccagcattctcctcatttctagccccatcttggcttgtcctggtagctcaatccacagctatagatgtggtgaggggtcccatccctttgtgggagtctcattcgtagcctgaaaaggggtgtctgatgaacccaaggcatctcaaacttctccctcaaccagggagatcctgacttacctagaagtagcagagcagttgggaggagcagctgccacatgatgccacactggagtggacaagtcaccaaagatatccggagccctaaagggaccaagccgactagacaggagggagtaaacagcctttccccagtccctccacccatctctgtcacctgccagtttccttttcttgaaacttcatctgatttctcaatctgaagtctcgcaatggagccccaccatagaacaggaataggaaggaaagagcctggaggcaaggtgggtgggtgtgccccctttactctcccaaaggtctgcggctgagcatctgaggacacacacagaatctgccagagtgtgccctcagctttcccaggatgcttgcccccatctcctggatttagatccacccagcaccaagaatgggacagcaagaccctggggatgagattcaaggtgggaggagcattctctgagggcttcctgcatttcacctcagaacttctcactctcctgcctcgtccagacccatctatctccagccgaggccctgcctgcacacagaaagttgtcctttcaaatctttgaccactagcagtgtctctgcctcaatattatctccacgcagaatttctttcaaaattcaaaattcaaaatctatatgctcctgggatatgtaatccacaggagctgactttttagtgtgatttgatcattagatttccaggttagaagaaacccaggtagggtagagaaatgggccctggaagaacaagtcaccagtgaaaggctgaaaagatcacagaaaaggtgggggtggggaggggtgaggacaggaactctttaccttcctcgtgttacccaggtcctgcggatttagctcaggcccctccgggccactggatctgggctggtctgtcagcctaggatccagggctccagggctccagggctccttaccagaaaaggtggaggggggtggccaggaagtgggagggttgttaacctcttctcttctctccagattctcccccgtaaccccatgttggttactctcacaatggtccaggtcccaggcagaaaatcagatgactctgcttgatagtgccactcccccagtggattcgtggacatctgggacaggtctcacttggcttagaaaagcccaggaggcgagcagcaggcccgtgtgggcacctgatacttgttaggggtggagtggaggcaggggctgacacaggtgcccgccaacctttgctataaatgaatgctctttctactccagaatgacctaaaaaccactactcaggttttgttttttatttgtgtgtttcatttggctcctgggtggagttaattgatcctcccattgccatccacgtacccacccctccccctgccacacacagagtcttgcagcagccccttctccacaggcccttggattggacaacagaaatgaacccaggccgccattccagttctccttctcaagtgactcatctacgccttgcaaaatccagacaagtatctggaaacttgaagttccttgctgtagcacttcagatgctcatctgggaaacctaaagcagaaacaaagccttcagggctaaggatggtctctgaggcaaaaagcggatatccctcaattctttcttcttttcagatatccaggtggctttctgccacgtgacttctgatgcaaggccttcactttgttttccttctttgaggtcttattttcttatttgactcctctttggtctgtgactctccaatggagggaggaattcttagctgccaaaagggtgggctagataggaagaagaggagagagcacaggaggagagaaagggactgcaacaggatgggaagctttcagggggttttcattaagtggttgttgaacaattctcgaattgagtgttgttgggtttgtaagggttaattttacagtaatggataaaatgcaaaattttggcctatggtggcttattgtaatcccagcac

SEQ ID NO: 747 - DNA, 4001 bp, Homo sapiens
tggagtgcaatggcaagaactcggctcactgcaacctccacctcctgggttcaggcaattctcttgcctcagcctcccaagtagctgggattacaggcgtgagctactgcactcaacttaaggtcttttcaaaaggcacctcctctgtgaagccctcatacttcttcaggtcccattgggggctcactaaacatttgtcagtgaattcctctaggaaatgccttgctctggtgggttctggctcccctaggggccaagggggagaagtgaccagtgggcctggcctgttagcccatttctcagacactcaccagccagccgcccccctcggtgtccatgtcacaaaagactgggagggccctgccctcaggtaggcacagatggtaccagccgctcaaggtggcgccctggctcaacagctcccggcagtttctggggcctgggaaaggggagatggactggggtggtgcccaggttattccctgacccccacccccaggcactggaacaagtgtgggaccctagggaccctcttggctccttcaggtccctgaagaagggttctgaggaggctgtggggaggatcttggccacacttgggggtctgccaacacccaacaccatgtgatcccaagttcctggctcctgcaagggctgcctcaccttcctggcaccggagcaggttcactggatctcctgccccagagaagggatgagtgttggctctgatgtctcagcaccccagcgctgagccaccagtggagccggtacccaggcccttttccgaatccttcccactcctcccagccttccataccctgtaggagggccatcatagggtacccaggcccttctcctaatcctctccactcctcccagccttccaaaccctgtaggagggccttcatagggtacccaggcccttctcctaatcctccccactcctcccagccctccatccccaataggagggccatcatagggtagccaggcccttctcctaatccttcccactcctcccagccatccattcccctgtgagagagccatcataggcacagcagccaagcagagatcccaccctagagtccagggacagaggcaaagaaagcggggaggcctccagccccacttactcacctggctcacccttggggcccatcttgcctggtggtccaggtggccctgaaatcacaaaggcagagatttcctgagtcccaccccatgcccaggaccaaaaagaaacaagagacttggagccagaggttcaaatcccagtttcacccttcactcactttgtgattgcgggcaaatatcttatcctctctgaacctccctttcctcctcagcagaatggggatgaaaccacttacctggcagagttgatcttaggatgccgggtgcccagcctggagctggcacagagtaggttccttgctcctttgtcgtggcccctcagcacagacaaaaattgctactttcctgccttccccattcccaagatcccagcccgctccccagcccctctcaccttgaggacctggggctcccttctccccaggacttcctggagctccgggacaactgggcaggaggacaactttgctggcttccagttccctgggtcctacagggagacacaggcagggtgggcacagggtagactgtctcttccagacccctcttcagttctcttcctgtctcccagattcccactgtcaggatgcttgtctcctgagctggcaaggtttcgtgtgctttgcatccatttgcatatatttacatgcagagcccagattatgaaactcccaccctgctccttgaggttgatgagccttggtggggggacacccagcgagggaatgaggagtgggttggtgaggagggcaccctaggtgcccacctgggcagctggggtgttcctgggtcttcaggcaggcaggccccccaagcaggagaagccacagggagggcaggatccacagtagatccatcttgctgggcccaccaggggaaggatgccagattataagggggccaggctggtgggaggacatgaaacaagacttcctcccattgtcccccagggacaccccacccagactggagccagcagggggtgggagtatttcctccttcagccccagagagaaagggcattatccctgccctatccaaccaggatggagtccaacatctttttgttttttgttttttgtttttttgtttttttgagacggagtttcactcttgttgcccaggctggaatgcaatggcgtgctctcagctcaatgcaaccaatgcaacctctgcctcccgggttcaagtgattctcctgcctcagcctcccaagtagctgggattatgggtgcacgccaccaagcccagctaattttttgtatttttttttttagtatagaaggggtttcaccatgttggccaggctggtctcgaaatcctgaccttaggtgatccacccacctcggcctcccaaagtgctaggattacaggtgtgagccaccgcacactgaaagagtccaacttctgatcctggcttccagggctccccagccatctctccagacctctacattcacagtcgtctctacctgtgaagccccatctgtccatgaaggtctagctctacagccatctccactgggaatccttccctgatccttgtcaatgctatgaatagtgacaactgctaccatttcctgggcatctactgcattccagcgtcatactgacgtcacctccgatcctcacatggacttgctattaatccttattattgcattatgggcctggtacaaaatgggtgctcagtaagaaagagttaaatgaataaggaaagagaaactgaggcccagtgatgggacgtgacttctgttctcttggccacttatatgctgagagcaacagagttttacccaagccccatgcccccgccagggaaaagcaccattaagaaagtgattctggctggctgcggtggctcatgcctgtaatcccgggattttgggagtccgaggcaggcagatcacctgaggtcaggggttcgagaccagcctggctaacacggtgaaaccctgtctctactaaaaatacaaaaattagccgggcttggtggcatgcacctgtaatcccagctactcaggaggctgaggcaagagaatcacttgaaacccgaaggcagaggttgcaatgagccgagatcgcaccactgcactccagcctgggcgaaagagcaaaaactccgtctcaaaaaaaaagaaagtgactccatgctcaaccttgagtcccgtgaggcttaggaaacagctgctaatgtacgccaattgagcgggaagcccatgtaggaaggcctggaggccgggaagccagggaggacgcagcagccagggtccagatgtgaaggatcaggcctgagctggagagggacctcaggtgataagggaggagaggcagggctcattcattcactcattcaggaaaccctccctcaaggcctcctctgcacctccctggtgcttatggagagggctgaggtgcaagtggtatcaggggaagtggaggcagtgtttgcctgacaggatgtgtccgcgagagggatatcctgagaccgcaattccagttctaggaatctgtcttccccagactgtcccacgagtatgccaagatctgcagacaagcctgtttaccatggcgctgtttgtaagcatcagtgtggaaatgacccaaccagtcattgatggcattcacatgaattaggaccattcagacaactcacagggtgaatctgatctaaaatgagaggggcaaaaatgcaaaacagtatgcacagcattatcccactttgtatttttaaaatgctagaggtgtgtatatatgtattttgtaaattcacagaaagaggtctgacacagaccttgtgaactgtggttatttctggagagtaggaccagggaaggagttgttctctcttttttttttttttt

SEQ ID NO: 748 - DNA, 4001 bp, Homo sapiens
tggacatgtatccagaggaaattaaagcagtgtgttaaagagatatctgcactcccacatttattgcagcactattcacgatagccaagacagcatcaatgtagatgttcatcaaaaaattaatggataaagaaaatgcaatatacatacatgatggaatactattcagacataaaaaataatgaaatcctatcatttacaacaacatgggtgagcctgaaggatattatgttaaatgaaatgaggtaggcacaggatgacaagtactgcattatctcactcatgtggaatctgaaaacgttgatctcatagaaggacggtgcagaatcatggttacaagaagcttgggtaatagtggggaaggaggaatgagggaaatgttgctcaagggatatataattacagttagatatggggtgtgtgtccagaatagacaaatatagagagacagaaagtagataatgattgcatgtggccagaaaatagaggggtgaggataggtgaggcgttggaaaaaaaattggggatgcctgctagtgggtatggcgttctttcttgggtgatgaaaacattctgaaattgattgtggtgatagttgcaccactcagtgattgtcataaaaaaccattggattgcataacttaaatggtgaattgtattatatgtgaataatatttcaataaagctgtttttaataaaagatactgtagcatgtttgtatacttatgggaataatttagaatgaagaaacatattgatgatggagcaaactttttgagaaagtaagagggtcatgggcctaatgcacaagtggagagtcttgtcatcaacaagatgaggggcaatatattcgtggtaggggaagagaaggcagtgtatgtgaatgcagaggtgagtaggtcaacagcaacagaaagatgagagagttttcttctgactgcttttattttctcaatgaaatatgaagcaagattacacaatgagagtgaacagagaagtatgaggtgacaggataaggtatgcaatagtgataatggagcaacatggactgtgaacatgtaggataattgcctggcattgctgttggctacctgagatttgggggtcctacacttaaaaggggataagtcatcagggttgtgcatttaaaaaaaaatcccattcagctgtttatgtccaggagtgaagcatgcagaagggcgtgtaaaccaggagagtgctatgggggaagagagatgaaggtgtgctcgagggagtgttgtggtggtgagctgcagaatctgagctgagcaccatgagaagtgagcacatgaagtgtagttactgataatggaaaagtagccctggggtaattgaagtcatgttggaaatagagtgcaggagaaagtgagctagaaacacaacttagtgggggtgggggatgtatgctgaaaacaaaggagtgatgataagttctaaggtttgactgtgggaatggggagtcagagagggataaaaggaaataacgttggtagtaagaagggcaaggaattcagaggcctatttattatacagatttttcttttggcagctgttgaaaacactgagaacaaagacaattattgatggaaaggaagacagacagtgaacacttcctatgagataaaaactgaaatgatagttttcttgaaaactctggctttttgaaatatctacaactttttgcctgactctgagccctccgtggaagtggagatctgagcacccctgagcattacctgacagaaccttagtcctaagaagtccttacagcccttcaggaagcagagcccaagcatgattgcatcccatgccctgctctgagttgcccaactcaccacagatcaacagcaacagcctcggcagcatgaggaccaggtcagggatggtacctagagatgcctctcatcaaaaaaagaatgcacctcagagtcgagcagcagcagctcatcagaggtttgaggaagttgatatcggaagttacccttcagcagaagtagaaggaagaagaaccctctagtgaccagtctccatttccttttctatgaagtctgagaaaattaaagatgctcctttttaaatatagtttgattcagttccacaagctgcagatagtacacatcaatatttgagggactttttcaagaattcaggtatttcaaaggaagttttctaaaggcagtttcctactttgatgagtctcatcaggttatggtcctgctgaaattcatctttgatacatctacaatacttttcacctttgatagggatgtctcctggattgtttctaattggcacattcttcttgctcagcaatatagtcccactatgcaaactttctctagtatagtcatattatgcaaacatgtcattaaatcagggactgatggggctgtcaccccggttatgtgtagtgtctgacccttgctgcatatgatgacttatgtacagggtcaacctattcatacagatatacgctttgatattcaaactttcagtgtaccagtaaatgagcatgaaatcactgaaaaataaaatcacggcaaattacaatctgggggatatttgaaaatgaaatacagaaaagaagtatatgcaaattagcttcagggcacttgagaagggttcaccattagtactaactctggcatttgtaaaattgcccctcttttccctcaaaatcagggcacctataatctctcccattgctacctttagcacattagggataccagttctaggcaagtgaagcctagattagggattggaggagaataagctatcttaattttcaacatttcttaaatccgtgagtgtctaggattaagaataactagaatgtgtggaaagtaacctattaggggaaagatgctgtcaggcaatgatgtctaagtccaggtatccagctcaatgagtatgactgagaaaagaaactattcagtgatacgcaaaaccagagggaaaagggagcaatgttggtaaccaggctaacagcgaaagtgctgaaaacgaataggtattccatagctttatttattggcttaggaaagcctgtgtggggataagcttgtttagtgtaaagtttcaggaccaatgcaaaaaaatctcctgaatgagaatgtagagccctttaaatccagggtgtaaagctgtttttgcatacactctgctgtttcatctctctctttttcttttaatctgttggtttttttaatgttttaattgacacattgtaattgtacatatttatggggcacagtttgacattgcaatataatacatatatatgttgtacagtgatgatcaaatcagggtggttggcatatccattgtctcgtgcagttttcatttctatgtggtgagaacattcaaaagcctctttcctagctattttgtaatatataataccttactagtaaccatagttaccctactgtgcaataaaacaccaaaccttattcctcctatcgaattggcaccttgtacctgttgaccaatctttccctctcttccctcctcattccctcctcagtctctgatagatgctattctatgctatacttccataatatcaacttcttatttttttcagattccacatataagtaagttcatgtggtatttgtctttctgtgtctggcttggttcacttaacatgatgtcctccagcttcatcatgttgtcacaaatgacaggatttcattttgtatggctgaatggtattccgttgtatatatacaccacattttctttatggattcatctgttgttggggtcttaggttgattctcatcacatctcttcctgtgtgtcctgctccagtgccttcacaagatgttcagattaaaatgtgtttcctcctccacagatataaaggctataacattttatttgttaagctctctcacacttttatttttataatgtgatagttcatgcatgcatacaaaaaagtaacatgaatataaattatgaaatactac

SEQ ID NO: 749 - DNA, 4001 bp, Homo sapiens
gagctggccaacactgttttggtaaataaaatgttattggaacacagccatcctcattcgtttacatatggtctatggttgttttcctgctaccacagcaatggcattgagtagttacggcacacacctgaaaagcttagcctatttactctcttgccttttacaggaaaagcttgctgattcctgagctagagctagagaagcaatgaggacacatgtttattctgaccctgcagaagtttgtagttctgacacattcctctataaatagctgttttcagagctgtaaaaacattcagcattcagccagacaataaagaggcattacagtcctatgggcaggaaaacaattctctccaaattgttcttttcttcaatctgcatgttattgcccttcttaaagccaggcttttaaggaagaggcaagcatgtggggtcttgagaaggctaggtggtacctggtcacccagacatgcaagtggtgttggaaacaggctgcgtgacctcagaacatgtcagcctagagggcagtaatattaggacatcttcacaggctttccagagccacctctatagaatcctggggtagtggggtgactgatatgccagagaccaagaacaacaaagacaaggaggactcacctgcctgttcagtgactgcatctgtgaggagatcaaaagccagagattagcacacagcatttgccctcataatttataaatttatattactctggtaaattgctcaaaaacttctttccattttccctttcttttctatttccctaatctcttattactaacaattcaatctccctcgagcacacatctaactgtcattcattgtagtcaaaaggcaagttgcaaacccaatgcttgactaaagggattgtcgagaatacccatgttggatatttagtgactctccttgatttcattttccttccaccatccccaccactctatctcacactctgacttttcaagtggtagatagacatgacaacacgatcacaaagggctcatcaggaaacatacattgtgagagttccaagaaatcaacaaatcagtctctttcctatggccatatttcacgttagagccctttgtattccaataacaaatatttatttagtgcctacacagcatagagaaagggatcttatttactctctcacccaggctggagtacaatggtgcgatcttggctcaccacaacctccacctcccgggttcaagcaattctcctgcctcagcttcccgagtagctggaattacaggtgcccaccaccacgcctggctaatttttgtatttttagtagagatgaggtttcaccatgttggccggggtggtctcgaactctgacctcaagtgatccaccagccttggactcccaaagtgctaggattacaggtatgagccactgcactcacccaggaatcttattttctagcagcagctgtcatctccctcattgtccacgattaaacagaggaatattagcaaagggtctcaatgcatctgctgaacccaaatcttatagataacaattgaataatcggtgttcatggaggagaagggcattgctaaatgctaatattatgaacattttactatgagaacattatattactcaatgagatctaagatatcaaaatagcaattcatgaccagcaaatggaaaagtggtccaccttgaacattaagcattgtgcttaatgcttaatggatgtgctgcaaattcactgtcctcagcctacttctttgcatctgcctttgaagcccaagctgcaggcaggacctgagcatccccaccagtccctgggctccaataaaacctccaaccttttgggagcagtagacctcattcagctgccacctcacttctcagtcaaattattgaactcaccaaagatgaccagcaatgaccacagcagcatgaggacctaatccagctatttgaaaagagatgtactcttggtcaccaactggagactctgagcaggcgatgaaatgtggttttcagaataggttttgtataattagcaaaaaaggaagtagaatagtgccactatgtttaaccattatctttgtcctggaagggctaaaacaattatagctgatcctctcaatgccagagaaattttgtaacttgaccctcattatgatacctagcatttacatatgggttgcaatgagtcagacacagttctaagtgcctcatgcttacagagttatttattaccttcagcaagtttctgaattggcactatcccctttcacatgaataaggaaattgaggcactagtaaaggtaagtgtcttagtccattggggctgctataaagaataccttagactgagaaatttataaacaacataaatttatcactcatagttcaagaggctgggaagtttaagatcaaggcaccagtagattcagtgtctgatgagggcctgtttctcatagatggtgtcctctatgtgtcttcacatgatggaaggagcaaacaagctccctcaagcctcttttacaaggagactaatccttttcataagagttccacactcatgacccctaaaaggtcatgtaataaaaggtgggtaccttttattactattgcattgaggattaagtatcaacataagaattttgccaggacacaaacattcagatgatagcagccagtaaaatgaccaagatcagcttaatcaatttctagtagtaacagatctgggattcaaacccaggcagcccagtgtcacagtctggctcttaaacattgtgccctattatcttgatatattgcttctcaaggttcataaaataataaggccattgtttcaatagctcatatttcttaagtaaaatttttcgtagtcattcgatgactttctagaatgagattttactaaacttcaaaacacttgcactatattgctgaaaacattgccatctttctaatctgtaatcacaacattgcctatttctaatctgcattgctttttgtaccccaggctgatcctaatacagttatctcacacaaagcaaagcgcgtgttatgtgaacacctattatcatgctcactttgattagatgtagtcccagtagatgttgtctcatcagtgaaccttatgcaggatgaaactctaaaccaaaaaatcacaggtgcttataaatgagggactgactgaaaatattcatagactcaatgttacctgttcaggtacttaacatttacctgaatacttaacattgaatttttaacaattggatacttaacattttattctcactattatcatagttttactttgagaaaggctaatatttatatgtgatggtcattaaagccttgcttataataatgtaaaaagaaaatactaaaaatatatcacaaggagagatgtgtgttaaaaataagttatgtgtcaaatgctgtggaaaaccaaacagccattaaaataattctgtggaataatatttaatagcaagataagatgtctaggatatatgattaagaaaaaagtgggctgggtgcggtggctcacgcctgtaatctcagcactttgggaggctgaggcgggcggatcacgaggtcaggagatcaagaccatcctggctaacacggtgaaaccccatctcaactaaaaatacaaaaaattagccgggcgtggtggcaggtgcctgtagtcccagctgtttgggaggctgaggcaggagaatggtacaaacccgggaggcagagcttgcagtgagccgagatcgtgccactgcactccagcttgggtgacagagcaagactccgtctcaaaaaaaaaaaagaaaagaaaagaaaagaaaaaagtggctgcagagtgcactttatctgctgcacattatcccctgctctccaataaaaagtgtctgagacaattcgcaccacagagttactgtaattatatccaaaaaatctaattaaagctgatttttattttccttattttgcttatctgtgtat

SEQ ID NO: 750 - DNA, 4001 bp, Homo sapiens
ttcctggcatagcctcagaaaagctcaggagatgtgatttgccattgggcaaaaactgcgaaggcctcagaatgtggctgatcctgaaattctcttgtcctatacatttctgtccagataaaggtgaacctgggatgtatatacctcagaagtagtttctagactccagaaaattacttcctacttgttaacacttaaaatgaataagattttctcacttgtattacttttatatctctcttagctttgaaagtctatggggaaggcaactttactctccatttaagttggacacagtaaacaatggagggatataaagaatttaaatggaggaggatgggttgcctgagaagtcagacttgtgtatggaattgcaactgactgacaggcatggaagtgaggtgtggcagtggcatgagctctttttggagatttataaggattctgctgtagcatcttcctccgtggatgggatctatttctatgtcctttgatagcagcactagcttggacattcagagggagatgtactagagaatatggagatcacatatgagattccttcatcatcagcctcttgcctctgtcctttgctctgcaagtgtttccttcctgtagtctgaggaataccggtaatgtagggagaaaaaaaaaaaaaaacctagagactgaaaaagtcggaggaggctctgttcacccaatatagtagcagatgtgaccccagagcattagcattgctgatgggatgcgtgcctgcaagggttagggcaggctgtgtgggctgaggggaccaatatccagagaccagaggggcagagagaaggagaaacttacctgattgttctcttccaggagctgtgagggagcagaaaatgacaatcagacactctccgaaacattttctaacaacctaaccacaaccacttcttttgtttttccttatcatttctttgctccctttttatatcatccagagcccctaaacaacaaagaaaatgtcatataatgtattttacaaacgtgatggcttatgtccaaggcctgacctcatctctgctattatttacttggccacggcacactttattctctccttctcttctctgagtgcagaggcagacaaggacttacagaaatggtttatcctcctttcgttccttgggctcctattgttcccctcactttttcaatctctgattaaattttggcttaaaacttctagaaaacagtgatgtttctcagtaaaccttccttcacgtgcctaggtttttagaagtaactgctcatctgaaaaattatttagtctgaggcttaagagggagggtgggatatagagttgtggtttggcagaaggaaaaatccaagtttcctatgaggtgagaaaagcagtgggtgagaaaccaaggtcaggatatctggcttgctctgatggttgcatttggagcctcttggttgtccagggaacccagctctgctcacttcccatcccttgctatctgtctctgaaccccaagtagaagcagagatagaagctccttgagtttttccctggtcacctttaggaactgaggccgtggccccattatagcccatctactcactcaggatcagcagcagcagccacagaagcatgggcaccggccgggcagagggttgggaaagtctgtctcaccaaaagcccgacttatctccaagaaggagggcaggaagctgctactcagatgagacctgcaagaatcagaaaagggaagaagagcttagtgtcatattttgctttgggctctgaaaatgtgaatgtggctaccttcctaaatgctgtttgtatctcaatcccggtagtgatacatttttagaagttggggctcatcttccatcagctgcagtctctcaggagtaatgtctccaagactgtgcctgggttctctagaaatatcaagttgtgtatttgctagtattcaaataattctttctgtatttttcatatgggaaaccccttcactaccttgtcttcacacagcctttggttctgcatgcagctcctaatgtaggcaagcttaatgagcgtggtgtgaatcacacagtcaaggtgtcaagcatatgcctttttgactttcacataagttgttatgaggcttctgaacaggaaaataatacaaatgtacagatcaaggacttcccgtaatctcacccagatctgcaaattaggagataaatcagcaagcgtaccaccgtttttaaagccaaagcccttctcagaaagggctttgcaatcaaagaggttccaccccattattttgtttcaggtcctttgtgtttttttcacagtgtttataacaatttgcaattattttctctatttccttgtttgctttcgtgtcttctttcccactaacatttaagggccccttttcttaccccttatatcccccgcacctctaactgttctttcttgaaagcattcctttagtaagtattatttgagggactattgaataaaaactctgaaccagtgtttctcaaccattttttcgttattgctcccctaaggatcttttttagacaattttgtttttagccaccccctttttccatgaaaatttaataccacaaatatactatgtatgtgtttatgtgctgcatgtatagctgtgtttgatacattaaaaaattagtttttttcatcttcccaagagtcaattcttgcccctttgaaggtgatataacttctgttaggaaggcgtgttttagacttagaggtaagccattcttgggaatctacctaccaggataaagttgtcatcattcagatacctttacattagaaatgggagatgatctcagatcaaatgtcccatcctcagggtgcccaaccttggcaggtaatggaaagagggtcctcttttttaacaaatattattatgttctttctcccatggaagtcaccaaattttatcattctctatatgtttatgtgattgtataatgcctatttttctcattagatagtattacaaggtttgggaacaagcctggtttgttcttcattttgtttcaatgcctaacagagcacttgtcacataccaatttgtcaataaggacttgccaaatgaacgaccaacaaacagtaaggaacaggatgacaatagaagaggattggatgtgtttcaatgtgtgcttagtcattcctggttagagatttctccaatattctggagaagatatattggttatatcaatttatttaaattaaattaaattatttatttaaactatacccagttaatccacactacagggtctttgtaaacttgtaattgtagagtatggtgccacatctactgagaggtattctctgacctcccacatttgggctgggtgttcctctcatgtgcatcaataacacttggatttccttcactccagaaccgatcacagtgaactgaaacatcctgtccctttgatggtattcctcaatgatctaagtatctttagggaagggagcggttagggcttattttttatttctctgaggacagcatgctcatcaacaaaaggaaggttcagtgggatatggatagcttcgagattcagtgtgtcatttcagactaattcaaaatatgaataaacctcaaatatacttcatgctcaaaggtgacgatgttgttgatgactctgaagtattgtttcctgtggttggaaagatatgctcagaaaagagtattttgaatttaattgctcatctgtagccaaaaatgttacatttttctacgtctctctctgaagacaggaactatgtcatattcacattattctagcacctagcacagtgcctaacactcagtagaggattgccagataaaatgcaagggtctcatttaaatttgtatttcaaataaaaaacaaataatttttactataattatgttccatacaatacttgggatatgtatgagttcgttttcatgctgctgataaagacgtaacaagactgggcaatttac

SEQ ID NO: 751 - DNA, 4001 bp, Homo sapiens
cgctgtgacacatatcccaggccctgccatgtttagccagcacaatggcagttttggtttaagagagtcacccccaaatagcctggttcttagggtcagagtcaccacacgagctgatgtctctacatccctgcagcactcaggaaaaggatgaaatggacaacagggactcttgtaagtatttgagataaaatatagttattagggtatctagagacataaaggagcaaagaaaataaggacttaccagattgtccacagactggagctgaaagagagtaaagagccagccatcagcgtaggcgaagagtcccgaactattcaccctgagagcccatacactcatatgctacttccaaccaagaggaagagaaacacgttccattccatccatcccagggaagcggggaaacacagtggccagacgctcaggctgtggactcagacagtctggtttgaattttagctgtatgacccagggcaaaccacatgaactttcaagtctcagttttctcatttgaaaaatgaggctcatgaaagcgacctcatagtaatactgtaatgagttagatcagtaaggtttcaattaatggctgctgtcattaattttttagtatggggctgctgctgattcctcttctcttgactcagaacacttattatcatagctaatttggaactcaaaatgagacagacagtagagggtagtagttaaaagcctagtttccaaagttagattatgggttcgaatcctgactctgccactgtactagctgcataaacctcagggacaagaccaacatctttgtgccttcatttcctcatttgtaaatgggagttataaaagttccacctgatcaaatgttagagaattggatacatttatacatggggtgcccttagaaaagtgggatgtagccagggcttagcacaaattaactgacatcctcacacattatcctgtaactatttgtgtaatatttttctcatattgtcgagtcagatgttcttgcatgtgtacgttgaggttctattgagaatgtcacctcttgagggcagaatctgtgtccttcaggtctctgcatcctctgtggtgcccagcagtgtggcatgccaagtatacccatccactcactccttagttcctatcatgtgccaatcacactaataggtcttcccttagttggggtctggggatcaggtgggaactagacaaatacgcttaataaatatttaatgaacaaaagactgactgttctttaattccctagtttgagcaactaggaaatccgtgcctcatttggacaaacactgacaagtggtacaaaagcaggaagaaaaaaatcaaagggaaatcatcttatctcttctcttctcatgctctttgcaaacatcagaacaggtttgaacttagaatacagagaaggaaataactattctcagcaggtgatcctttctacctgagttcacaatcaggactttatccttcacaaataactcagtccatcttttcctctgggtcctcatgctctgtgacgtagggactgaacctagccataggtttctttttgcataaacaaaataagtccatttgggggtaaaatgattttccataggcaattcatagcaaaaatagatgagaaatacatctttggaaatcaattattatcattttccccttctaccagtaaatcattatctttcctttttgttcattttctgctgttctaaaatgggagtaaaaatccatgattgcagcagcagaaaagagggcttttgctcatggtgaggctcagctttgcagcaagcaaaggtctcctccccatcacttaccaaaggccagcaaggacgcccacagcagcatggaagcctgctccaggattggagaaggagttctgaggagacaagccaggtcagcccagattgccaaagcagcacttgcctacaccagcaccagcagtgagctcagtaagcttcttctctgcataaagctgattgagataatgaagtgaaagggggaagtagaggaatctttctgaaaacaccaaacagcaatgtggaccagtgtgagagaatccagaccacaaaaatcaaaatttaatagaattaagtactgctgtgacatcctggggtgaatcacttctcaaggctaaagctactctagtttcagaactctctaggctctgtctttcaaggaaatcacaacctattctctctgctactagagatgaggtgagattgcaggcctattgaaatccacataatctaaggatgtccctgaatatccccagagatgaagaatttctcattcaacacagaaaaggcctcctctgaccgctgatacctctactggaacacctccagcaggccgtctgtagacctgatgaaacatctcaatcacaagacaactctcaccttgtctgatatatatgaaaatatcctgactcatcagtccagggggaaaccacaacttttgatctgagtagaaggcaagctgaggagtaaattatagccccatcatgctcttcctagataataggccataacatttttacttaatgtcctagaatccaaaatttgctacaggaatgtcttggcaaatatatattgattgaaatacatatgcctggtatctggtggcagagagaagaagttgtgatttccttgaaagacaagaggctagagagttctgaaaatatgatggctttagccttgagaagcgattcacgtcaggaagtcagagtgggtatttaaataattctattaaattttgatttttgccatttggattctttcacactgggcaacatgctgtttggtgttttgagaaacacctaatgctctccctacccataacaaacctgcacactctgctcatgtatcccagaacttaaaaaaaaaattaagaaaaaaatggaaaaatccgtagtgacgttttttggtacgtataatattttggtatgtataactctttaaaacttttttatgctattatcttgtgtatatgtatgtgtatatatatatatatatatatatatatatatatatatatatataaaatgttaatggcaaaaaaaaagaaacaccatggtgcttcaggtatggtgccaggtgctggaagtacagtgttaatcaagacttggaaagctttcattctggtggagaagacagcaagtcaacaggaaattacatagaagtgaattgtatgtaatttctgagagtccactaagagggaaatctgacccagttctggggatgcataagaggcttccctgaggaagtaacatccaagctgaaagaatatcattctaggactgagagatgagcatgcactaagatggaaggcagttatcgtgaccatcaccatcacatcaagatatctgtgaatagataatagacataggatggattaagagtggtctgtatttttctaatataatgtttttctatatatctgtaataatttattttctaactagggtttgtattgaacatcaactatattttagacaatgtccatggccttagaagaataaaaaggtgaataaagtgcatctctcttaaagactttaaaaaagtcaatgtggtaagggccagagtagacatagacacaaggaaccataaagacatagagctgtcaaggcggcacatgggtcctttgtctccttgccgtgtgaccgtgctgtcatctttcagctgccttcatttgtcccaggaggagcaagggtataaaatggcagtcaagaacctgatctgcagaatcccacacatctggatgaaatcttgacttcacctcttgctagttgggtgactctggtcaagtacttagcctctttcacactggtaaaaaggagataaaaataatgtccagctgaagtggatgttgttattgatgtttgtatgaatacattaatgacatagaactctcagcttagtccctatgctgagaactattctgtaatactagaagtaacaagtataatgaactaaaaagcacttta

SEQ ID NO: 752 - DNA, 4001 bp, Homo sapiens
caagagatggtaatgtgtaatttttgtcagagtatttatccaaattatcttcattatctgcttgtttattttcccttctctataatgcaagctctatgagacctaggactttccttatgttcaccatatatcctccaggacctataacggtgaatggcatataaaagatattcctttaatgttcactaaatatatttgtgttgtataatgaattaattaaagaactaggttaataatataggaatagaaggatagagatttgagaaatgggtaatgaagagagagaggacacaaaactggcaggtttatcaattgagtaggtattctgcatatgggttgatttatttattcaacagatttttggaatgccaatcatactccagagcaaggcaatagaaatccaggagtgtgtgagagacaaatcatccctgtccacatgaggctattggagacttatccaaacttaagtgttttactgagaacaacaaattattcaccattcacctgaatattttggcttccttcatctttgcattgttttaaatgaagctaatatttttgtgagtggtttctatatggtctgcatttacgtaggttatttcatataaccatgtcaataatcctgtgaggtaagcactaggattaactgcattttgtagaccaggaatctggtagccagtaggtggcaagatgaagtttgaacctagatcctgtttgaccccagagcccatgttataaactttgccctctcatgctcaggacctggccattacccacattgtgtggggccacactgagatgtattcctacttcaggaattatagtccatgcaccttccaactgtgaggtcctcttttcttatatcacgcctgctccatttctgctcctctagctcctactcacctctaagtttcatgaagtctttactagctattttgaatacagtttattatctgcctacagcattcattggtaactttgcctggacaattatttaactgggagcttgttgcatagctgcttgaaagtacattggccttgctgggagcccttctatgtcatgactttccagaacatagacgtagtgtctcctatggactctaattgctcagcacctgtgcatagatattactaaacacatttgctgaacaaataaataaacatatttaattataatatttaacctttagtaaaaatcaaccagttcgcacatatgagttgatagagacttacgtacacccacagggacaaagagaaagtcatatgctttagatttatccttgctttgtccacctacgcctctgcgacctcctccaccccatgttcttaatcagccaattgctgcagtggtttgcaattatgtacaagagaaagacctgtctttcccgttagaaaccttgcctcttatgctggggaccaggatctggccttgtcatacaaggaataaatacatctcctctgcagagaggagagtgggctcttctatgagtaagacaatatgaacaaacaaacatgaaacattctctggactttaagaagtactttttaaagaaaaaaataaatgaaattttaattgttgtggttattgtggtttcctactctgtaagattgaaaattccttccagctgtggccattttcttcagcctcaagagaaagccctgagctacagagtaaagttcaaaaatacagtctcctaatgtaggagagagtctctcagcaggggctgagccccaagaaaggaccaggcctgcggtggagagagaagctgtcccgatcccacccagggcccatggtgagcccttttactcacccaggaccagtaatatcacccacagcagcatgaagacctggaccaccaagggctgagatcaaaagagaagtttcctcaattccaaaacaggtttggacttgatcttacagtcaggacactgcacaccagctccaaggagcacatctgagaagctgtgctctcaaaaagagcagaatgcattagtgaattgaaaaaaggaagtgggagtacccgtcttcagctgctaatcacagtttcctacccgatgatcaaagaaaaaaaaaagttaaggttttaaaaaatcaaatacccttgaccctacatttttgctattgggaaattaccctgaaggaagtatctgaagagagtactataagaacgtttattgtagcattcattattgcctaaacactggaaacaaaacaaaaaaccatgatatggggactgtttaagaatattctgattcatccgtatggtgacaagcaatcattaaagaataaggtaaatctgaacatgccaagaagggaagaccaccttgtttgatgtgaagagaataaaagtgagatatagattggttttgtagtattatcccattgggtaaatataaaaaataggatatatgtgtacatcaactcttttaagtatactttcttcttttcctggaaagtacacacaaaaatattgattatgtttgaggagcaataggtgggaagaacacaatttattttatgtatttctgtaccgtttgattttttaaaaaattaccaggtgaatgtatagctcttatgattttctaaaagtcaagtttccatcctggtatactggtcaacagaggttcctaagacattagctgccacgaggagtgccagtttctttctttcaaatattttctcaccctttctctctgggcccataccttggtcttcctaagggggcatttaattttatatctacaaatgcacatcaccttaggtatattatgtcacatctgacccactgcaccctgaggcaagaaaaccatacaggggttacaggggtgaatagagattaagaggagaacttcaaagggaacacagaatctttacctacttttggtgctaaaacaaatagtgctgctatgaacattcttgtatacatttattggggcatatgcgcacataattctgttgggtatatatctgggagtggaagtcctggctcataaggtatgcatatattcagtttaggaagtattaccaaattattttccaaagtggttgtgccaattcccaccacacccaccaaccaatgtatgagagttatcattgttctaaaattcttgctgatattggtattgtcatctagtaaaatctggccgttctgctagaattatctcaatgtggttttaatttgtatgtctctggtgaatttgagaatgagcattttttcatagtctaattggtgatgtagatatcctttttatgtgcaatctctgttcaaatatttcctcatttttctcttaactttcagtctttcttttcctgttttgtagttattttaaaccctgaatataaaccttttgttggatatatgtattgcaaatgtcttccttcaatctgtggcttgcttctttgctcattgatagtgccttttgatgaacaaccattctaactttgacatagtccagtttatcagtcttctcctttgtggttagagatttttgcatcccttctaagaaagttagtctactccaagatcataaagatactctcccaggttatcttctagaaactttattttttaccatttattttatatttataagagcattgcaattgatttttgtgtacagtttgagtgtttatattcacttttaacttaaatacagataatttatcctgccctatttattgaaagttgattttttccacagtacagtgcaatttcacctttgttataaaacaaaaagccatgtaggtctatttttggaaactcctttcttgtccattagtctattttgtctatcctcatgccaataccacactcttctaattattgtggctttataataactcttattaactgatagtttaagtcataaaatgctgttcttcttcaaaattgttatggctatttttggctttttgaatttttctatacatttaaaaatcaccttgtcaattcctgtcccctctctccccaaaagcctagtagatttttaataactgggat

SEQ ID NO: 753 - DNA, 4001 bp, Homo sapiens
ggatgacttacggtccttagtgctccaagaggggatgcccatgctcgttgacttaccaaagagcagcacagccgtccagagcagcatggggcctgttctggcacagcggagggaacacaggtcagaaacaggtcagggcgaagccggcagagagcaaccaggcctcaggaccgaaggtgggtgggtggcctgagctgggtggtgctatagcttgatagccaaaataggaagtggaaaagaaacttacaaagctctaattgatatttcctctttggttgaagaagtattacatgaataaattttcctgaacactaagtatgaaggagtcggtaaatcactaataaatccctgacattttctgcagcttcaacaagcctatgccagggaactaggatggaacatggttatgggacacctccattagaaaggtccagagactgcccgaatttgcttggcttcagcgtcattcagcctgggagacagcgcagcactgtaaaactaagatcatctaccccttgaccaccgagtgacctcccagcttccaaggagctcctgtctccagaggtaaatgtgtgtggatgctgcaatgcgatggagaagtggagccctgaggatgcttcacaggatcctcagttcaggagggaatcagacatcgatgagtctggagtagaacacagatggagcttcggcatctgaggcttttaagactgtcagtatgattttgagaactattccttaaaagacaccattaagagaaggaacaggcaagctgtggtgtgatgagatagtttaaatacatgtagctgacaaagggcccacagaagaaatataagaatttctgcaagtcagtaagaaaaggacagacaacatactagaaaaatgggcaaaaataattggataggtacttcacagaagcagatatccacgtgtcaaatcaacatagcaaaaggagctagacatcataaatcaccgtggaaatgcaaatttaaaccataataagataccactacaccttccataagaataagggagtgataccagctgagactgagctgggtctgggggagcccgtgaccctccccatgcaatcctctactgagtattggtgaggatgtgaagaaactagaactcttgtacaccactagtgggaatataaattggtacagtcactagaaaatggcttggcagaatctaccaaaactaaacacagggatccctgatggctcagcattttcactcctgggtaaatgtcaaacagaaatgtatacatataagcctgaaaaaacatatacaagagtgctcatagcagcatcatttgtaatagataaaaactggaaattattcaatgttccctcaacagaaaaagaggtcacacattctcatctcctctgtggacagaacatgggagttcacggtgaaacacagagtcaggcaaaatactaggaagcattttcattttcttgtttcttttctttcttttttcttttttttattgagaaggagtcttgctctgttgcccaggctggagtgtaatcttggctcactgcaacctccgcctcccaggttcaagtgattttcctgcctcagcctcccatgtagctgggattacaggcatgcaccaccatgcctggctaagcattttctgacagtaaagttcttcctggaaatctttaagtgagaagttctacatagtctgatggaatttgatgtgcctattgctgaggccaggaatggacagagagaattttctaagttttcttgccctagattgtctgactcagtggaagtgggaaactaatttgacactgccaggcatttttttcggtgactcagttgtttaggaaagagggaaaagtagtgaggaagtaaagtaggaagtagaaatcttgtccactcacctaaagatggcaacattcatatattttcctctatcgttctctttccaacagatctcctgagttgtcttcaacttcgttcagctgcaggtcctgtgggtgtgtggagtccctgcagggcagcagctggggcaggagacagaggggataaccgcaagtggtctagcttgcaaacatttgtggtttgcacacagaacggatgaagcctctgccctggcaacttctaccgggttctagcggcatgagagtgtgaactgcatctgacttttcgcacttcccctgcagagtgagatgctgttgcaccttcaaaggtgttggtgagctgagcctgagctgagctggctgcatgttgttcccttggggatgaaggtgaccctcagggaacagcaacagggctgctgcccaggtttggaatcttccaggactcaggctgaccttgaactgagaatgggatgggttagtggagatattaaaacccatgatactaacactaatactctaagggaattcaggggctaaaaggaggtgggatgaaaatagagtgtggatcctcatccagaagaggctccaggcccaggtgctctcatcactcaaagagtcagttgtcagggcggcagtagtcagggacaatggcctttggggaacaggataagtcattccagttccggaggcgagacgggagagcaagagagcttggggtaggggacagctctgcatggtaggccctagagccaaatatctgagcttgaatcctcactctggatatgaatctggtgagagaccttgggtaagttttttaaccagtctgtgtctcagggtccttatctctaaagtggatacataattacacctgcatcatagggttgctatgaaggttaaacaagattaaaaacataagatgctctcagacagcaagatctaatagaactttcagtgatgatgaaatgttttctgggctatccagttcagtggccacagagagctattaagcacttgaaattgactcatgacacagagaaactgaagttttaattgtttttactttagttgaaatttaaaaaatttaagcagctacatgtgacaagtgtctgccttcttggatattgcaggcttagaccaatgcctagcaagtaggaagtgttcggtgaaggtgagctattgtaagcagtgtgggtcaggaagacttaaagaccagacccttcctcccaaccttagtgtttttggtgagtcccagaaagatgaagtaatttgtacaaaggcactcagccagaaagcctgttggggttggagtctcatccacagctggaactacaggcctaacgagaaacctaagaccatttctgagttacatctgaaagacagaacacattggagaaacatatcaaaagcctagaacttaggacaggagtggaaatgaccaggagtagggtgaaaatggagccagcctgggcatgaagctctgggtctggcctacagagggcagaaaacgctatggagcatctggtcaccaccctcattccctctctccattctaaccccttccttccagaaagcttctggagagagcatggcagcaccaatggaaaaaagcttcatttgtgtcagatctgagcgacctcttgtggccacatgaaccacacttgccctaaggagggaatctttattcatactgaactcttattctctgtgtacccacccatccatccatccaggtatttgtatttctttttagcccttgctgtatgtccagtccacccctgcctccatgagttcaggaattgacgggcctatactggggtatagtcttcgtggttcctaaagcattttcccccgtgtctccattattctatttatcacactgtgttatgtttattttagtgtctctctacacttttagcatatgacctcttcaaaggcatcatctttgcgtctccaggcctagcacctaagtataattgttaggcgttttggagtcagaaaaatataggttatagtcctggctatgcagcttactaggcaaggaacctggggcagtgacttaatctcactaagcttcaggttttaaatttgtaacacagtaataatgacatccaatttctagtattg

SEQ ID NO: 754 - DNA, 4001 bp, Homo sapiens
tctgggaaagatgcaacagaggaaagacacaaaatacttggtgggctaagcttaaaagaagggggagacttattctgagttactttataggacagaaatggaaactagagggatcatggaggcagatttcggctcaacatgaagaactctctcaccactgagctctagcactgtggaacaggctgcagtgccaagctgcagcagtcacattgctgggagggctgtatgggaccccatgacacctcctatggacgctgtgtgagaatgcggggagcagcctccagtggtaggagggaagttggctaatgttcagctcagaagaaaattaagcctaatttcccaaactttaaatacatatttcacattcagccaggtccccacatgctcaatgtcaggattcctttcctcccggagccctgacagccaataatagtaatagccaccaatttattatgaccacaccctgctcttgagagaggaaatagcagctctacacttatggtaagataaatgttgctacacacccagccccagtgtctgtgttttaggctgtttttccagggtccctgagcatcaagtgggaccaaatttgctggtgctggattctccattacactgtgcaccagtcagccggtcactgattcccttcctctcctcatttgctgtctgtcatcctcgtcctgggttccaagctggaacactctcagactgtatctagacaagtccaagggctgttccttttacaaggtagtgccggtagtgccatttgcccctgggagtcttctgcctggagtatatccaggcattaggctatcctgtccccgcctcagtgtgagcattagaccttttcatttgtccaaatggccattcatagaacacacgagtagcatgctatgctggagaaggaacattgagtggaaggggcattttcctcacagggtcaaattctcacaaactctgtccaggaagaggttatatttaggaacagttttgcttttctagttcaaggaatacaaatagcaagcaagctattgggaccaagaattaaacaaaaagtaggtccacttggaaactgtaaagtgaaacaaaatatatgccaaattatttcttttaggtataaggggggtgacactggctgagactgagctgggtctgggggagcccagtgaccctctgcgtgcaatcctctacccttagaccagctctcttagttacaagtagcctgcatgagaagaaatggagagaagagagagagagacatggatcagacaatggagttgattcttcaaaccagccccatggatctgaaacagctcccaacagagagaagatgtaggcggaagagagacagtcaatttgaaaagggctttggttactcagagcacaggcctttcaaccaggtgagaggtctggccattgttacctggttctaagaaaatgctgaggctccataaaaatatgtcaccctgtaaaattccacctcccattgctgagcaaaatgcctgggactgtttcccctcatttccctgactccttccctgttgcccccagcagcctccttccctcctgcaacctccatttccttttgagacagctctgattagtattttaacctgatgtcacaaggtagaaatgtcattgggaagttaggggactttgtaatgtgattttctgcctccctaatttatctctgacatatcaaagggctgcgctgccaaggacccaggactacggggtaggaaacactgaggagtttctcctaccccagtgcccatctctcccaagcatgcccaggtgcacacacctgtcttgagctccagccacaaacccactggaattgggaaaggtaagatgaggaacttggtgtctcagggatgacttacggtccttagtgctccaagaggggatgcccatgctcgttgacttaccaaagagcagcacagccgtccagagcagcatggggcctgttctggcacagcggagggaacacaggtcagaaacaggtcagggcgaagccggcagagagcaaccaggcctcaggaccgaaggtgggtgggtggcctgagctgggtggtgctatagcttgatagccaaaataggaagtggaaaagaaacttacaaagctctaattgatatttcctctttggttgaagaagtattacatgaataaattttcctgaacactaagtatgaaggagtcggtaaatcactaataaatccctgacattttctgcagcttcaacaagcctatgccagggaactaggatggaacatggttatgggacacctccattagaaaggtccagagactgcccgaatttgcttggcttcagcgtcattcagcctgggagacagcgcagcactgtaaaactaagatcatctaccccttgaccaccgagtgacctcccagcttccaaggagctcctgtctccagaggtaaatgtgtgtggatgctgcaatgcgatggagaagtggagccctgaggatgcttcacaggatcctcagttcaggagggaatcagacatcgatgagtctggagtagaacacagatggagcttcggcatctgaggcttttaagactgtcagtatgattttgagaactattccttaaaagacaccattaagagaaggaacaggcaagctgtggtgtgatgagatagtttaaatacatgtagctgacaaagggcccacagaagaaatataagaatttctgcaagtcagtaagaaaaggacagacaacatactagaaaaatgggcaaaaataattggataggtacttcacagaagcagatatccacgtgtcaaatcaacatagcaaaaggagctagacatcataaatcaccgtggaaatgcaaatttaaaccataataagataccactacaccttccataagaataagggagtgataccagctgagactgagctgggtctgggggagcccgtgaccctccccatgcaatcctctactgagtattggtgaggatgtgaagaaactagaactcttgtacaccactagtgggaatataaattggtacagtcactagaaaatggcttggcagaatctaccaaaactaaacacagggatccctgatggctcagcattttcactcctgggtaaatgtcaaacagaaatgtatacatataagcctgaaaaaacatatacaagagtgctcatagcagcatcatttgtaatagataaaaactggaaattattcaatgttccctcaacagaaaaagaggtcacacattctcatctcctctgtggacagaacatgggagttcacggtgaaacacagagtcaggcaaaatactaggaagcattttcattttcttgtttcttttctttcttttttcttttttttattgagaaggagtcttgctctgttgcccaggctggagtgtaatcttggctcactgcaacctccgcctcccaggttcaagtgattttcctgcctcagcctcccatgtagctgggattacaggcatgcaccaccatgcctggctaagcattttctgacagtaaagttcttcctggaaatctttaagtgagaagttctacatagtctgatggaatttgatgtgcctattgctgaggccaggaatggacagagagaattttctaagttttcttgccctagattgtctgactcagtggaagtgggaaactaatttgacactgccaggcatttttttcggtgactcagttgtttaggaaagagggaaaagtagtgaggaagtaaagtaggaagtagaaatcttgtccactcacctaaagatggcaacattcatatattttcctctatcgttctctttccaacagatctcctgagttgtcttcaacttcgttcagctgcaggtcctgtgggtgtgtggagtccctgcagggcagcagctggggcaggagacagaggggataaccgcaagtggtctagcttgcaaacatttgtggtttgcacacagaacggatgaagcctctgccctggcaacttctaccgggttc

SEQ ID NO: 755 - DNA, 4001 bp, Homo sapiens
acaggagtatctgattccaagtctgcagttcttatcacaagacaaaaacaaaaaaacattgtcactacccacaaatagctctcaatttagtggaagacacaggtagatgaaaatattatttcagcataagtaggaaaatattataataagaaaaatgtatcgcaagcagccattggagcagaaagaagcattcaagaaaagctacctggaaaagataccatttaagctgagtctttaggggtacctacacatttgcaaggagaaggagagtagggtgccatggaaagaactcatttcaggtagagatagtggtataagcaaagccttagagacaggcaagagtctggtgtgtgagtatgtaaatatgaactgattgagatttattagagcataagttacaaggctgagagggtaaaagtagaggctgcttggccttttgtgccatgataaagaatttgggctggtaaacttgagttttagaaattactctgtctgcagggtacagaattcatttcaagaacacaaggtttggacgaggagattagttaggaatttactggaatagcccaagtcatagaggatgagggcttgtcctaagacattagtgatgatccaggcaagggactgcttctatgaacaatttagaaggtaaaattggccaaacctaatgattgatcagatttagagaatgaaaaagaaggaagagtctgggttgtttctgaggtttatggccttgtaagggtagatgctggtgtcattagctgagatcagaaagtggaaaatgaattagatgaggcaggggccaaaaggacagataagttcaactctagtcacatggtgcagagacacttgtgagatatgtaggtagatatgtctggtatgaagcttgatatttgaatgtgaagctcaaaagcatggttagggttggggatatgatttgggactcttaaatacagagttatagtggcaaaaattaaacagacaaataagctcatgaaggagattgtgtaaagaaagaggagtacagaggcaaggctataactatagagaacactagtgtttaaggggaagagaagagaagctattaagggatcaagagaagtccatgtagtacaaggagaaaatggtgccatggaagccagggtagtagagaatgcaagaaggagtaagtgatcaacagagcccagtgcagcagagaagtccagcaggatatgaactgaaaagcatgccataacccagtcaatatagagatcgttgtgccctagacaaaaccaattccagtggaagccaggctgcaagcattgaggagcgtgtgagaagtgaggaagtggagatagcaagtgcaaactattcttttaagaaaacttgtctcacaagtgaaagaaaagagttgagattagagctagagaggatatcatgatcagaggggactttcaggatggaagatttttatattcagaaagtaattcaatcctgtacaccaaactttcttatacctacccttcttattccacctgaatactgcttctttggagggccagaattagtccatgtttctttccttctggtcctttctcccaaggtaagcaaagctccattcccacaccaatattcaaatattttacttacccagtagcatctgggccacccagagcacaccaagggaaaggtagagggcccaggccatgaggacacagcccagcttcatggtgactgtgtttaggtctcctgcaaccccaacactgattttcttcaacatgaaacctctcagattagaaaagaggaagtaaatttaactgtctcatctccttgcatctggggtctgttttcattttctagtttgtaattggctttcatcattcagatttggccaacacgctttcagcatcatctgcacccttagggctatgacaaaatggtagcactctcagctgttcaagaatttactcacagagctcaggggcctgtcaaagcatgtcattgtctgatagccagctggccttcatgtacactctgggaaaggtcagtgcaacaaccacccttttcactggtgatgcaactggggacagaaggtgggatgttgtttgaaggccaatagaaaatcactggagaatcaatgatgagaattcaaatgtcctgcccattccaacacttatatgtttctagtgactagaaggtagcgagacagagaaggaagattagtcacggcaccaagttagatatcagattagtctctagtaggctctgactatccaaagcccacacaaatttgcatgcaaatttctctagactcgtgtcagctctctatttctggagcatgactaagtctgctcagtctcagtggaaatatgagtacaaggcagggagaatccactgggaaagagtagaggaaaaagaaaatctattcccagaggatccagcagtcagctcagggcttaggctcatagccaaagctcaggccactgatcctgaggaaattagagataggaggcatccgatatcttgagaaacctgaggagactcaggaataggagcaatatagaggctacagcctctcccttccgttccagatggcctcctgggaaccattgtccctgcctctgaatgtttgctatttgtttgaggcctacttaatggtagggcccatgtgtcttttcacagtggccacattcctcccctttctgtcatcataacacccaccaggcctccagtaggttatttggagatgaaatgagccatcagaaatggggtaaggtaggccaggcactgtggctcatgcctctgtaatcccagcactttgggaggccagggtgggcggatcactggactggaggtcaggagttcaagaccagcctggccagtatggtgaaaccccatctctactgaaaaaaaaaaaaaaaaattagatgggcatggtggtgcatggctgtagtcccagttacttcagaggctgaggcatgagtatcatttgaacccaggaggcagaagttgcagtgagccaagattgcaccactgcactctagtgtgggtgacagagcgagactccatctcacaaaaaaaaaaaaaaagagagagagagaaatgggggaaggtagtttggtcctccttgaaggcagagagagggacagtatgacccttcaactgtgcaaaaaccacaggtcagagcagacatatcaaccacacgggcataagagagtggatctttctgagtctaaaataagcatttagaataaaatttccattatcgagaggcatacgcttctgtgcaggtggccccagggagtccaggggtggttgaatatgggtgctggggaaggcagtgaggcagtaagccttgcagctgatgtgatgtgaagcctcagaagaggaagaaaagcctagctagccttaataatttttttttttttttgagatggagtctctgttgcccaggcttgagtgcagtagcgcgatctcggctcactgcaacctctgcctccagggttcaagccattctcctgcctcagcctcccgagtagctgagactacaggagcgtgccatcacgcccggctaattttttgaatttttagtagagatggggtttcaccctgttagccaggatggtcttgatcttctgacctcgtgatctgcccacctcggcctcccaaagtgctggattacaggtgtacgaattaaacaaataaaatgtgtttagatgcatcgccactcctaaaactacataaaacatagaccctcagggttaggcagaggctaaggggcttctaaacaaatcatgatatctttctcttcttatgtcaccctttctcctttactgtccttaccatagcatcttacctggatagagaccctcccctataccatctgcagcaatccttgcaggaccccactgtcaatatggaaggcaaggggccttctgaagatttggggtgaagctatcaagttctttacactgaaatttccattaagctgctgggaaaatttactcgcttgaagcttaatc

SEQ ID NO: 756 - DNA, 4001 bp, Homo sapiens
acctcaatgctcttcttgtgagagggcagaagtaggtggcccaaataccagagagtgctgatgggctggagctccaggagcagtgggtggtatccatcacacttcaaagttacccgctcccctttgaagatggtggtccaaggtggatgtagagacaatatgggcttctccagagtagctggggtggggagtggggtgagagggggcagcatgcaaagagaatcaaggtgaggtgcccaaagaaacgacctgagtttgggaaatcttaggaaaccccagctcgcaggccccagcccatgtactaacccatccctgcaggagaggagatcacattcattgggttacagactaccagtccatcagccagcacccatttctaaatgccttcaagcaaatttagtcccaggggttgacgagagtgggaagagacactatcccagcgcagccaagaagtgaggagtctacttgaaaaggtcacttagggggttggagtggaagctgtagaaaattgggatgagaaatttataagactcaccagcttgcccactgcttggaactgcagaacaggaaagaaggaagaggaaggagaaggagaatattggcgatgagaggagagagactcttgacgacaagaaaggctgaatggtcccaaaacctgtttttcttcttctgcccctggtttcccaagctctgagaaagccccttcttcttcacccctccaaaaaaagataatgaaccacttggaaactgaggattggatacccaccctcctctccccataccttggtccaccctattctccaccacccaaagctcttctgctgcctcactgtggactcacccaggagcagaagggctgtcagtggccacatgatggatctgactgcagcagctgcagaaggatggagatgcactggcatgagatggggaacagagagaaagaatgtggccagtggatgccactgagtactaggagacattgctgcttctcccacccactcctagttcctgaagatagcagaccagaaccagtgggagacaggctgaatatcaggtatcccaagtgccaggcactgtctcatctaccgcatctacagccacctcacagctcaggccagccctgactactgaaaggaaggcctgcagaacttgtgccctccacagcacaagagagccccatagaaccccaggctccagcagatgaccccgccatcttcaggctcccattgacatcccactcccatcccatcccttctccaccttccagccagccctgcaaggctcagctgaggaagacacggcctcatgtccttaaggacctttttcctgctcactcctgatgacagacattggcatgagacctagagaggtcagtgttcggttgcctgcccccagagctcacatcctgccacaatgagtagacgaaaaggcatgactcaccaaccacccttcacatccctatcatctagttccccagtcaaggatagaaatgcaatgtgtttcttcttcctcccttcctgaaatcttgagttctcataaattcttaaattcttaagaagttagaaaactcttctttcctacccatcccaatgagctcatcctgtggcacttccaatcacttgttcttttcttccttcctcccacccttccctgcaacccctccccagccacgccccagttccagaactcctgacctgcagcagagaagtcactgcatcggcccctcagaagcctctcagatctgacctcggggctctacttcttgtgctttctgagccatgtgaccgtacctgagcaatgaggagaacctgaattttcatgtaaatacttaatgaattttccagcctgatagtgtgtctccttggactctatcctgtccttacctgtggttgtttagaaccggggcaccttgatcccttggaaatctgatgggaaggagatcaattatcaggtactgtcaactcccaggaagatagtatcttcccctcttgctgatgcctgaagttccactctgagagtcccctcatattttgcttaatggactagccccttttaaaaatgcaaatgcctcttaggaaaatgtgactggtcatttaaattatgctggtcacttcagatcatgttttgagtgcaggttttgataaaagagatagagtcctgtagatttcaaacaaagtagggacatatttgacaatgtgcccaagagtaggggaggcagagaagaactaattactgggaacagggatgatcacctgcctgctttaggagtgcctgggctgaccagcactcttgtgcttcccctccatcctaataattcctcgtctcagggccagtgtgtggcttcccacatgatccacagcctgccacagaggtctgacttctgcaccaagccaccacctcaatggtaagaatgcaatgcagttgtcagctgtcctcttaggcaacacaagctggctctattttggcttctcatcccccagagcacagatctcagcccctttactcgattcagaagaaaccttagtacaccaaaactttgtgaactgtatagtcgtccctagaaacctctggaaccatccatactgttcatattatacagtgctcagaatttgacttgaaaaatttcccacgaaatatttatttattctaggctctcctctaagtttttcccaaagtgagtctttttactccatctaggacttttccccagaatttctaattcttcactcctttacaatgcagaaaaatttagaaattatcatttgtaacttgagcaattatttgaggcctatcacaacataacatctggacaatatatgtcaccatttgataagcattctggtgataaagtgttctcagtgataattacagtaatgaactaatgctgttgttgctgatgacagctcactttagtgtctcggcatgtggcaggcactatgctaagtgcttcacagatattactgcacttaattcttgtaaggccctttgaggaagaattattaatatcccaattttgcatatgaggaaactgagatgatgaaactgggatttgaatagaagtctgtctccaaaatctgttctcttatctctctgattgtcagggattcaagatgctgctcatggccggctgtcattattggtctttgcaagttccccctcttattgtcttaccttgttgactttcacccacattattgtcctcctcccctccacataagcacccactgtaaaatgtttactgtgtgttcccatatacatgctatttttttttgtgctttaagttctagggtacatgtgcacaacgtgcaggtttgttacatatgtatacatgtgccatgttggtgtgctgcacccattaactcgtcatttacattaggtataacatgcagtttttagctttgagaaatatttagtgttgttaatttacataagtggcattgtgttctagatattatattcacttctacttttaaaaattaatcccagatgtttcaaatttgttcagattgctctacatgcatcatgtttattgcttttgactgccctaatattctttttttttgagacgcagttttgctcttattacccagtctggcatgcaatggcatgatatcagctcactgcaacctccacctcctgggttcaagcagttctcctgcctcagcctcctgagtagctgggattacaggcgtgcatcaccacgcctggctaattttgtgtttttagcagagatggggtttcaccatgttggccaggctggtcttggactcctgacctcaggtgatccacccacctcagcctcccaaagtgctgggattacaggcatgagccactgcgcccagccatgactgccctaatattctatgcttctgctacactgcacttgtccattcccctaacatcctagttgctgcccaccctcagctaccacagacaattccacaatggacttcttggtacatattgtgagggctggatgaattaacatatgtaaagggctt

SEQ ID NO: 757 - DNA, 4001 bp, Homo sapiens
caagaaaccacagagtatgaatatgaagtgtgtgtaagtgctaatctgaacattgagtgatgtgctttaaattctgaatacaaattgtggctaggagtgcacgatctcagctcactgcaacttccgcctcccaggttcaaacaattctcatgcctcagcctcctgagtagctgggactacaggcacccgctatcatgcccagctatttttttttttttttttttttttagtagagagtgtttcaccatgttggccaggctggtcttgaactcctgacctcaggtgatctgcccgccttggcctcccaaagtgctgggatcacaggcttgagccaccgtgcccagcaatcctgtactttattgaacaaattattgttatttttcttatcctgttttaaaacccttcaagcatctcgagaatcagtttctcagctgactcctgtgtacacatatacacgtctgcaataaaactttgagtaagtgctcagttcaattgctgctttttttctttagcaaatcataattcacttttaatcctcagagcagccgaagagatacatactattattgtcccttctttacagatgtggacactgaggcacagagaagcatcacactgttcaactgagagtagatccttgatctatgctcagactgccagggaaactcacctttcctgtttggtgaatttcctttactgctccctccccaaccccctaaagttctctgtccagcactccaggtccttggagcctttgctcttctgagctggtctcagaaacaaacagaaatgttcacactgtgcctcacactatggcaggagggtaaggggaccttgggggctaggcatgccttactgcatctctcgcatagtgccgtgcaggtccctacctgctccagagacttaagataggccccagtgtggcccttgtttcctgcaccttgggattggcccagtgttccctcccaccagaggactagtattgccagaggagacacgtgctccccctcccctcgtgctcagtccactcaccattggatacagagaggtggatggggtcactgacgggtgctccccgtgtctggcatcgatacacccctggtgtctgcacctcaatgctcttcttgtgagagggcagaagtaggtggcccaaataccagagagtgctgatgggctggagctccaggagcagtgggtggtatccatcacacttcaaagttacccgctcccctttgaagatggtggtccaaggtggatgtagagacaatatgggcttctccagagtagctggggtggggagtggggtgagagggggcagcatgcaaagagaatcaaggtgaggtgcccaaagaaacgacctgagtttgggaaatcttaggaaaccccagctcgcaggccccagcccatgtactaacccatccctgcaggagaggagatcacattcattgggttacagactaccagtccatcagccagcacccatttctaaatgccttcaagcaaatttagtcccaggggttgacgagagtgggaagagacactatcccagcgcagccaagaagtgaggagtctacttgaaaaggtcacttagggggttggagtggaagctgtagaaaattgggatgagaaatttataagactcaccagcttgcccactgcttggaactgcagaacaggaaagaaggaagaggaaggagaaggagaatattggcgatgagaggagagagactcttgacgacaagaaaggctgaatggtcccaaaacctgtttttcttcttctgcccctggtttcccaagctctgagaaagccccttcttcttcacccctccaaaaaaagataatgaaccacttggaaactgaggattggatacccaccctcctctccccataccttggtccaccctattctccaccacccaaagctcttctgctgcctcactgtggactcacccaggagcagaagggctgtcagtggccacatgatggatctgactgcagcagctgcagaaggatggagatgcactggcatgagatggggaacagagagaaagaatgtggccagtggatgccactgagtactaggagacattgctgcttctcccacccactcctagttcctgaagatagcagaccagaaccagtgggagacaggctgaatatcaggtatcccaagtgccaggcactgtctcatctaccgcatctacagccacctcacagctcaggccagccctgactactgaaaggaaggcctgcagaacttgtgccctccacagcacaagagagccccatagaaccccaggctccagcagatgaccccgccatcttcaggctcccattgacatcccactcccatcccatcccttctccaccttccagccagccctgcaaggctcagctgaggaagacacggcctcatgtccttaaggacctttttcctgctcactcctgatgacagacattggcatgagacctagagaggtcagtgttcggttgcctgcccccagagctcacatcctgccacaatgagtagacgaaaaggcatgactcaccaaccacccttcacatccctatcatctagttccccagtcaaggatagaaatgcaatgtgtttcttcttcctcccttcctgaaatcttgagttctcataaattcttaaattcttaagaagttagaaaactcttctttcctacccatcccaatgagctcatcctgtggcacttccaatcacttgttcttttcttccttcctcccacccttccctgcaacccctccccagccacgccccagttccagaactcctgacctgcagcagagaagtcactgcatcggcccctcagaagcctctcagatctgacctcggggctctacttcttgtgctttctgagccatgtgaccgtacctgagcaatgaggagaacctgaattttcatgtaaatacttaatgaattttccagcctgatagtgtgtctccttggactctatcctgtccttacctgtggttgtttagaaccggggcaccttgatcccttggaaatctgatgggaaggagatcaattatcaggtactgtcaactcccaggaagatagtatcttcccctcttgctgatgcctgaagttccactctgagagtcccctcatattttgcttaatggactagccccttttaaaaatgcaaatgcctcttaggaaaatgtgactggtcatttaaattatgctggtcacttcagatcatgttttgagtgcaggttttgataaaagagatagagtcctgtagatttcaaacaaagtagggacatatttgacaatgtgcccaagagtaggggaggcagagaagaactaattactgggaacagggatgatcacctgcctgctttaggagtgcctgggctgaccagcactcttgtgcttcccctccatcctaataattcctcgtctcagggccagtgtgtggcttcccacatgatccacagcctgccacagaggtctgacttctgcaccaagccaccacctcaatggtaagaatgcaatgcagttgtcagctgtcctcttaggcaacacaagctggctctattttggcttctcatcccccagagcacagatctcagcccctttactcgattcagaagaaaccttagtacaccaaaactttgtgaactgtatagtcgtccctagaaacctctggaaccatccatactgttcatattatacagtgctcagaatttgacttgaaaaatttcccacgaaatatttatttattctaggctctcctctaagtttttcccaaagtgagtctttttactccatctaggacttttccccagaatttctaattcttcactcctttacaatgcagaaaaatttagaaattatcatttgtaacttgagcaattatttgaggcctatcacaacataacatctggacaatatatgtcaccatttgataagcattctggtgataaagtgttctcagtgataattacagtaatgaactaatgctgttgtt

SEQ ID NO: 758 - DNA, 4001 bp, Homo sapiens
cagcaatagttcatgttctagaataggggtttctaatgatacaataacttcactcaggccccagggagataggacaatatcagactgccttcttccccggtctctgccaacctaacagcttctgatttcaggacacaaaatctaagacttgccaggttcaaggcctccacccccaaagcaaagcagtttggatgacccaccttccatcagagccaaaagtccggttgatggactgagtaagtatacttgcccaggccccaacctctccagagcagactcgagtccctcaggtaaaagctttctcggccaggcgcggtggctcacacctgtaatcccagcactttgggaggccgaggtgggtggatcacctgaggtcaggagttcgagaccagcctggtcaacacagtgaaaccccgtctctattaaaaatacaaaagtttgctggatgtggtggcacgcacctgtaatcccagctactcagaaggctgaggcaggagaatcacttgaacccaggaggtggaggttgcagcaagccgagatcacaccatcgcactccagcccaggtgacagagcaaggctctgtctcaaaaaaaaaaaaaaagctttctctcacatctgtcaaaagtcccccataagccacaggtgaatgccacacaggtacagagcaactgaaccaaagccttactcccccaagtcatgaatccctcacctccttgagccgggcaatagcatctcctatctctgggtgccccatctcatcctcagtcagcaccctaacgatctgggagaagtgctgaacgaaatcctgcttttcttgggcataaacatctgaattctggtctccgttcattctgagggaggagcaaagggctctaagtagaagaaaaacaagtcagaaacctgatcagctgctcccctccccaaggcccctcaccccaaccacactcaccgaggttcctctgtccacgcttggcaccagcagcgggcactgtgccaggccaggactgggtacccgtgcaccagggagggccgccgtagggaacccagccacctctcccggggtgcccagtagggggctggcagcaggaagacccccacagatctcaaccagcgggacaggggcatcctgggagtggcatagggagggggcactaagcactccctgcaggggcaagcaccaaaggcagaggcatggtggcagctccccagataactcccaccccagccttagcccagagtgcccctccctcttgtggaatgtgcttggggacaattacaggaaggatacgcagggaacaaaaaagtatggctgggtgactgagacccaactaatcaccacttacaataaacaggctagaactcagtgccttcaagatggcgtgcacaaggctgggtaaggaggcggtacagagtaaagtaccccaggattaggggctgaaaggacccttaagtcatcctattttacacaagccaaactgaggctctaggaggtaggaagatagtagaggcagagccaaatctagaacccaggtctcccctgggcagtggagaggggtgcccagggtctgagttacgccccaaggaggaaagaagcattggagcgagaacccatgggtgctgcatccatatggtccggggtgcttgaaccgcgcgtcccaagccccacaggaatcgctaggactgagcagataggctcggagcaactctggacgggagagaagggctcgcagcaaaggagtaaaccggggtccgggcatattggggattccaggaaagcacaagggcagagttgggaagtctccacacccctagaaggccagccagtctagcccaccgaccttcaaaacggacacaacaggctggccttccgatgcctcacagtatcgttacagaagtaaggcccggtctcggcccccttcctccaaggcccagcacacatcctctctcacctgttcccagatacggattcctgctcggtcccgcttgttggcgggtactcctaaaagcagaatccgctccgcgatcggctctgtgggtcgagtagttcccgctctccccacactaagggcggaaatatataattagactacaactcccaatgtgcccgcgggagggacagataacgcgatcctgcgtgtcctggctgggcgaagatgagccgcgctgattggctgctggccgtcgtgtgagcatggcgcactgtggcactgtgacggacgaccaatggaagggctgaagtctagaggtcgcggctggaggcgtcagtgccggaagcgagccaggctgggaacgtccccgctgtggctttggctgcctgtcttactcaagttttcattatcttcctgggcagctgattggcacgttagtaaaacgcagcaggactagctttctcacttattagttctctaactttaggcaaatcatttaacgtctctgatcctcagtgaacttgcttgaaactagctttcctcatctgttgaatgagggtggtaataccatgaggtaatgtgtgcaaagtgctttaagggcttaagaaagatgagtcttgggccgggcacggtggctcacgcctgtaatcccagcactttgggaggccgaggcgggtggatcatgaggtcaggagttcgagaccagcctgaccaatgtggtgaaaccccgtctctactaaaaatacaaaaaaaaaaaattagtcgggcgtggtggcgcgcgcctgtaatcccagccactcaggagggctgaggcgggagaatcgcttgaactcgtaaggcagaggttgcagtgagctgagatccagcgaaccactgcactctagctggggagacagagcaagactccgtctcaaaaaaaaaaaaaaaaaaagatgagtctcacacttgtaattccagcactttgggcggatcacctgcggtcaggaatctgagaccagcctggtcaacatggcaaaaccccttctctactaaaaatacaaaaattacccaggtgtgctggtccgcgccttaattccagctacgtgggaggctgcaacctcgcttcccgggttcaagtgattctcctggattacaggtgcctgccagcatgcccagctaatttttgtgtttttagtagagagggggtttctccagattggccagcctggtctcgaactcctgacctcaagtgatccagccacctcgacctctgaaagtgctgggattacaagtacgagccacttggcccaggcagttatttattgattataagctaaacaagggttggattattcatgcctctgctttgtagaccatatacagttaactccctgatgtcgacacagcatgtggtaggagtatagcgttgaagaccaccagaggtcactcttgttgccatcttggttttggtaggttttggccagtttctttactgcaatctgttttatcagcaaggtctttatgacctgtatcttgagccaatctcctatctcatcctgtgacttagaatgcctaaaccaactggaaatgcagtccagtaggtctcagccttattctacccagtccctattcaagatggagttgctctggttcacgcacctctgacaattatgctaagtgaaataagccagactcaaaaggacagatactgtatgattccgtgtatataaggtactgtcaccggtggagggtgtccaggttcttggcatcttgaacaaagaattggacaaaacacggctgggtgcagtggctcacgcctgtaatcccagagctttgggaggccaaggtgggcggatcacgaggtcaggagttcaagaccagcctggccaacatagtgaaaccccatctctactaaaaaatccaaaattagcccagcatggtggcgcacacctgtagtgccagctactcgagaagctgaggcaggagaatcgcttgaacccgggaggcagaggttgtggtgaaccgagatcgctccgggaggaatgaaacaggaggaatgaacaactccagatgcgcggccttaacagctgtaac

SEQ ID NO: 759 - DNA, 4001 bp, Homo sapiens
ccacccccaaagcaaagcagtttggatgacccaccttccatcagagccaaaagtccggttgatggactgagtaagtatacttgcccaggccccaacctctccagagcagactcgagtccctcaggtaaaagctttctcggccaggcgcggtggctcacacctgtaatcccagcactttgggaggccgaggtgggtggatcacctgaggtcaggagttcgagaccagcctggtcaacacagtgaaaccccgtctctattaaaaatacaaaagtttgctggatgtggtggcacgcacctgtaatcccagctactcagaaggctgaggcaggagaatcacttgaacccaggaggtggaggttgcagcaagccgagatcacaccatcgcactccagcccaggtgacagagcaaggctctgtctcaaaaaaaaaaaaaaagctttctctcacatctgtcaaaagtcccccataagccacaggtgaatgccacacaggtacagagcaactgaaccaaagccttactcccccaagtcatgaatccctcacctccttgagccgggcaatagcatctcctatctctgggtgccccatctcatcctcagtcagcaccctaacgatctgggagaagtgctgaacgaaatcctgcttttcttgggcataaacatctgaattctggtctccgttcattctgagggaggagcaaagggctctaagtagaagaaaaacaagtcagaaacctgatcagctgctcccctccccaaggcccctcaccccaaccacactcaccgaggttcctctgtccacgcttggcaccagcagcgggcactgtgccaggccaggactgggtacccgtgcaccagggagggccgccgtagggaacccagccacctctcccggggtgcccagtagggggctggcagcaggaagacccccacagatctcaaccagcgggacaggggcatcctgggagtggcatagggagggggcactaagcactccctgcaggggcaagcaccaaaggcagaggcatggtggcagctccccagataactcccaccccagccttagcccagagtgcccctccctcttgtggaatgtgcttggggacaattacaggaaggatacgcagggaacaaaaaagtatggctgggtgactgagacccaactaatcaccacttacaataaacaggctagaactcagtgccttcaagatggcgtgcacaaggctgggtaaggaggcggtacagagtaaagtaccccaggattaggggctgaaaggacccttaagtcatcctattttacacaagccaaactgaggctctaggaggtaggaagatagtagaggcagagccaaatctagaacccaggtctcccctgggcagtggagaggggtgcccagggtctgagttacgccccaaggaggaaagaagcattggagcgagaacccatgggtgctgcatccatatggtccggggtgcttgaaccgcgcgtcccaagccccacaggaatcgctaggactgagcagataggctcggagcaactctggacgggagagaagggctcgcagcaaaggagtaaaccggggtccgggcatattggggattccaggaaagcacaagggcagagttgggaagtctccacacccctagaaggccagccagtctagcccaccgaccttcaaaacggacacaacaggctggccttccgatgcctcacagtatcgttacagaagtaaggcccggtctcggcccccttcctccaaggcccagcacacatcctctctcacctgttcccagatacggattcctgctcggtcccgcttgttggcgggtactcctaaaagcagaatccgctccgcgatcggctctgtgggtcgagtagttcccgctctccccacactaagggcggaaatatataattagactacaactcccaatgtgcccgcgggagggacagataacgcgatcctgcgtgtcctggctgggcgaagatgagccgcgctgattggctgctggccgtcgtgtgagcatggcgcactgtggcactgtgacggacgaccaatggaagggctgaagtctagaggtcgcggctggaggcgtcagtgccggaagcgagccaggctgggaacgtccccgctgtggctttggctgcctgtcttactcaagttttcattatcttcctgggcagctgattggcacgttagtaaaacgcagcaggactagctttctcacttattagttctctaactttaggcaaatcatttaacgtctctgatcctcagtgaacttgcttgaaactagctttcctcatctgttgaatgagggtggtaataccatgaggtaatgtgtgcaaagtgctttaagggcttaagaaagatgagtcttgggccgggcacggtggctcacgcctgtaatcccagcactttgggaggccgaggcgggtggatcatgaggtcaggagttcgagaccagcctgaccaatgtggtgaaaccccgtctctactaaaaatacaaaaaaaaaaaattagtcgggcgtggtggcgcgcgcctgtaatcccagccactcaggagggctgaggcgggagaatcgcttgaactcgtaaggcagaggttgcagtgagctgagatccagcgaaccactgcactctagctggggagacagagcaagactccgtctcaaaaaaaaaaaaaaaaaaagatgagtctcacacttgtaattccagcactttgggcggatcacctgcggtcaggaatctgagaccagcctggtcaacatggcaaaaccccttctctactaaaaatacaaaaattacccaggtgtgctggtccgcgccttaattccagctacgtgggaggctgcaacctcgcttcccgggttcaagtgattctcctggattacaggtgcctgccagcatgcccagctaatttttgtgtttttagtagagagggggtttctccagattggccagcctggtctcgaactcctgacctcaagtgatccagccacctcgacctctgaaagtgctgggattacaagtacgagccacttggcccaggcagttatttattgattataagctaaacaagggttggattattcatgcctctgctttgtagaccatatacagttaactccctgatgtcgacacagcatgtggtaggagtatagcgttgaagaccaccagaggtcactcttgttgccatcttggttttggtaggttttggccagtttctttactgcaatctgttttatcagcaaggtctttatgacctgtatcttgagccaatctcctatctcatcctgtgacttagaatgcctaaaccaactggaaatgcagtccagtaggtctcagccttattctacccagtccctattcaagatggagttgctctggttcacgcacctctgacaattatgctaagtgaaataagccagactcaaaaggacagatactgtatgattccgtgtatataaggtactgtcaccggtggagggtgtccaggttcttggcatcttgaacaaagaattggacaaaacacggctgggtgcagtggctcacgcctgtaatcccagagctttgggaggccaaggtgggcggatcacgaggtcaggagttcaagaccagcctggccaacatagtgaaaccccatctctactaaaaaatccaaaattagcccagcatggtggcgcacacctgtagtgccagctactcgagaagctgaggcaggagaatcgcttgaacccgggaggcagaggttgtggtgaaccgagatcgctccgggaggaatgaaacaggaggaatgaacaactccagatgcgcggccttaacagctgtaacactcaccgcgaaggtctgcagcttcactcatgagccagcaagaccacgaacccaccagaaggaaaaaactccgaacacatctgaacatcagaaggaacaaactccggacacaccacctttaagaactgtaacactcactgcgagggtccgcggcttcattcttgaa

SEQ ID NO: 760 - DNA, 4001 bp, Homo sapiens
aaaggatataagcagacacttctcaaaagaagaccatttacgcagccaacaaatatattttaaaaagctcaacatcactgatcattagagaaatgcaaatcaaaaccaaaacgagatactatctcatgccagtcagaatggcgattattaaaaagtcaagaaacaatagatgctggcaaggctatgtagaaacaggaatgcttttacactgttagtgggaatgcaaattagttcaaccattgtggaagagtagaaggcagtatggcgattcctcaaggatctagaaccagaaataccacttgacccagcaatcccattactgggtatatacccaaaggaatataaatcactctactgtaaagacacatgcacacatatgtttattgcagcactgtttacaatagcaaagtcatagaaccaacccaaatacttatcaatgatagactggataaagaaaatgtggtacatatataccatagaatactacacagccataaaaaggaatgagatcatgtccttcacagggatatgaatgaagctggaagccaacaacctcagcaaactaacacaggaacagaaaaccaaacaccgcatgttctcactcataagtgggagctgaacaatgagatcacatggacacagggaagggaacaacacacactagggcctgttgtggggtggggggacgaggggagggaacttagaggaccagtcaataggtgcagtaaatcaccatggcacacgtatacctatgtaacaaacctgcaggttctacacatgtatcctggaacttacagtaaaatattgaaaaaaaagaatctttaaaaaaaaaaaaaatttcaggtttgttatcagccagagctgaactctttctaccatccctgaaatgacttggctttccacactaaccaagctgcctgtgtcctgggcacacagagaatgaagtttcaaatctgttaatcctgtgaagccttttcagatgatcattagaaatgccttctccatgatccagttaatacagactacctgatgtcacgataaatcctactgtgggaaacattagatattaactgaaaatgctctgctccctaccttccttgtatgagcacaatgtattgtaatgtagtaataaggggaattactgggttgtgaaggaggagaggattattaatatataaaatagtcaaatatctcttaaaataaaaagaccctaaaaaactttcttcctctgcagagttctagcagcattatgagcaagccttctatgtggcttgtggctgaagcaccatgctcctctttggagcagtctccctcccaagcagggggctccatttaaataggaacacacactgaggagagaaggacgatggagaaagggtccacccgacaagtgaatcaacagagtcagtccatcttctacaaacccaacggacaccctgagttctctaaatgcagacatttaaatgtgatagtttcttactcctgtgccaggaccctggagacagaaagggagatagtcgggggacagggggagtcatttcctaattctaaatgcagggttatttcattttaatccctaatatgccaattacaaaactaggcccataatggggaaaagatatgcaaatttaatgatttgttcttacatagactcctccttttgaaatgtgaattcctgacctctctttgagttctgaataatttaaacatatacacagtttctcccctcactgctttcttcttcaagaggttgctgttgatttgctgacataattaactatgaaatgattttctacagaacaagaccttcaaagcaatgctattatcatcagcatattggccgaaatccacagtttttcccagaaagtcactcaaattaaaacaacgaaagaactcaccaaccttactgactgctgtaagatctcggcaaattcaggaggagctgaggacaatatcagataaagcaacaaaatccattctccatgcgatcatgcaaaatttcccccctcagagacaatgccaagtcacagatgggttgaagtctttggcccattcttatgtttaccagtttatgaagcctggtctggtagcttttttttttttttttcctcactctgtcacccatgctggagtgcagtagtgcaatctccactcaccgcagcctctgcctcttgggtttcaagcaattctcttgcctcagactcccaagtagctgggattagaggcacacaccaccacacccagctaatttgtttttgtatttttagtagagacagggttttgccatgttgctcagaatggtctcgaattcctggccttaagtgatctgcccaccttggcctcccaaagtgctgggattacaggcaagagccaccacgcttggccctggtctggtagctttaaggccgaaggtgaaaggactaaagaatgaattatttgaagattaaacattagacttgaccattccacaaacatggctctgtcaaaagtaccacgaaccaaagtacaagcttaaacagcaccaatgcttcttctgcccaaaataaagcccaatatctttatttgacccaaaaggacctctaagctcaggcccctgcctgactttctaaccttagctccctgcctctctccctaacctcaaccttcgtacttcaatgctacaaaactactagaaactattcaaaggaaggcttggtgcttttgttcatactgttccctctacctgtaatgcaaagaatacaaacttatagttcatagaaaaataaatacataggaatctttcaactgacaaatagtgtaggaatataaatcaaaacaacactaagatataattttacacctaacaaacaggaactggaaaattttgataatacccacttggcaaaagtgtgggaaacaggctgtttcatacacttttcatagaaaagtgattctatctttgatagaataatttagtactatctatccatttttaaaatcaagtcttttacccaacagtttaacttctaagaatttatcttctaagaatttatgcactgactcatcaaaaagatacaaaaaaaatccaccacaacctttttttgtaaaggcaagaacatatccacaaacactctagaagcaaattaaatgattattaataggggacttctaaaattgatacatcagtagctgttgaatgagaaaaaaagaaagctgctaattatatattattaactaaaaaagcaagttcttggatgatacagtatgatgccatttgtattattttttaataaagaatagagcaaaagctctattttcttcatgcaatacagtggttctcaaacttttattttctcaaattttaacagggccattcgtggtctctagaagagcagcagcattagtatcaccagggaacttggtagaaattcaaagtcaggcccccttccagctccagtgactcagaaacactggggtggggttcagcagtctgtgctttaaaaaggcctccaggtgattccgatggatgctagagtttgagaaccactgtattgtataaagacctatcataaaagatttcaggaaacacacacaaaacctgcttactgcaatgacatccagcaaaaagaaatatagtggaggtttggaggccatttacctgtccctctctgtgctgtctgaatgttctcaatgagcagctattacagtaataggaaggaagaccttctctgtattgagttgaactgtgcttagtatagctcctaccctctagtcctaatttttatcccaaaggatcatccaaacagccttttttacccttatacatgggctaccctttcaaatgttttaagatgactctcatgacctcctgttgggtcttcttttctccatgctatacattttaagttcctgtaattttcctccatgacatggttttctaaaataaaaagagaagcagcagcattaagaggcactgaccatacttaactagaatgatcttcagtcacccatgtttctacatg

SEQ ID NO: 761 - DNA, 4001 bp, Homo sapiens
tgcactttcccagagactaccacagttctgggcccaaagtatgtggacaagatgagtgaacaaatgaatacatgaagaactgatttggatgatctctgacaccacctgggttgattctatgtccctccattataaaaaggtgggcgggtgagaaggtaagtgatctctgtagcacgttctggtaaaataatcatttcaaatccccctgggggtggaggtagggggttccactctggctaggagattaagggcaagattcattacctcaaattattttaaaaaccagctggtaattgactgtgatttaaactatttaaatcaataagtgaaaggttaggtaaagggaactatttaaactaataagtgaaaggttagggaaagggaaccaaattccaggaaaagccaaggcccacaacaaaaactaacacagcctggaaggcccagcctcctcccagtaaacttattaattttatccagaaagacatggctctccaccctctggggttatgcccttctcccagcacacatgttttgacttccaaatccagccaggcaggctcccaacctccctccccctcaaaattgatctccaggcccagctgaccccctctgatctgttcccccaatcatccttaataacagtgctctgggcctcccactaggaggtcctccaagagccaggccagtggccatcaggtcaagagccaagcatgagggccccattaacaggagactcccagaagaccaagcggcagtcatctggctggaaaatccagcaagcaagttaaaaaggaaaaaaatcaggacatacacgtggtggatcatagaaaaaaaagaggaaaagcaagcaaaaactatacaaagcaaaactctaccatttaaataacagccacaaaataaaagactttcccttctttcattctgatttacaagtcaaaagaataagcacctcacccctcctggtctcatactttaaaatttaacctaaggattaactgcttttcagactttggtcatgtcatgactgactcttcggggaagaaatttgtgttaagacacagaagtgctttagtggaaaacagcccatgatgagggaaattcaccattttgcaccttgtcaattttttttttttttttctgagacgctctgtcccccaggctggagtgcagtggcacgatctcagctcactgcaagctccgcctcctgggttcacgctattctcctgcctcagcctcccgagaagctgggactgcaggcgcccgccaccacgcccggctaattttttgtatttttagtagagacgggggtttcaccgtgttagcctggatggtctcgatctcctgacctcgtgatccacccgccttggcctcccaaagtgctgggattacaggcgtgagccaccgcgcccggccccttgtcaatctttaaataaaaaggaaacggctaaaaatgaaaagatatccctaggcctttctactcaggataactgtaaccaaacagcattatctcatctaaactcagctgtgcctcaaacattatcacaagtgctggaagcgtttaaatctacaagcaacactagcctaaaaatgccttcggtagccagacgtgaattaaaggctcctcaaatgccaggaaaatgtcctacaagggtaaggggaggagagaaagagtactgaatacagataagtgggcactgatcggagaggaagcagcacgggttccagacacctaataggcagccttggggatgcagtcaaggccgacccttcccttcccttcccttaagtggccggacgcctcacccagaagaggacacaggggactcaacaacgtctcgggaacaacggcccggcgggtgtgagactaagcggccaggaggaggaaggggaggaggaggcaggggaggaggaggcaacgactgcgggaaaggggaaggaagggccgggccgggttggagaagcctctttctgggcgtgcgcgctaagagcctgcgcaccagcaaaagcccccagcgcccacgtgggactgagaggagggtcacttacagtacttgtccaatctgaaattacattttagctagacggattctgcacgtagccgcgccgaaccccacggcgcctgagcagggcggtcccggggcggctacagccccgccttgcgcgcgatcccgcccccgccggcgcggcccctgtaaagcgcggcccctgtaaagcgcggcccctgtaaagcgcggcccctgtaaagcgcggcccctgtaaagcgcggcccctgtaaagcgcggcccctgtaaagcgcggcccctgtaaagcgcggcctgattggccctttgaaccgggcgtgggattggccgtcgcctgcccaccccgcggctgcagcgttccctggggcctagccaaccgcgggcagggctgggcaaggcgggaggagcgcggacccaagatcggctacgctgcgtctgctcaggctgcgagttcccggctctggggactcaccttgcggagcttacccaggcggactctccgcagcccctgatgggtgtgtgtgtcagaccgtttactaaacaccaggactgttgtaggcgactgtaagaaataagaatattgcatggttacaattcttgaatgcttaccttgtgtcttgttccttactctacagaaattttctaatcccgtggcgaacccccgtacttcaacgtatgacattctgtaaatctacaaaacagatgggtccctgcctttgagaagtttttacaatttagtgggtactggacacggacctaatttaattctcacatgccttccctttctaataagctgcatgttatgtatccctattctacagatgtggggaatccgaaatttttagcttttactgggacacacagctagcaagcaactaaagcgagaattccaacctgagctccaatccgaactattttcataaaaggcaggatcccaggctgagggagttcgaggtttgggagacagtttagcagtcgctgagtccaaacatgttgttttcctagaaaagaaaactgagatccaggaaagggaagtgattttccaaagacacacctgtgaaaggtaataatttcactgaacggatcttaagtggcaggtgcactaagattgtctgctatcttcacaacaaccccgaagtaaataagtgctcttatcttggtcttacaggtgaggagaacagcccagtgaggctgaggccacacaattaaccccagtctttgcactacaactctaccagggatcctggtttggctcattttctttcttctgcaccatgattgttcaccttttcattaccagcaacatacccaaagacctagctatagactcgttggaatctgttacttagcagctgtgtgaatcaagtgttcaataggaataataagatgtattcatcttaccttttcagaacattatgaagaacaaatgtggtaagacatatgaaaatgctttgtaaagtgttagatgcttaatacacagaagacattgcttccagatctgtttcaacgtaccccaagaatggaataagtggaatatgctggtttcatgcactgtggcaagggggtctcatcttggctagacttgaataagtggatttgttgcctggcctctgtggatggctctttctctgggcttttgtgtatttgattttttatttgctccagcagccgtgttgaaccatgaaaggacctcaggaatgaaacccacacacagcaaagcaacaaagtgaaagaagcgtggattcctaatgcaggaggcactgaaccaatcaatacccactgccctccagacctccacatgaaagaaaaaaactgctgtcctgtgtaagacacttttattttgtgtttctattgtatgaggtcaaacctaataacagatatattacactctaacagatacattacattgtatagtagaattctcagacagcaaccttataaggtgatagatgcagaaacaggcccaaagagtaaaaataa

SEQ ID NO: 762 - DNA, 4001 bp, Homo sapiens
tgcttaagtcaacttgggaagtcagggagggcttcccagaggagaacaggattcaagatttgatggataatcaggagtctgtctgccagataagagcaactgattgggaggccgaggcgggcggatcacgaggtcaggagatcgagaccatcccggctaaaacggtgaaaccccgtctctactaaaaatacaaaaaattagccgggcatagtggcgggcgcctgtagtcccagctacttgggaggctgaggcaggagaatggcgtgaacccgggaggcggagcttgcagtgagccgagatcccgccactgcactccagcctgggcgacagagcgagactccgtctcaaaaaaaaaaaaaaaaaaaaaaaaaaaaagagcaactgagaagagaagggcctgagacagaaatcaggttgttattgcctttcagggcagttggggtgctggagccaagaaaagacctggaaaaaagttaatgttatttttataagctagaaaaatatcagcagcaggagccctggccagaaccacccccacaaagtgcaaacaaagctactcctatcttctgactgtctgctggagaacttactaaccagcaccttaagaacaaaatgttcttttatcattgatttttattcccacaaagcccttcctcctctttttccagaactgggaaaagcatgggttgagttttgcttgcttctttgatctttatcctcccatcccaggcctcccttgggaatgaaagtccaggggtatttctctaaagcagagtgctgacccctcatactagtcagaatgtggggtttcaagcaggccatgccaggtcagcatttgaagtgactacagttgtcagggtttgttggtgagaggcctggatggcctcttcctgggtggcaattccaaatccaaagctgtgtctgtacttgacattcagaaatctcttaacacagggttcatttagccagttcttgaggctattactgacctcaacctatacagaatcacaaagtagtgaatcctgcattctgttgtctctcactctctcactgcataacaggagacaaaagttctgcgaagcaccatatttgtaggcagaaacacaatctaaatccagaacttaaaattccattttgagtgcccttgtcatagcatcacaatatgtctcagggattagctgtcccaaacctatactattaagctacaaacatgcaggcaggggagaacaatgagaattttctttccaaaacgaatggactttgcctgacttgttcactgctaataatctccagtgcctagaccaatcactgacaggttgcattcactcaattatatttagttaatatagagttggacccatggacaaccttttcaagattttcaggcatctgttcacctccacatcctaataggggtataggaaaggtagaaatgaaaggaaacatttgcacccaggcctcctaatttttttgagatatccaactcttggattggctgtaaggtgaagggtaaagaaagaggcataagaaggcataagaaggcataataaggataaaacatagtcaacatatattaagtaagtctgtatcaacccgtcatcatggactatcaccttcctgtgcccttcccagccactgctggcatctaagttcaggccttaaagaatccaagattcttattctatctttccattaaaacaaaaaaaaactattctatctttccactaacaaaaatatgggggaaagttactaacttactgcattagtccatttttatgctgctgataaagacaaacctgagactgggaagaataggatgtttaatttgacttacagttccacacggctgggaggtctcataatcatggtggagggcaaaaggcacttcttacatggtggcagcaagaaagaatgaggaagaagcaaacgcagaaaagcctgataaacccatcagatcttgtgagacttactatcacgagaacagcatgggaaagactggcccttatgattcaattccctccccctaagtccctcccacaacatgtgggaattctgggagatataagttagttgagatttgaatagagacacagccaaatcattatcattccgcccctggcccctcccaatctcaggtcctcacatttcaaaaccaatcatgccctcccaaaagtcccccaaagtctttactcatttcagaattaatccaaaagtccacagtccaaagtctcatctgagacaagtcaagtcccttccacccatgagcctgtaaaataaaaaacaagtcagttacttcctagatacaatgcgggtacaggtattaggtacatacagccattccaggagaaattggccaaaacaaaggagtttcagggcccaggcaagtccaaaatccagcaaggcaatcaaattttaaagctccaaaatgacctcctttgactccaggtctcatatccaagtcacactgatgcaagaggtgggttcccatggtcttgggcagcgctgcctctgtggctttgcagggtacagcctccctcccagctgctttcccaacagtcctccaaagtcttaactcatttcagaattaacccagaagtccacagtccaaagtctcatcagagacaaggcaagtctcttccctctatgagcttgttacccagtaccaaagttgtgtccacattttcaagtatcttttcagcaatgccccactctactggtaccaatttactgtattagtctgtttttatgctgctgataaagacatacccgagacaaggaagaaaaggaggtttaatttgacttacagttccacatggctggggaggtctcataatcatggcgaagagcaaaaggcacttcttacatggtggcagcaagaaagaataaggaagaagcaaaagcggaaacccctgataaacctatcggatctcgtgagacttattcactatcacgagaatagcatgggaaagaccggcctccatgattcaattacctccccctgggtccctcccacaacatgtgggaattctgggagatacaactctgtggagatttgaatggggacacagccaaaccatatcacttacaagcatttgcattttacggggaacaaaaggcttaagccaaagcttctaagggtaaaacttctgccactgaacatctctgtttaggaaaaaggtgagggtcattgacagtctcccctcctggaggacatagtgagtcctgggcagaagtgagaaggtgtgttttggcacgtccctgagggaagtctgggaaactgacaaggaaactgtagtgcctgcggctcttcaagcagcagttctctttctttcagcatatgccggtcccagccaagtgattgtcacccaggtaggggtggatgattgacactgtcaccccagggataatttaaaaagcatgacagagaaagcttttgtggcctcacacatgatctggaatgtcaggattgctaggggacagaaacactccatgtctgcctagacctcaagttctctctgtgcttgtatgtaaaaaccaaaatcttaacattccaatcaaaagcacacattgctcacactgaaaagtatttggagagaaacaaccttgcctgtaatcagaactacgttacatagcattcaaccaacctacatatattatgagttgtttactaattcttaggcactgttttagatcctgaggacagagagatgaacaggacagacatgtccatagattgatgagagcgatcctgctctggaaatccatgtagtatgtagaacaaggcaccatttaataatccgttgcataagaaaacagattaatcttcactctactgtttaaagccatttcaccttattcttgccttaatgtgactattcatttaataaacttaataagcagctataggaaccagacatagggcttggcatgaaggatacaggacagataacataatgttcctgttctcaaggagttcacactctaatggaaatgacatgcag

SEQ ID NO: 763 - DNA, 4001 bp, Homo sapiens
aggctacatcagagacgagatgtcctggaattctggtccctactgttggccctgcaggttgccaactcccaaacctccatcttcccatctgtgaagtgggaacagggtcctgctctcccatcatcaccacagtcggaaggatgccaaggacatcagggcccctgagagtacacacccgaggggcggccaactggatgcagcaccagagagggtgtgagacagattttaactctgctgacctccccagtatgggctctcatcagagccataaactatttagacgccaactgtgtgctggtccctggaggccctgtcagtgagagccgggcagtctggtccccctccatgctttttgttgttgttgttgtttacagacaaaatctcactctctcatccaggagctctcactgcagccttgaactcgtgggctccagcgatcctccggcctcagcctctggagtagctgggactacagcaggtgccaccacttccagccttctggctaactatatttttttgtagagacaggacgggggtctccctgtgctgcccaggctggcctcctctgcatgtttttgagaaggtgaaggggaggctcgctgagtcagggatagcccttaacccttcaggacactcagcaaaaactgctttctgcacctgattctcgtgggggaagagtggacacaaggatcatttctcaccatagttcagatgaggaaagtgaggcccagagaagccctgtaacttgcccacagtcacacagcaattaagggcccagtcttgctaagaacccaggtctctcaaacagcagatcctccaccccaggatccctgaacacagcggcatcgcctcctacctcggtcgggaagcccaccccccacccaccagaccgaggattccaaaagggggcgaaggcggagagcaaagggggctgcgcccacccggagccccgcggcggcccagcgcggcccgccctctcgttgccttggaggcagcccctgcgggcactcgcggtcaaaggcaggatttccgtcggggcggcagcaattcccggatccagcggggagcgcgggccgagaccgccgcgggcgcggagggggcgcccggagaggcctgtccctgccgagggcggggacttccccaggaagcggggacccacgcctcgcgcgcccggcaggagtcccctgcagcccggaacctaccgcaagggcgggccgagagggtcgcggggccgcggtcgcggccgctaacgttaccctgcgggctgtgggcttcaccccgacttcggccggctcggaagaggggaacttcctggacccgcaattgcaccccaggttctccgtcctccagaagtcgttctcctcaacccccttcccgccagctccctctcctgttccctccagcacccccacccatttcccctctcctggacccatcagacccgtcggcttctccccaaagtcccactctcacgatcccttcagtttctcccccagaccgtcctggggattccccttaatccttctcccccacctcagcccccttcctaaactcttatcagtcccctccattttacccactagacctttttgggggtccctttggtcggcttcccccgtgctcccctccgccctctcctccaggtttatcagccttgcttttcaggtcgcccgttttcctccttaggccttttcgggctggggtccctttggctgtcaccttgctcatgtgtcccccgacccccaggttcaggcttctcttcccgtgtacccccagtcctctctccagagcctcgagggggagggcactgcttgacctgcccagtccccacccgacgctgtcgcttacctggagcccaattctgcccggccccggggtgagccagccggggctccagcagccgcgagtgccggcgtgcggggagaactggggtgctgcccgcctctgaccgccgcccctgctgggcagggaggaggaagccgcctcggacttctcttattgcagtcacggccggcgggcggtgatggtggcagggagacagtcacgccctagccccaagccagctccccgcagcgaggaggcgcccccagatcctaggcccacccgcccccaccttcctcctccctggtttacgggaggtcggctctgtcaccctccagacctgagtccccagcccggccttcccaaaagccccctccaaaagcgcagtttcagcacccccgaagcacctgctcttttaggatcattgaattggaggttaagaggggcttttctccatcactgaggaccagatcgggactggccttactcgagttctcacagccagttgacttcagactgctgtcaccagagccactggacatggatcacatggaccctgtcagcacgccttcccttcctcaggggctgagcactggggacacagggctgttaagggtggtgagcagcagaagacccttcccttaggaaactgcctttcagaggagtgggaagggtgtcagcctcccccaggcacccaagttttagaaaaactgagtaactggctgggggcagtggctcagcctgtaatcccagcactttgggaggttgggtgggaggattgcttgagcccaggaattccagaccagcctaggcagcatagggagacaccatctctaccaaaaaaaatttttcttaagttagctcggtgtggtggtgtgcacctgtggtcccagctactgcagaggcagaggtggaaggatccctcgagtcaggcaggtcgaggctgcagtgagctgtgattgagctactgcactctaccttgggtgacagagcaagaccctgccttaaaaaaaaaaaacacaaaaaaagaatgtgggttttgttgcagaaaatgactttttttaaaaaaaagaaagaaaaggccgggtgcagcggctcacgcctgtaatcccagcactttgggaggccgaggcgggtggatcacgatgttaggagatcaagaccgtcctggctaacacagtgaaagcccatctctactaaaaatcaaaaaattagccgggcgtggtggcgggcgcctgtagtctcagctactcaggaggctgaggcaggagaatggtgtgaacccgggaggcggagcttgcagtgagccgagatggcgccactgcactccagcctgggcgacagagcgagactccgtctcaagaaaaaaaaaaaaaaaaaaaaaaaggaagaaaaactgagtatcttagaacatgtggaaaaagatttttaaaaacaaaaagagaaacggtagcatcctctatcagttccagtctctctgtctgatagggatccctgacccctcctcaatctggggttcagtccccactcccaccactgttacttcagccttaaagcaagaacccggaatatccctcctgtccaggagaggaagaggtgtggtggggagggctgtttggtggagaaggatgtgtctgttgggatgtggtgagaggcagggagagtgtgcgtaaacacagaagtgtgtgtgtgtgtgtgtgtgtgtgagagagagagagagagagaaagcaatgacatgatgactttgcttttggaatcaacaactaggccatggtgtgcaggcaagtgtgtttctttgtatgggcaggggcatgtggggatgtgtgtgtgcatgcgtacacatgctcaagtgtggcccaatgtgcctggggtaacagagtggtgggatggagataagaatgcttttctcttaggaaatgggaggagggatgaggaggaagacagaggagccagtggcagtgcagggtctctggaagagtggcttcaccctagccgggcagcatcacctccgccatcaaatgctccctgcctggccatcggcccacatgttcaattagcaaacaagcaaacgtttataattgtgtcttaggtgccagccttagggaacacagagatgagagactggtccctgctcttgggggatccccccaatctatcatgctcgctctgtcatccttcaa

SEQ ID NO: 764 - DNA, 4001 bp, Homo sapiens
tgtgcaggtttgtgtgtatacgagagtgtataaaagtctctgtgtatgtgtttggctgcatgtgtatatgtctgtaagaccgtgtttgtgtgcatgtgtttctgtgtgagtatgtgtgtgcctgtctgtgtgagtgggtgtctctgtgtctgtgtgtctatgaatgtgcacctatctctgtgtgggagcagtgtgcctgtctctggatgtgtgtatctctgcatgtatgtctatatatctgcgcatgtttgtgtgtgagtgtgtgtgaggctgtgtgtctgcacctggagagtcactgcagagggggatcaaggccatttcctgtcgtgggtccagccttcagcctctcaagctgcctcattctggctcccccatccgttacctagcaacagggtccttgtaggaggaggaggctgtgaggagttgtggggttcaggaaggccacccccaccctgtttcctgaccctgaaagccctcagtctaccccactcaccccttaggcccctactcctgggtcagtggggctgcggcatgatccttgggaggggtcagagacctgagggtgagacagaaggacaaggaagatgaagtctctgccaatgtttctgtcagcagctgcccagctcctgccctcttcaggaagccagaaggcctgggctctgccccagcatgacttctgccttcactttccttcctatcacccctggcacacttacacaacccccgtcacatagggcaaaccacccacaccagctctctttcacactcatactcacctgacccaccagcacagtcacacaataacactcacagcatatatttgcatgagtgtgcgtgccaaccccatcacacgccaatacaggctctaacaagcccaagctcacaatagcacacacacatacacatgcacatatacatggggtgcctgccaggttaacagacgaacacactcagacacacatgattttgaacattataatcatctctctaacaggatttctatcaagccatgctcagctccctcacagtccccagtcaccatctcctaaaaaccagttcttccggccaggcgcagtggctcacgcctataatcccagcactttgggagaccgaggtgagtggatcacaaggtcaggagttcgagaccagcctggccaatatggtgaaaccccgtctctactaaaaatacaaaaattagccagacgtggaggtgggcgcctgtagtcccagctacttgggaggccgaggcagcagaatcacttgaacctgggaggtggagcttgcagtgagccgagatcgcaccactgcactccagcccgggtgacagagcaagactccatctcaaaaacaaacaaacaaacaaacaaaaaacagtccttcctctgaaccctgctgtgctcccagccaccctagggttccatgtggtggctgagtgagagtggatacctacctccggagctctcctcctatccccataccagagaaaggaccaggtcagaagctggggctaccagagtaccttgggaagccccacaatgagccaacccttttctggcagcggtatcctctgagcaacagggcaggaggtcattgagcaagggtcccccacaccctgccagaaacattgccattgcaacactcagagaggaaccgactggtgagagggcttggtttcctaagatgtgagaatggagagtttagggtggggccaaccttgtgaaccctgatttgccccagaggggccccaaggtcctagaagaaagggcccccagcttctctctctcgatccccagtccagtcatccttacagatattctcttcctcttctctctgggtcctatcctttctacctagcaccactcacctcttccagaaagtcttcctggatccaccaggtccagttgcctggctgatggttccgtcacatcagtgctttggtctccaccctagccccacctgcccctctcaccctttgctctaagtgatctctcatgtgtgtattgggtgggggtgggggcatcacacccatgtggtgaactgtggggcgggctgtggtgagaagcctgccctaaaatagcccctgttcactgggccctgcctgagacctttgccccgggacccctccctgggatgaaaccactgtgtctaaaacgccccaggatgctacagggctagttagagccagggcagaaaatagaggtggaggactggaagccatccagggcccagcgggagggatttcaggaactggtgaaaagagagatggggctgatacaaaaacaagggtgaggccgggcacagtggttcacacctgctatcccaggactttggtaggccgaggcaggatgattgcttgagcccaggagcttgagaccagcctgagcaacatagggacaccccgtctctataaaaaaaaatctttttttaattagccagtcctgatggcacccacctgtagtcccagctactcgggaggctgaggtgggaggattgcttaagcctgggagttcgaggctgcaggagctgtgattgcaccgctgcactccagcctgggagacagagtaagaccctgtctctattttaaaaagaaaacagaaaaaccaagggtgagaataaagccttctcacaggaagacacacatacacacctcaaatggcgcaccatgctgatacccagatccacacagcccttcagaccccttctcagttggcacattacctcagctgcctcatgcacaggctccaggctcctctgcacagattcctagcacaaacatcttctagtgtacacacaccccatatacacacacctccagccctcatccgtctgcacatagatgtgcatgcacatgaacacacacacacacacacacacacacacacatcctctataaaagaatagcaaatacaaaatttatagcgcttactatatgcgctggccactgcattaagcactttacctatattatctcattttatccacacaaccctatgatttaagtagtattattattattaatttatttattttgagagggagtttcactcttgtcacccaggctggagtgcaatggcatgatctcagctcactgcaacctccgcctcctgggttcaagccattctcttgcctcagcctcctgagtagctgggattacaggcacccaacaccatgccaggctaatttctgtatttttagtagcgatgggttttcactatgttggccaggctggtcttgaattcctgacctcaagtgatccacctgccttggcctcccaaagtgttgggattacaggggtgagccactgcacctggcctaagtattattattactgatgaggcaactgaagcacagagaggtttggaaacctgcccagggttggccagtcacagtggctcatatctgtaatcccagaactttgggaagccaaggcaagaggattgcttgggtccaggaattcgagaccaacctgggcaatatggcaaatcccatctctacaaaaaatacaaaaattggccaggcacggtggcttacgcctgtcactgcactccagcctgagtgacagtgaagctctgtctcaaaaaaaaaaaaaacaaaaaaaaaccaaaaaaactccaaaaattagcttggcatggtggcacgtgcctcgagaggctgaggcaggaggaccactcaagaccaggagatagaggctgcagtgagctatgatcatgccactgtactccagcctgggcagcatagtgaaactctgtctcaaaaaagaaggccacagacatgatgtatcctggtgtttggctccagaatctgagctttcaagcatttctctccattgcctatcacagatacagacagatgcagccattcctgctagcatgcacaaatgcggatgcccccacactgtccccccaccccccatgtagggatacacacacacacacacacacacacacacacacacacacacagatatacacagccctctccggtgacatggacccacatag

SEQ ID NO: 765 - DNA, 4001 bp, Homo sapiens
tttgttttgttttgagacaagatctcactctgttgcccaggctggagtgcagtggcacaatcatagcttgctgcagccttgatctcctgggctcaagtgatcctctggtctcagcctcccaagaactgggactatacaggtgcgtgccagtacccctggctaatttgtttgatttttagtagagacaaggtcttgctatattgctcaggttgggtcctattgctttgatatgttgtgtttctgtgactctttcagtgtgcttgtacatgtgcgtctttgtgtgtctctaagtatgggtgagtttgcctgtgtgggtatgcatgtgtgtgcagctctttgtggatgtctgtctgtgtgtgcaggtttgtgtgtatacgagagtgtataaaagtctctgtgtatgtgtttggctgcatgtgtatatgtctgtaagaccgtgtttgtgtgcatgtgtttctgtgtgagtatgtgtgtgcctgtctgtgtgagtgggtgtctctgtgtctgtgtgtctatgaatgtgcacctatctctgtgtgggagcagtgtgcctgtctctggatgtgtgtatctctgcatgtatgtctatatatctgcgcatgtttgtgtgtgagtgtgtgtgaggctgtgtgtctgcacctggagagtcactgcagagggggatcaaggccatttcctgtcgtgggtccagccttcagcctctcaagctgcctcattctggctcccccatccgttacctagcaacagggtccttgtaggaggaggaggctgtgaggagttgtggggttcaggaaggccacccccaccctgtttcctgaccctgaaagccctcagtctaccccactcaccccttaggcccctactcctgggtcagtggggctgcggcatgatccttgggaggggtcagagacctgagggtgagacagaaggacaaggaagatgaagtctctgccaatgtttctgtcagcagctgcccagctcctgccctcttcaggaagccagaaggcctgggctctgccccagcatgacttctgccttcactttccttcctatcacccctggcacacttacacaacccccgtcacatagggcaaaccacccacaccagctctctttcacactcatactcacctgacccaccagcacagtcacacaataacactcacagcatatatttgcatgagtgtgcgtgccaaccccatcacacgccaatacaggctctaacaagcccaagctcacaatagcacacacacatacacatgcacatatacatggggtgcctgccaggttaacagacgaacacactcagacacacatgattttgaacattataatcatctctctaacaggatttctatcaagccatgctcagctccctcacagtccccagtcaccatctcctaaaaaccagttcttccggccaggcgcagtggctcacgcctataatcccagcactttgggagaccgaggtgagtggatcacaaggtcaggagttcgagaccagcctggccaatatggtgaaaccccgtctctactaaaaatacaaaaattagccagacgtggaggtgggcgcctgtagtcccagctacttgggaggccgaggcagcagaatcacttgaacctgggaggtggagcttgcagtgagccgagatcgcaccactgcactccagcccgggtgacagagcaagactccatctcaaaaacaaacaaacaaacaaacaaaaaacagtccttcctctgaaccctgctgtgctcccagccaccctagggttccatgtggtggctgagtgagagtggatacctacctccggagctctcctcctatccccataccagagaaaggaccaggtcagaagctggggctaccagagtaccttgggaagccccacaatgagccaacccttttctggcagcggtatcctctgagcaacagggcaggaggtcattgagcaagggtcccccacaccctgccagaaacattgccattgcaacactcagagaggaaccgactggtgagagggcttggtttcctaagatgtgagaatggagagtttagggtggggccaaccttgtgaaccctgatttgccccagaggggccccaaggtcctagaagaaagggcccccagcttctctctctcgatccccagtccagtcatccttacagatattctcttcctcttctctctgggtcctatcctttctacctagcaccactcacctcttccagaaagtcttcctggatccaccaggtccagttgcctggctgatggttccgtcacatcagtgctttggtctccaccctagccccacctgcccctctcaccctttgctctaagtgatctctcatgtgtgtattgggtgggggtgggggcatcacacccatgtggtgaactgtggggcgggctgtggtgagaagcctgccctaaaatagcccctgttcactgggccctgcctgagacctttgccccgggacccctccctgggatgaaaccactgtgtctaaaacgccccaggatgctacagggctagttagagccagggcagaaaatagaggtggaggactggaagccatccagggcccagcgggagggatttcaggaactggtgaaaagagagatggggctgatacaaaaacaagggtgaggccgggcacagtggttcacacctgctatcccaggactttggtaggccgaggcaggatgattgcttgagcccaggagcttgagaccagcctgagcaacatagggacaccccgtctctataaaaaaaaatctttttttaattagccagtcctgatggcacccacctgtagtcccagctactcgggaggctgaggtgggaggattgcttaagcctgggagttcgaggctgcaggagctgtgattgcaccgctgcactccagcctgggagacagagtaagaccctgtctctattttaaaaagaaaacagaaaaaccaagggtgagaataaagccttctcacaggaagacacacatacacacctcaaatggcgcaccatgctgatacccagatccacacagcccttcagaccccttctcagttggcacattacctcagctgcctcatgcacaggctccaggctcctctgcacagattcctagcacaaacatcttctagtgtacacacaccccatatacacacacctccagccctcatccgtctgcacatagatgtgcatgcacatgaacacacacacacacacacacacacacacacatcctctataaaagaatagcaaatacaaaatttatagcgcttactatatgcgctggccactgcattaagcactttacctatattatctcattttatccacacaaccctatgatttaagtagtattattattattaatttatttattttgagagggagtttcactcttgtcacccaggctggagtgcaatggcatgatctcagctcactgcaacctccgcctcctgggttcaagccattctcttgcctcagcctcctgagtagctgggattacaggcacccaacaccatgccaggctaatttctgtatttttagtagcgatgggttttcactatgttggccaggctggtcttgaattcctgacctcaagtgatccacctgccttggcctcccaaagtgttgggattacaggggtgagccactgcacctggcctaagtattattattactgatgaggcaactgaagcacagagaggtttggaaacctgcccagggttggccagtcacagtggctcatatctgtaatcccagaactttgggaagccaaggcaagaggattgcttgggtccaggaattcgagaccaacctgggcaatatggcaaatcccatctctacaaaaaatacaaaaattggccaggcacggtggcttacgcctgtcactgcactccagcctgagtgacagtgaagctctgtctcaaaaaaaaaaaaaacaaaaaaaaaccaaaaaaactccaaaaattagcttggcatggtggcacgtgcctcg

SEQ ID NO: 766 - DNA, 4001 bp, Homo sapiens
acattatttacatatataaacactatatatatgccatcatgctaccaagtcagtatcacagttggtctgcctgttaaatattctcattctcaatgcactttttaatgcatttttaataatcaatgatcacactaattattcatgtgtgatttatttgcttatttaactgctttgcttatttaatctccactaaagacaagaataaaacactgcctgtaaaaccctatccccatagggactgtcttatttacagggcctggtaagtggaaggcactcaataaacagtatctttctattgaatgaatttgtatgtgttcttttaaataaaaggtaccttagggcatcaagggttatgtgaaattctcaacattagcaacaggaagaacttttaacaaaaccaacagagattttggacctgagaatggttagagggcaaaaagtaccagaactagaaaaaacaaaaactacctccatctgattttagctaacattacaattctaagagcaaagtagtgctgctattttttgacatttgcatcaacaggatagattcagaagttctccagtctgcttccctttacaaaacactaaataaacaataaataaatttaaaaatatgtaaaggttttaaaatgccctaaaattattcgagcagggagttcgaggaatacaaaacatctctgattctgtagtatagttgtatatcgtaggtatagtgacccaatcaaattatcttgaagtttagagtccagaaaaagtactggccctttgaaataccctagatggggcacttatttaatgagcactcgctacatggtattttcacatgtgcagttttgctgagtagctgtaagtatttcaactttgcatacggatttgaaatcacatctcttagattgcaaacctcatgctacaccagtgcagaactgtaactcttcaactatcatttctcaaacgtttcctaacaatatacatatgtatttaaagctttttaaaagcctgcattcctaaagatgacactctaaagagcaaaatgacttacgtaagcatgtcataacctgaacttggatctttaagttcttagctggctttctgaataaaaagtaccgattcagctcctagccaatctgctcaaacatgcttcagaacactatgcccgcggtattcggaattgaagagttttacaacaattacgggggaaaccatagtcagcctaacaaactgagcatgcaatttcaaaggaagtaaaatcttcgaagaaccttctaccccacctggagggcctgaaagcagtgcagtgccccttggcgaaacaaaccacagttcagaaaccactagatgcacaggcggccagtgtccggccagcaaggcccagctatggggcaggacggtgcgggagctgcccctctcccagcaccctccgcccacgccggcactgtccttgagggcagcgccccggggctgggggcctgcgcgccagcagcagcgaagttacctcaaaacgccccggcctcggcccgccacggacggctccgaggaggcgccgggagcgggcccagtaggaccctctctgacagcccccgtccctccccaagcgctctcccgggctgcggctccatccctgcgccggaagaggcgtcccgaggccgggaggcccgccacgccggcacgggcgctaagcccagagtctggcgcggcccggacgcccggggaatctctcccgccaagtcgcgggcgcccaggccggcaggcaggagggctgaaggtcactgcggggaggccgggggatggcggcctgcgctcaccattcgagccgcgttcggaggccaaaacgagggcacggccgcgccacccaagccgggagccgaagctaaggctgcggctggagcccgcacgaggggacgcgagcgcgcgaggagccgaagtgctcggtacatggtgctgagggagcttgggtagaatttctgggcggctgtggccacgcctccacgccggttgtcagaaaccgttccgcccaccggcctccgctcttatccaatcaacagcctcacaccgacaggtggggcaggaccaatcgtgaatgaccagtaaagaatgagggggcgggttaactttctagtagtagtgtggggtgtaaggccttcggattcatgggaaactagaaagaagggaattatgggaaaggaggctcaggttattcttggagccggtctgatttttacgtgtggctgttagaaggcgggagtattagttggtgaatcaggtcgtgtttggttggtgaaatatcctagaaagaaatatttattgttttatttatcatgtaatcactcattacacgttcttactactgaaatctttcttcatttcttccagattgtatcttctgtgtagaaattttgggaagtgcagcaaagtgtagataatgaaatagtaattattcataatcccacaactgaaaaataagctacttacttatttcttttaacttatcattttgagatcgctaccgtttcctttctcttcttagcctataccctcagaactctttttttttttttaatgtattgtggaagacgtacacaattatagggaacctcggaatttttattatttgtatatcgttctcccagttttttgcatagctaatttatacattttcaaattaaaggcatattgttttaatataatagttgattacagaaaagcaggaattgatataaaattgcatctgaaccacagttttatcttttctcttttctattgcttggaaccagatgacagtaaagagagagcgatcggatgttcttaaaatcaaaagtccagaacctgcaaagccaaatttatgagtcaaacttacaaacttgccaaaccttttggtaacattatgttattttgtgacttataaatttgacacatatttaaaatataaaaattcaaatgagattgtaatagttgaactacaatcaaaacacactagaaaactgaatgcaaattctttaaaacattgctaataatggaatgacgttttgtttttgttctcctccttcccagcaggtatcattattgtgtatatcattattttgatgcatcctttcagttctgtgtattttttgcttcatacactaatatacaaacaatggttttaatattttactttaaagttttactgttgcataattgaactctatgcttttaagatatagccatgatcttttaaaattaatcatattggatcacatgaatatgaaatattttatttatccagtttcttaataaagaacatttttctttgctattacacaaaattatttaatgaacatatgtttatcatttcttcatagatcatctctttcttcattgtgtggtgcccctctttattgttattgttgcttgtccttttaaactttttttaatattgatatttctctaccaatttcatattggctattatttgcctgctgtatatttctcattttattttattttttgtttcatttttgtttcgagcatgtctcttatttctaccatacagtttaacttttcaaaacccaaattaatagcctttttataaataggttattttaatcccttttaaaaattacctatgacacatattatgttctagaatttttcaaagcactttatatgtattaattcttggaacactcaaaaacaaccctatgagataggtcctattattattcctgtacatagaagagaaaaattgatgcccaggaacatccacatatttatttgtgtgttttacttcgatttattagtgaaactgattttctatctgcagtagtaatatgaagttccatttttaattattcattttatttgaagtaaaatattcagtataatatgaagatgctatataaatgactaaaatttaggaaatattaacttagctaatttatttttattaattcgtaataaaacgtacataaagcctttaataaaggctagatatcttcattttagaatgacttatgttatct

SEQ ID NO: 767 - DNA, 4001 bp, Homo sapiens
ttccacagctggtgccttgcggtagctacctgaccaccccagctaaaggcgtcaccagtcactttgttgtctagctagcatgtgtcactgctgtggctccttccttgagcttatcattctctgtcattttcttgttctttacttagctgtttactgtttccctttcactgagatacgttccaagagagcccaaactgtgttgtttttgttaaactcaattctccatgggtttcctgtgtttgtacccatcttcagagcaaagacactgacagattttgttccagacaatcttccaaggacatctgtagggcaaatatcctgagaggatagggatagtgtccctatccagggcagagtgcagatttatgataaaaatgtcatctctggctgggcacggtggctcatgcctgtaatcctagcactttgggaggcccaggtggacggatcacctgaggtcaggagtttgagaccagcctggccaacatggcgaaaccctgtctctactaaaaacacaaaaaaattagccgggcatggtggcttgcacctgtagtcccagctaatcggaagtctgaggcaggagaatcacttgaaaccgtgcagcagaggttgcagtgagctgagattgtgccactgcactctatctagcttgggagacagagcaagactctgtctcaattaaaaaaaaaaaaaaaaggtcatctccttccagggcaaaggttgggcactggctagcagccccttttaaaagactggagtttcctgagcttggggttccttagctgggaaacagactcgcagtgtgcacagcatccacctgagctgtcctgcatcaccccggggtacttgcagggcaaggggaaccaacgcaaacatgagctcacagtgcctgctgtgctgtgagtaataacatcctttgtctctggtcctggagtctctggtcttctgctagcatcattaagcagtggcaggctaacttagcttgcaagtagtgtaaaaatctcagaccctttgcatttcctcacagtctgttcattactcccctctggcccccagcgctgccatgcctgacacatagtggtgctcagtaaatcatgaatgaatgaaagtacaaaacaatgcttaaaagtaagtcagggtagcctaagaacctctgacagtaactacctttcattttccccttcagtatttatcctagatgacattctggaaaaaaaaaaaaaagtctatttctttagctgaatgggttgggccctatttccccactttaatcttgccctgtgcagtcactttcctacctgaaaacactgtagaaagtgattagatgcgttaaactctgtaaattagttctaagacacagggcaccgaccatgcaaaagagcaaaagagcttcaggcatctgcactccctgcttataggtcacaagtgagatagagaagcaaaatttctgttgaggggttaccagatcttaagtggcctgggagccctagaaattcctcagtgttgtatttgggaagggagaggttaggcaaggggggagtctctctgaccgccgggtgggtgtcgttcgtaagtcaggggcagcagggatgcccctcctaatcccagctgtaacccccaggacttcccagagtggcatggctggtgccaaggagggtctaaggctcccgggggcttcctccgcgggcggggtggggcctgcatctggaaaggaggggctggtgttggggtagctactggggtgctcctggggaccggagcctggatccaggaggatggggccggggagccacccctcctcctgccagggctagtcctcgctgggccgccccttccggtccccggtctcggcccgccaccccttcccgcgccgcactcacctggcgggaggaggaagcccacgctccgacctccgccgagagccctgccagctcgggaggcgtcgggccagctccggggcgaagcctcccggccgcgctcccgcggagtctccagctcgcacccggcaccccgcccgcccggccggcctgtgtacgcgcgttgccatggcaacgccgccaggcgccgcggggtccagcctaatagatgagggcgtggcctgcgcggcagagggggcgtggcaccgtgcagggaacgcccactgggttaccgcctgctgaatgctccaggccccacgagcctgccccatttcacagataggaaagcggaggctcagaggtcacagaaatggcccaaggttttacagcgaggaaggagcagggaggagatttgattcaagaatcctttccattacccctcactgtaagctggatgcgttgagggagggtcgggggcgatagggagaggtaggagattgatggagctgaactcatgagacccttggaggttagtatgccccctgccctacccaaatctctagtcctttccgttacaggccagaaaatagaaagagtaagaagaggggatctctgggagtggggtggggattgggaaagggatggggtggaatgaaaaattttgaaagaatgaggatttcttccatgtgctggggaaaaaatatttccaaactcacaatcctgctgcctctgctcctccctgttaagagtgacatttattcattcttttgccctttctctatctctgcaaacatcttttgagtcctatgagtgtcacacgctgatcccagaatacacctggaacagttactgtccttaagaaaccgcttgtcagccggcacaggactcgcgggatggagtgtgttgagcagatgtgcaaatcctatctcccgccactatctccagcaggaaatcctatctcctgctgactctacctggagagtgattcctttcactggcaggaaatggctgaccagacacctcaagaaaaactctaaacgtttttctaagagagatgaactatggcacattctaccctagtgatacggtttggctgtgtgtccccacccaaatttcatctcgaattgcactccccacgtgttggaagaggggcctggtgggaggtgattgaatcatgggggcagacttcccgcttgcttttctcatgatagcgagtgagttctcatgagatctgatggtttaaaagtgtggcacttccccctttgctctctctctctcctgctacaccatgttacaacatgctagcttccttgcttccccttggccttccgccataactgtaagtttcctgaggcctccctagcagtgcagaactgtgagtcaattaaacttcttttctttgtaaattattcagtctcaaggaattactttatagcagtgtgagaacagactaatacacctagtcaataggaagaggatctgagagagaaatcatggacatcgatttgtggtggaatatacagtgaagatgctcaaacgtgcctggaggcttttagaaatgcggacttctgggcacagaccccagagattctgatttagcaggcctgggacataatccaggaatgtgcatttgcaacaagcttgacaaaaccctgatttatgcagctgaactgcagagacctctcccggagcctgtccctacaaatctcttccaggccctcagtctggaaggttctgcctggatcagtttcctacaaccagaaagattctaggcgtaaaatgttaggagggaccacaagggctgggacccaagtgatggcttcacaggaacagagagggtcaagctcagcttcccacacgtttctgcctcagagcctttgctcttgcccattcctctgcctggaatgcacttcccctcaagagtctcctttgccttctttactttagctttttactcacatatcatcttttctaaaattggttttttgaaacaatgaaacaaccaccatgaaatctaataaacaacaaaaaagagcaaataaaaacaataagaacagcaaaagcaaataaaaataagaacaacaaaagcaaataaaaataagaacaacaaaagcacatccaaacaaaataaaaacctcaacactctat

SEQ ID NO: 768 - DNA, 4001 bp, Homo sapiens
cggtcagcctgactctagtaagcttaactcttgagatctctcatgcaggtccacggatgtagacacctgcatgctgctttgccactcacaaagtccatgcccaccacaatctcatcagatctcacaaaaggcaggcaggacagagtatcatccccattttacagctgagcacaaggaggccaggaatagagcaggttcatgcccaaggtcccgatcaggacccaggtcccctgcctcccagcccagagctcttccctctccctaaaaatgctgccctggtgatgaagcggatggtgacatgggggtggtcagtttttaagggcaggggaacaggagatgcaccagagcctggctcttctcctcagctgctagccctgtgattggaagacacccagaagcctttccaatgccccatgccaaccattcaatccttctgcccccacccccaacatgcccactgtccaggaggaccctggccaggtcccacagctgtgagtcaggatcagaacagacccctcccccaccttctagaagctgacaggagacttaaggggagaaatccaactccctcaaccctcaccctctgctaccgggcaccaaccccaagctctgctctcccccatgtggcctggaagtcagagaagtttagggaagggggttggggagcaagatcccgcagctgctctggggacatgagaggaacagttcattcaccctgggtcccccagggctgaggcagcccatccaagatttgagttcaaaaataagttggggctgtcttggtggctgtgtgtgtgcgtggggctcttcttgatctcgaacttactgtctcagggcctctgcctcatgggggatcggtaggctcagagtttctgtttccccacagcctcacctcccaatggttcaggcccgggtaagtcaggggctgtcctggaagctgtcagaccacctaggtctctctgcccccacttagtctcagtttctggtgtctgtctctgcttcactcagcatctctgtgtctgggcacacttcagtctctgtctttaggttttggacggctctgtatcttgactggctgtcccccagggggcccatgcctctgtggatctcaagtcttggtctcttcttgtctacatggctgaatgtctcaatccccaccacctccctttctctgtctctgcatccaagtctctttcgccacctctgcacgcctgaatgtctctgtctctagtctctgagcgtctctgcaggcctcagagagcagattcagcatgaggccaatgacgcccaagcctcagggcacctccaaggcccggggaagggccctagggaatgtgttcgctggggtcccacgtatgctttttctgaaaatgctccacaaagcctaggacggcccccatgcctcgggtctgtccaccagtaactctgtacgcccggtgtgtccttgtttcagtggtctcggtagcctcctgtgcctcgagtccctgcctgtctcggtctctcgctccaccgggctttccgagaacctcagtttctccagcgcttctggtcggtcggtctgtctgtctctctccggcttttctatttcaaacttagccccctcccccgcccaactctcgctgccgcccccgcccccgccccgcccgatagcccggaggggtccagtcccggcgggcgctgtcccgggctcggcgtgccccgggcacccgtggccagagcccggcgggtacaggggaccggggccgcggctggcctcagccctccgcgggtcccttcgctccccggcctgggcgcgggggcggaccgccagggctgggagccggggtcggcggggcgctcacctcgaagcgggcggcgggagcggggagcgcgcggcgcaggcggggccgggaaccgggcgccgcgtccctcggcggctcctacctgcgggccgggccaagcgggggccgagcgagctgccggcgaggctgccgactgcagacggaccgtgtgggcgagtgggagcgcggccccaacccctccccgaggaagtgagcgcgggcccgccccgcccggaccccgcccccggccccccagcccgccgcgggggccagaccccgcccccacctccctttcggccgccagtcggcccggccccctcctcccgcccggcctaacctggctctcccaaccttcaagcggccgggaccccgcccctgtcccctccccgcagcctctgttctcctcccctcccaccccccatccccagctgccagagggagactgctgtattccatctcaggccggcgacacgagaccccgcagaccatggtccactgggggagtcctctggcctcctcggatccccccaccccttcaccttaccccaggggtgacactcagcccggccttaatccagcctggaggaggacgttttgactctgctgtcatgagcctgtcagcgggcaccaaggtgttctctgaaaacatgggacgaagagaggacccctccccaccatagggccttgacctccaaagggttttattccacaactttgagtagcaaaaacaggggtaaccacctccccacttccagcagcctcctgacactgagaagtcctgccttgcctgggtttccgcagtgcccaggaatagttttgacctttgaggcccgggggagaccctaatcctcggccccatgatctttgggcttctagggtggggtgtgaggagtgtgagaggatggggcacctcaggggtggtggaggagaggggaggggacctctgcggtgtctgagcctctggcttcctccctgtgtccgtgagggaggactggcgcctgctagggacacgaggcccctccaggtccttaaggccaccccccctgggatcctcaggcttgtcactaggaataaatagcctcagtctggaagaggtgggggagggagggaggcaggaggctctactgtgctgtttgtggaaacaagagacaacaaatcaaccccggaataaccttagcatctagagtgaagattcaggtgcccacagaggcctccccacaccccaggctgggtgtagcagagctctcacggaggaactaacaccctcccaggctggggctcctgagaacctttccgtcccatctctgcatcatgcctgggttcctgggtcccaagtcacccaccaggtctggtttcctttcaaaattaaatcattgcttgcttattattgctgttgttgcctaaatggtaagagccatgaaggcagggctccgttttgttccccactgccttctcagtacttactccaatatccggcacataataaacatctgatgaatgaatggataccagacactgcttcagtatgtatgcccctctaacatcctcggtttggatcacaggcacctgctatctggagtccaggcagtgagcatccagcccatggatggggcctttttctgggattttttttttttttttttttttttttttttttgagatggaggcttgctctgttgcccaggccggagtgcagtggcgcactctccgctcactacaacctccacctcccaggttcaagcgattcttctgcctcagcctcccaagtagctgggactgcaggtgtgcaccaccacgcccggctaaattttttttttgtatttttagtagagacggggtttcaccatcttggccaggctggtctcaaactcctgacctcaagatctgatctgcctgccccagcctcccaaagtgctgggaccacaggcatgagtgaccatgcccagcctctctgggatgtatcttgcaggtgtaagagactcccagcccaggggagtgcagtgaagactactcagccttggtggagtgggtaccaagaggaggtcagctctgggggacgggagggcaaaggtggggagccttcagaaagcaaggggttatgagtgagtacagaaggggcctgataaaaggcagagtattggaatctctgttcttgatgcatggctctaatctctcctaaat

SEQ ID NO: 769 - DNA, 4001 bp, Homo sapiens
tcccaccaatgcactccagcctgggcaacagagtgagactatctaaaaaaaaaaaacaaaaaaaacaaaaaaaacacaaatttacaaagaatattaaaaaagattattattaaaacttgacatttggccaagctcagtggttcatgcctataatcccagcaaggtgtgggaggattgcttgagcccaggagtttgagaccagcctgggcaacatagtgagaccgtttctgaaaaaaaaaaaaaaaaaaaaaaaaaaaaaaaaattagccaggtgtggcggctaacacctgtagtcacagcaactccagatgctgaggcaggaggactgcttgagcctggaagatggaggcttcagtgagctgtgactgtgccactgcactccagcctaggtgacagagcaaaatcttgtctcaaaaacaaaaaaacccgtgtcatctgttatgtcctctagtaagactttcctgatcattcggaggggattcatcccttctagtaccttccttctagctcacttatccactacgctgagtaccttgagtcatttccaaaaaggctgggtaaaactcttttttttttttttttttttgagacggagtttcgctcttgttgcccaggctggagtgcaatggcacgatctcagctcactgcaacctccgcctcccacgttcaagcaattctcctgcctcagcctgccaagtagctgggattacaggcatgcaccaccacgcctggctaattttgtatttttagtagagatggggtttctccatgttgaggctggtctcgaactcctgaactcgtgatccacccgcctcggcctcccaaagtgctgggattacatgcgtgagccaccgcacccggccaaaactcttaaatatacaatacacacacctgtacctcctctactcgaggggcttcctgtcattgttgtgtagctcctctgccctctaccatactgcttggtaaattgcaatgacctttttatttttctttttttcaatcagctctctcaggttgaaaaattgtagggactttgctacaagtttttcagtagagtaattgaaagaatgagggttaattttcctccaatatgctggattcactccaggatcctactgcagcaaagaggctcccaccctgtttcacctccttccatggagggatgtgcagcaggcccttaaggacaggagaacgcagcgccctccccccttttctgtcccagacacaccttaaggatctcatctccaacaatgatgatgccagccgtcacgctgcgccccggagaaagttcagaggccctagatgtcatggtcctgccttctctgcccctctgcaaggccctccagtagccacccagacccccaaataggggtcgcaagcacggggggcctgccaggtctacagggcactgggggccatagcctgggaacagggggtcctgggtcgagggaacctggagaagccagaaaagacaatgggggagagcaggcgtgcgcgtgcttccttcgaggaagaccctagtcttctctaaccagatccttgacaagcgactcctttgttcctgcctctggaataaacgtgttcccaaatcccaacccatgtccttttaaatgtcttgcttagctctagtcttaaaaacttcttctctcttgagaacctaccactttaagtgtcttccgtttgctgagctggtctcctcaagtgtctgctctaccttgggcatccgtacccctttaaatgtctaccttatcctgggccttggcccttttcaatgcattcgctctccaccccggaccaaaatcccgtctctttctacttcaggcttctgcaccctttctagcccagaatcccttcttcccaccaagcttcagattactgagccctcttagactctcacctgcctgttctgccccttcaccggctctttcccttgttcctttcctcatgtcccggggcagcttccgtacttaaagtcccgccttgcacctagctgacattgaatggtgattttggctgtcgcttagactcttccagggtcccattggtgtattcaactgtcgctctcaggctttagccagtggatgggagcagggccggattgttataggcgacaaccacgtggtcacttctcgcccggaaatacgggggccggaccttagcccacggtcgggggcgggacctcgggagtttagggcgggaaaggagccgtagttaaaggtgctgtaaggccctcggggagtttctggtgctggattcaaataattgttatgcatgtgttgctttgttttgttttgtttaatgggtcagttagccatggtttaagctgttttcattcaccgtgactctaacactaggctaagggcttttactggagtgagaaagcatcttatttatagcagaaggaagttggagggacaccgagaaagattattaccactgtctgtcggatatgaagaccctggagtaggtgagcttttgatgtgtggaaccttaatttatctctagtatagtagacaaaacgaattacttaaatctctttgacaagaaagagtccaaaaaccctctcttcctccaccttgctccagatggtgcttagttcaaatgacctttcccagtaattggtcttgtaggtgcaaatgaggcagcgaatagggagtgccttacatgtttactctggatcctcacatcatccgagcttacccccatttcagttgcctttgttctaaaagtacatcttaaacttttttccaacaataatctggggatcttttcatatgcagattgattcagtaggtttgggtggggcctgagatctgcatttagctagttcccatgtgatggtgatcccactgctctatggactacattttgaatggtaagggcccgaattcattctttgtttttttgagacggagtctccctctgtcacccaggctggagtgcagtggcgcgatctcggctcactgcaagctccgcctcccgggttcacgccattctcctgcctcagcctcccgagtagctgggactacaggcgcccgccaccatgcccggcttttttttaaaaatttttttattttcattttttttttagtagagacggggtttcactgtgttagccagcatggtctcgatctcctgacctcgtgatccgcccgcctcggcctcccaaagtgctgtgattacaggcgtgagccaccgcgccgggccgaattcattctttgtaggactggtaaaccacaccttgccaaattttactcttcaaaacccttggtcgggcgcagcactttgggagtctgaggagggaggattgcttgagttctctcaattgaaaaaaagaaaaaaaggccgggcgcggtgactcacgcctgtaatcccagcactttgggaggccgaggcgggcggatcacctgaggtcaggagctggagaccagcctgatcaacatggagaaaccccgtctctactaaaaacacaaaaaattagccgggcgtggtggcgggagcctgtagtcccagctactcaggaggctgaggcaggagaatggcgtgaacccgggaggcgcagcttgcagtgagccgagattgtgtcactgcactccagcctgggcgacagaacgaggctccatcaaaaagaaaaaaaataccctgtaagatacacatcatgctcattttacagatgaggaacaggctcagaaaggtgaagggatgccacacaaccacaaaacacagtgaatggtggacccaggtgatcaggtgtctagaccattcttttaagtaataagccccccctcccttttttttttttgaaccagggtctctctgttgcccaggctcgagtgcagtggcgcaagcaccgttcactgcagcctcgacctcctgggctcaagtgatcctcccatctcagactccagagtaactgggaccacaggggcgccccaccatgcctggctaatttttgtatttttagtagagacggagtttggtcatgttgcgcaggctggtct

SEQ ID NO: 770 - DNA, 4001 bp, Homo sapiens
agataacattggagaatatcttcaggacctcggggtggggaaatacttaaataaaattcaaaaagtactaattaataagaaaaagactgataaattgtactgcattaaaagtaggaatgtttattcttttaaagatagcattagaagagagatgtacaagccacacagtgggaggatatacaaaacacatttaaccaataaaggaatctgtcctgaatataaaaatagcttctataaatcaataaaaaatacagttaactcaatggaaaaatgaataccttaggaacgttacagaaaaggatatccaaatggccaataaacatatcaaaacttctcaaccttgttatgcactagggaaatgcaaattgaaataacgtgtgagacctcaatacacccaccaaagtgactaaaaagataagaaagaaaaaaatccttgacaataccaaatattggtgagaatgtggagaattgagattttttttttttttatgtactgctggaggcacataaagtgacagaagcactttggaaaattgtttgacagtatctaagtcctagcgatttactcttaggaatattcccaactgaaatatgtacatatgtgtaaccaaaagtagtacacaaaaaagtgcatagccctattatttataataccccccaaaatggaagagacccaagtatctacccatagacaaatggatgaataaattgttatattttcagataacataatagtcagtgttgggagatgaaggtagactggactaggatgataatggcagagagggggataaatggatagatttggcaggtttgtaggcagagttgactggacgtggtgatgaatcagtgtgatgagaaaacaggaatcatggataacttctagattttggtatgagcaaacagttatttctcgttatttctattatttccatcatctttcacataaaagaatgcagtctctccctgctcctgctcttgccttcctatattcctgttttccacgtagcagcccagagtggtcttttaaaaacatagattatcttactcctcctgcttaatacccctttaagtacatgctaaaatctaacatgtactgttttaattctactgtgcccctctttacatgagctacgctgtctagctctctgacatcaccatataccactggtcctctttttaactatgtatgctctaaggcacactagcttctttttgctctttgggacaagtttactcttgcttagaatcttgccctttgccttggctagtttcttttgtgtttaagatctcaactcaaagataattccctagagaggtcttcccctggccatctaatttaaagcactttcctcctccctcccatcactttactacaagcttgtccaatctgtggcccaggacagctttgaatgtggcccaacacaaatttgtaaactttcttaaaacattacgagtttttttttaagcttatcagctattattagtgtcagtgtgttttatgtgtggcccaagacaattctttttccattatgacccagggaagccaaaagacgggacacccctgctctactacatcactcttttattttcttcattgttcttatcactatttaaaattatcttatttgtttattgttgtttactaaatgtttccccctattaaaggtaagctgctaggagtttatatagttcactgctgcatagatagagccaagaccaagtagaaggtagttaatacatatttgttaagtaaatgaataaatggacaatctaacaatacagagtattgagtagctccatggaaagcaaatttatgccctcattttccttctatatagaaataaaccttttagtgacagtgccactaaaaagaaagagaaaaaccctaaacttccagaaccttttgccttacagtacacatacattcagatttccaccttggttaatagtaagtagacaaaattaaatgtattccttcttaccttgttcaccaaaagagcaaatagaatgtagcctgaaggagcctgctgggtactgaaggctgagataatggcccttttatagcaggccccatgcagggaggagccaccctctgtgggatggtctgattcattcctaaccaaacctagatccacccatatctccacctctatttctccagcaacctgtgtttacttcccagcttcctcacgtactcatctgtacttgtttcagcaagttccaaatttgggtttacatattggaaattttatggaagggtccctttggctaatacaggttgtttgtgtgcagggcccatacctacttttctgtaaccccactttggcttgacaggtgcttggtaaatatctattgataaatacacttcctgatccttgtctctagaagagtaggacatattaatacgtttataagaacttgaaattcaatttatgataggaaaacatcacaagcatctacatatatgttcttttttaatctatgtattccatctttgggtactgaagaacttgccatgagatgaatgccgtcttctagaaattatggtcagtagaggataggcaaatttaattttaatttttcaaagcagagcaagaatgtgaacaattgaactagaagtggtgatcactaggagcatgagtttaattaggcaagactcattagtgtaattttactttgttttcaaggttattacatcgtggcatcagagacatgttccacatactcttccttcttaaaccatgaattttcttttattgccataaatatacaggggactcctatccctggtctgtcttatgatatacacactgttatgttgagcagattgcatctccatatggatgtcccatggttatctcaatccatagtgttgaaaactgaacttacattgtgcctcctaccaaaatgtactatcctccagaagcccatatattggtaatgatgcccccacacactgggtgtctcaagctagacaaagtcattttcatttctccttttccttaacccctcatgctcatgtcacatcgtatcaattatactcaggcttagattttgttatgtaggcctattctctacctccagtgctataattttagttctggacctgaccatctttcaattgggtattggtaaagaaaaaaaagtgtcgtaactagcctctctctctactattaagctggcttaccatcttatgtcattcgctgtgctggtttcttcttgcctgcagaatttcagacttttttacctgacgtacaagcccctttacaataggcatgaatctgtatcttttcaattgtccctcttattacctgtatctcatggaaaagtcactctagaatgagcaatatttcttggacgagcccatattggtccactactgttcaaaatctttgcgtgctatcctccactaccttgacttgagagaccctcatccttaacttctctttatcttttaagattcttcaaaattaccacctcctgcataaagccttacctgacatctccagatttatcagtgttccctcacatactctgtatttacctctcaatagcactggtgatattttatattaattacttatttatatgtgtgccccctgccccctggtgccttgaatcctgtgtttcttctcaccctagcattgactgggtctgagtcatcctttgtgtccttgggccctacagcaatgcctgggacatgatcaaataagggatgcaagggtgtgccaatcttgttcagagtcaaagagataaaaatatgcccgagtttttaaaactgtgtttaatgtcctcgttcttaaccttattagaccattgattctttcttttgtggagtattggttaacatctgtagaacacagatattcattttctccttttttcttcttgggtctaatttttttatgccagtagttattgcatttttgtctctaccatgatgtaataatgatagtaatctatattgtatacccattatgtgctaggaatgtgctaag

SEQ ID NO: 771 - DNA, 4001 bp, Homo sapiens
tgaagttaataactgagtcttttttttttttttgagatggagtcttgctctgtagcccaggctggagtgcagtggtgcgatctctgctcactgcaagctctgcctcccaggttcacgccattctcctgcctcagcctcccgagtagctgggactacaggggcatgcaaccacgcccggctaattttttgtatttttagtagagatggggtttcaccgtattagccaggatggtcttgatctccttaccttgtgattcacccacttcggcctcccaaagtgctgggattacaggcatgagccaccgcgcctagctgagtcctttttaagtagatggaataaaatgctggcattttatttttgattcttaatcatggctattttgtcaactccctatgtagatgatttccctttctatacttttttttccatttgataggataatttattaattcgtgtcctagtataattttattttctgctttttctaaggaaaagcctgggtgtatgagaaagtctgagagtctatgaggtaggagtgcataggtggaaaagtgaggacgaaacattcactttctttaaaatatctgctgctttaacagactttctggcatccccaaaataccactcatagagtttgcttagagttcactggggctgtgcactttttagctgatctgggtcatacaacagagcttgtacaggactccagcagccttcagttctggcacatggctctcaccttcagaactggatgaagctctttctccagaagttcctttagttcacccttgctcagtgtgccacactccccatcttgcttggtgtatttgtagaaaacatcaattacggtgacaacacttctcaagaggtcggtcatctttttgcaagtttaagtgaacctggacacagaaaaacaaagaaccctattattcatattctctccttttatcagcaattttcattttaataataaccagcatgatttttttaacctcttgttttttaaatctcaaaacgtaagaatgggccagggatgatacaaccccgtttaacacaatgaaaattaactttgttaactttgagttacttttctgtgatcaagtcttggcatgttactggttcaactgagaatagacctcaagtctctatatttcctgtcatgggtaagtatagtctctacatagtatctctacactttgagtgtgttggcattctgggtgttgttctaaggcttccaaaatttccagaaccagccagacaccattgcctcaatctctctttctagtttcactgcttttcttgagtcaaaagtgacagaccttccaccatgcacatctgtttatcctctgggcaccagaagctaaactggacccttaaggccttcagcaaattaaaaatgggcaaaggggctcaaaatagcttggtgtttcataggcatgagacagtagaactcagtagagcttaggaactctcttaatgtcaagcacttgaccaaacactgttttctttaattaatcaagaagaagagctcagcaatgcaggcagcagtttaactagtggataattagatcttggagctctgggaaccaacactgaataaggaagggactctgcaacagacccagctgcctcccagtttgagctggacagcccagaaaagagggcatggaaaaagactcggaacagactgtggaatggcctagaggaaggtgaacttttacttgcattattcttctccataaaaatgaacttaactacaaaaaggccccagaataaactaaactaaccaaacaaataagcaaacaaaaagaaaagaaaatgaaagaaagaaacaaaaaagaaaagaaaggcaaaatatacatgaactctgccttagcttatatccctagacttctactatggacaacaccaaatattcataaatgtagctggatgaattttctctcacctggttcaccaaaggaacaagtaggataaagcctgatgcagcttgcagggtgacgatggattgggataatgacccttatatagcttatagtgattatagtgaatgaggtgattcattttccatcaaacctaactccacctctacatatttaccttcctccttcacattgttatctacagatgattgcagaaaggctagtaccagccccaccttccagtacgaggacatggttgcaagataccttttttttcagggtcatatacatgtgaaaagcacagactttgttttagaggactcatgttatacatttcttttaactagtacccacagaaagtagcagagtgtaagatacttggaaggtgcacaataaatgcttatttaattgaaaatgaacctgagccactaggttcatctaattcatgtcttttttgtaataataaaaagtgacatttattgagaatttactatgtgctaaatactttaaacaaaccatctcaatctttaaaaaatctgcacttttagttatgggtacatagttgtatataattgttgggtacatgtgatgttttgatatgggcataccatgtgtaatgatcaaattacagtaattggggtatccagcacctcaagcatttctttgtagtaggaacattctaattctactattttagttatttaaaaatatacaataaatagttaactatagttaccatattatgttaccaaatactagatcttatcacctcatttaatcttcacaaccttcatacgagatatgtatttattatcccattttatagagacaggttctggaagcataaggatcttctccaaggtcatagctagtaggcagagaaaccagaagttgaacctgtatctaccttattgcaattgctgtttaccattatactaacttacctctgtgtatttatcatatataactatcatgcaaaaattatgcaccattttaggagtgtaaggcccactcaaacgcaaataatataaaaaagtaacatacagagtgctgttaggaagagaggaaacattctctgaccttgtgaaggctcatttctaggctagaaaagtgtaattggctatatataaaaataatgttttcagatatgttcagggtgaatttagagtgagctttcttccagcactctgcgatccactggtagtctggcatgtttagggcctggacccttgggaaaatgttcacttatgtacagaaagtatatcaaatacacttgagggtaacaaaaataatcagagagctgtaagtcttaagcatggagagccaattctgctgtactttgctaccaggtgataatgatgatgatgaggaggatagcagctaccattaagtgctaagtgcttactatcttctatacatggtaggtttacatgcttatctatttattcctcaaaataaccccattttatagataaggtaataaaagcatagagcaatgtaaacatttgttacaaatcgcagctagttagtagcagcactagaacagatacacatgctagccgatgctaaagcctagcacttaaccatatatattctacatatatggagtcaataaactcctatctgggcattgctttgggccagtcatcatatcttattcattccaccatctaggcagcacctagagcttggtaaacactaagaatgagtgtctgttcataaaatgttaatgaataggcccttgaaatatgtcaattgctcacatagccaaggaatcctagaccaaaacaaccacacagaaagttatggttgctgttggatactatggtcattttcaatcatatgcatcttttggaagtgcatttttgttaagatggctgctgtgtcagaaagactttcaggccccagactccacactgagacagaattttaaagcatttttgcactgtcactccagcattatagttgagaactctgaaactcctccatagttcagaactccattattcagtcttttgtattctttgcatttaggtctctcttcctcttctacttgcttagcataatggataaaatta

SEQ ID NO: 772 - DNA, 4001 bp, Homo sapiens
tagttcaacctactccatcttctgtacttttagataagggaaatgactataaagcaataagcatgtagattctcatgccttggccacctgagtagctggaattacaggcatgcaccacaccatgccccactaatttttgtgtatttggttttgccatgttggccaggctggtctcagactcctggcctcaagtgatccgcctgcctcagcctcccaaagtgctgagattacaggcgtgagccaccacgcccagcccagaacttttggttagcagtcatttatgtgtcccttatgtgccaggaactgtgctgactgctaatatatgaaattaaaagggagctgttcacaatgacctctcaaaatggaaacaatcttcccagaacccaataccttcctttcacaaatacactggtgacaaaaataataccccaagtcttgttcgttactgcattgacaaattttccatgttaggcatacacaagccaatacagttaattattattattattattatggttacagtttattattattatttgagacagagtctcactctgtcacccaagctggagtgcaaaggtgcaatctccgctcactgcaacctccacctcccgggttcaagagattctcctgcctcagcctcctgagttgctgggactacagatacccgcaagcaggcctggctaatttctgtatttttaacagagacggggtttccccatgttgcccaggctggtctggaactcctgacttgaagtgatccacccacctcggcctcccaaagtgctgggattacaggtgtgtgccaccgcgcccggcccagttaattattttataggtaattttcaaagcaagatgacaaggtcgtttggaaaattttgtccttacaaagaaatttatagcccacttcaatccaagacggcctcctattcaacggcttcatctcctcttttatagacaaatacctcctggggcagttcatccatacaggccatagttctcacggcctatgactttttccggtcttttaaggatctgactttcacctaccactccagtacttacctgattgcccagcacggcggtggcacaagctgtggacacctctttgggcccaaaccacactgaggcgatgcgggagggcaagcccaggatgaacacctgggccaccgagcacaagcactggcccaacatggtgacccagaagagatgctgctgcacactgccgcacttgatccaggcacccaggcagttgaggccggagcccagcagggcggtgagccgcaggcctctggtgtccagcagccaggtggccgggaagatgaggggcacgtaggccagcatgtacaccatggacagccagtcgatgtgcagcaaggtgacaccgtagaagccctcgaagacgttgctaatgatgctgtactggatccactgaaaggcgttgaccagcgagtacaggctgaagatcaggagcaccacgaagcgccgcggggagagcgccgtaaggggcagcgggctgctctcggcccccggggtctcagctcccgcgcccgcaggcagcagccgggcctgggtctcctcttctggggccagtggagtctgaggcccgcccagaactcccgaggcggcagcgaggctgtcccggggggccccattcaccgggaaggtgcccgctttgggcccgttctgcagctccacgctctccttcccaacgggcgcgcccctcggcaacgggaggtatcctttcgcgagcgggtgtccgggcgccaccgccgccccctcctcatcgtctggccgcgccatatcccaggctccccggcgccacctcgctcccccgccccactccccgactccgctctcccggcccacagcccgaggtcctcctggggccccacctccaacccctcggcccaccgctccttccccggtggcgcgcgccgcgaaccgcaatccgcgctaccgcgtgaacagatgaaggtctcctcccccgcgccgcgcggcagtcaccccttgtctggtcccgcccctagagtcgcgcgtcctgcatgactacggccctccggccaatcagcgtgcgcctttgtccggcgcgagagccagtcggggagctaccgggcgagaacttcgggaggcgggggaggaaagcggccggcgagcgctggctgacattttcctgcccggaaggatgcatggcccggggtctcctgcacctgagggtgggcgggaggcggccccgcgggttgtgttgctggaaaaaggggtctcgatccagaccccaagagagggttcttgggtctacttcagggaagaattggaggcgagtcacagagcgcagtgaaggaagcaagtttattggaatctactccgttagagagtgcaagtcctcagactgcaggaggaggaactcccgtccttcggtagtgtcactacttagaggcagctgtgaggagctgtgattaatcgtggaatgtgctgatgtgcccactaaaggtaggggctgttggtgcactaatgaccattaatccttcaacctaagcctgcgcattgacgttatctctgagtagagggctgggccgggctcggtggccacgtctgtaatcccagcactgtgggaggccggacaggagtctcccttgagcccaggagttcgagaccagcctgggcaacatactgagatgccatctatttaaaaaaaaaaaaaaaaaaaaaaaagccagtagccaggcgtggtggtgcatgcctgtagtcccagctactcaggaggctgaggcaggagaactacttgaacctgggaggcggaggttgcagtgagctgagatcgcaccacactgccctccagcctagcctgggcgacaaagtgagaccttgtctaaaaaaaaaaaaaaaactcaggacatctggacaattccgcagacttggtgggagatgtcctgtatggccataaatattgtgtaattataattgttggtcagcttagaatgcggctattttcagacctttagcattaaccttataggtgccttgtgagtgcctagttactcactttaacatgcagtcgctctagccatgttttattaaaccagatgcctggtaagcagtggctcctctaacaagtgggcagcttggaactgggaacgagagagccaccgaaacagaatgagggagacaaagaagtgggcatcacccttaactccacaagggcttcccaagggcgctgtaccgtacgcaggcccaggacgaactttatttctcgccccagcatcgctgtccttgtcggtgagaccctggctttagggcagacaggaccacgtttcataagttcatgctgtcccagcagaggaataacgccagaaagtgttccagtacaaccagagaaagagagtccatgagaaatctgcccttgtgaagttggaatcccctcaacctcaccccgctgacttgaatgaagcgactgagacgggctatgatggagcagatccggttgctcgaccttctcccttgcaccaacacatgtagttaatagttactggacatgcatattcagtgggttccaggtaccaaacttgtattgaatggtatgtgccagacaccgtcttgagatctggagaataaaaaaataaaaaaataaaaacgagacatccagagcacagtagccttgcggtcttcctggaactagagaaaattcagcccttctgctccttgggaagctatgtttgggaaaaaaaaaaaaagagagagagagagactccaaagagtttgttattaaatttaagttcaaactaggtgtatatagtacaaaagttcttaccatgcatttaatcttaaaatgtgctgatatctagaaccctaaaaccctgcacttttttattgcctcttacattattattttggtcatgtatgaaatatatcaggcatctctcggtacaggtgaaatgctacatgttctaaactaaggaataagtgcattattataatgtcttccttggccaaactgtataaat

SEQ ID NO: 773 - DNA, 4001 bp, Homo sapiens
gtggggggtgagctcgctgggcggaaaaggattccctacggagaagagatgtgccactaccaggtcaccgccttccagagcccagggagggcgggtggcaggggaaggccctgactgacaggcgacttgagacccggaggccagcagcagggcgcgctcacctgtgaacacgttctggaagccatccgcagccgcgggggccccagacgccttggcggccagtgctggggacaccccaccgccgctgtcactcgccaccccgcgctccagcaggtgcgcggagcctcccacccggggcgtgcgggcgcctagctcctccgtccagtcagccgagcggctcaggccggccgcaaggccgccgtcggcccggtgcttcttggccggggcggctacggaggccagggcagttctggaccctcggctcagggagggttccggccgcctcttgatcctggggctctgattaggggactgagacggggagtgattgggcgagctgagctgccgggtggtggtcttgatgtagcagggggtgatgagcgggtagggcttgaaacagcgctggctaggcgcggggctgccgggcagggaagcggccgcgggggcgtcaggtccttgcgcctcctcctccggctcttcccccagcctctgcggggcgtcctctcccacctccggggcccactcctcccccggagagccccggggcgcatcctcaaaagcatcctcctcaccctcctcatccgtgtccccagcccctcgcacgggggctccggccgcttcctcccccggcccggcctcgggaaatgggaaagccgtggaggagggcgagtctttggccgcgggttgcgctgccgggagactgggcgcctcggagaccgggaggccgccgggggacggcggttgctggggctcccggggctcggcggccaggctctcgggcaggtcggagagcgcggacagcgcctgctcggtgtccggactgcccggggcctccccagccccgccgctcggccccagcaggaaccggtccaggcccaggaaggccccgggctgaggggagacggcagtggggggcgctgcaggctcctcggcgccctggagctgctgctgctgctgctgttgctggagctggagctggagctgctgctgctgctgctgctgcaggcggatcgcctgctggatgtctgaaagcaaatcctcttgctccgtagccgaatggaagctatagatgtccgtgtccgagcccgagctggtcctttgtccatcctgcgcccctgctgcagtttccacatcctcggcgatcggccggcccccgaccctagcctcggcaggcccaggaccccctggaccggtcacctcaaaagggtccgcacactcggtatccgacaggccggcctcgtccgccgagaggctgaggtctggagtcttggtgagcagggagtgagcgctgtccagctccccggtctgcagggcctgggaatccagtacatcttcgcgggagccgccggcgcctttccccttggacagattcttcctgatccgcaggttggaaaacaccgaggctctggagtcggacttgctcttcttcttgcccgactccccgccgccgccgccgccccctccccccttgccgtgcttgcctagcgccttcttgcccccgctccccttctttgtggcttccacatccctgggccccagcgcatcctcggcgccaccgccgccttcgtgcaaagcatcacctgcgctcctcttcagcttcccatcctggttccccatggtgcaatcccgctgctgcgccgccgcgccgcgggcactcaggccatcccggccctcctcggccccaggtccgggcctagggagtctcccgggagagtcaggcggcggcggggggagccgctgggaggggaggccgacgcgcgcccggctggccccgctcgcatctgccgccgctttgcataatgcgcggcggctcccgtggctgccgtcgctgcggctgcggctgcggctaggggccggcggggcgcgaacatgctcagtgcagagcgcggcgcccaccaatggctgcgcagaacgcagctcgggcctggctccccgcccgccgccgccgccccctctgcccccgcgcggctcctcgctgaacctgggcgcgaaaaacgtttcctctatctcggggactttaatctccaccgtgcgaatcgaatgcattgtccccgaccgaagagatcgtcagctggaagatgcactctgatcttcaaagctgctggacctgccaagagaaaagttaaataaaaaagaagaaatttttacacggagaaaaactgaagcccaattccagtttagaggtgccatcgggtcacagccacatacacaaccccctgtctgcctctgcatggctgttcaataaatatttgttgaatgaatggattgttctgtttcttgaataattgatcatctaattgaacactgttaatgtgcttgagcatatggtttaggagaggttactacacatggtgctgcttttatgtttcacacacagaccctgcttctccaggagaggacattagctgtcatttataaaattggtttgtgatttttttgttgttgttgacagaaggagaggtaggagaagtagaaaatactgagattagtgttgattaaaatgctagtctccaaattctatgtgtttaccatataaattaaacagcatttgtattcaaaaagggtgcatatacgataactcccaggaggtcaaactcatcaatattaaacatgtcactattgtggctgcctataaaaaggaaaaagacagaaaggaaacacccttggcacaaacacacaaaatcagatgttatgctataaactaccactttcccaagcaaacccttccaggcagacttcgtcctgtaaaagtttcttaacgttctggccacaatatggggataaacatttttcctcattgaatattttgtcattgttttcattatttattaaatttagttacctattttttaagaatagtttttttaaaaaaatatggatatctaaagctttaagcagtaaactgagattaaagtggcattaataagttttacaagtatttaagtaaaagtcattgataaccactttgaaaatatggaatagacatccaacttattaatattttcaaaataacccagaggagggagaaaagctatatattatactgtgcaacttaaatgtagcaagcaaatgtgtagtcttcctttgcatattatgaaccagcctttaaaattcttttttaaaaaaggttggtcttgtaagtctttggttactaacctttttcaaactatgtttttaaaaataaatgtaatttaagggcagttagccagttatccttaggtggccctttcgagtaaatgctttagagaaatcaactttaataactttgccagggttatatcccagtctccaagcaattccggagtacatgaaaagcctttgtttcacctctttcacaagactgctctctccttttttctagaatctaggctcctcagagggcacaatttgcctgcagctattagaattttctgcttctttgagtgctgaggtactttgaatcttgatttttgctctttctttagcagaacgtctttgattctgaactactgatttccttattgttttcttctgtgctatattctagacgttcagaagacaaaagaagggaaagaaggagggagggaaagaattgatgattttttttcacagtgacagttgtgcagcaggtcacagctgacaaatctctattgcatgcaaaggctcatttgaaattcacaagtgtgggtatcaaatacacataggtgctcttaactcaaggataattgaagcatgagctcaggctcagagaggctaagagatttgtccaagatcacatagcagcagaaagaatactggaacctgcaaatttagaccacaatttttttataacataaaacactgcatagtttactcttggggga

SEQ ID NO: 774 - DNA, 4001 bp, Homo sapiens
tagccttcttccatctacctgacagctcctgagggcagggtgaatcctcatttttgtgtcccccacagggttttgtgctttgtgcactggtgtttgacctacctgcatcacacagctggaaatgggcccagctggatccagactcatttctcttgattcttagatcagtgatttttagtgttgatgattaggtgcctgtgacctatacaaggagcatttatgtctggtgctgcaagaggctaagtactgcttttgatctttaggtttagtttttgttttgactgagattactttagtcaaataactcggctaatttagttaggcagtttcatctttcaagccaactcctgaccctgactgattaggtatgcttgtttggaataatgttaagaaggattctgaggctccctaggggaaaggcatcatgtttgataataatgtcttcgatggacatgggagtggggagatttttggcctaggtgtcaggtttctgccatcctgttggaacatatgtggtttgattcctgagaagaggcatgctcttttaccttgtcctctttggcagtctccatgcattgatgatcacatttggtgggtacactttaagatatgcagttctttatgtgagccaagccgcctatgctggaggactgtgactaaactagtaaccttggcctctctggagttttactcactgagctagaaaataattactttacttcagttccaaattctacccttctgtaacagagaaatgctgtgtctttctctcagcccctcaggggatctgaggcggggctatctgataccttgcttcttttcactctttctgacagctttctcctcagcaaatttaaagctcatgggaaatgtttttgctcaaaaggagggaaaatagaaactctggaaagatttgatgcaaatgtttccctgactaagccatggagttcagggaacattttccctgcctggcttcagggtttcaatggctttaagaagggcccttgtgatctcgtggggccccaggccaggcaagggtgggctttatagtcccctttcctcggtcctcaccccttcattcctttctccgatccaggcagtaaccctgctgagacttgagtatattacttttcttctgctcagggaataaaaaaaagactcaaaactcacattctttacttctgtttgttcttggcctgcactgggattgccaggtcagcaggaccttgattatggagctcatcctacacagagccctgagtctgtaatgcagacggagccaggctgggaaaagaagcaggtaaaagcagctcagtcttgcaggcagaggctgaaattcttgctcttgctcctaacactgccgtctctggccctgcttcagacgccctggtcctgctcctttgctcctaggctttcctggcctggcccagttactccattctcttccatacttcttgggcatctttggaaacacttcttccccttggctctagataaagtgtacaagtctgttctgacttccaccctagctcacccatgtcctgtttcttttacaatttcagtggctcctcatggtcccctgttcagcagacatttctaaccttcctcaaggccaccaacccttgtgaaagaagcacagatataatttcccagctgccaagccattctccaatagacagataaagttgttgaaaccccacttacggtgaatctccacagccccccaaggtcatcgctcctctcaaagcaggtgggctccagtccttcttccagacagcacttgatggaggccaggccgctgaccccagctcccacaatggcaactcgcttggccatgttctcctgcatgaggaagatgaagcaggctttttattcacaagctccaccccacccttggctgctctaacaagccaggaaaaagaatttggaagattaggcgatttgctcagtttgaatcttctgtagcgggtctctggtgtgtgaatgtgagaaggaaaatgttcaggtcactggttaaccctgtgcttggtatgttcccgcccctcatgcagcaccagtgccaaatgttcgtacagttgtcaaggctgtagcttctggcagagctgctggaattggaccttttactggataaagtcttgcacttcagactgagctgctgcctctagtctccattctgtggccctagaactgcatagatcagcagactaggaaaaggtcaccttgtcagacacaatctctttatcacatacaaaactgaagctccgattggtgtggtgacctgacacaacaccacacagcagctggtggggtggagttgggaccaggagccaccacacctgtggcaccacgggtgctaccgcggcactgccctgtgtgatcctgcccctggcacaatgccagggccccagctgtgctgttggtgtgtccctttcacaggtcaccagtgatggtcaccagtgggagagagagagggtggctgccagggagggtttgtggtagaaaggtaggcatgcaaagccatccctcccttctcaattggatactgattcacctccagggcacatggcacagtcaccactgggatgggccagagaatcttctggcaccaggccatgtgttaataacacacatgtgtaagaacaccgagaggcaacagagtgcattgattaagcaaccaggctctggatccaggctgcctgagataaagcgcggctctatcagttacgacagtgtaatcttggacagattaacccttctgtgcatcacaaatataaagaaaacaatagtagcttccttgaagtgttctgtgagaatcaagtgagttaataatgtaaggcgtctcagaatagctcctggcacatagtaagtgctcagtagctgtaagttattgaaactttaaaagcatttccaagaattggtatctgcctttcacatcaatgagcctctgttcttttaattcctatagcatttctggtcagtagcacacacatttgtcactaaattatgtgatgttagcttttcccccaatatatttttgtgacagttttatctccctaagtttgttaagtgcagtgcccccaaagacataatttttctaaaaatttgctattttttatttcacaggtgaattctcttctcaaagctggatatgcatctttttttgttttggattaggaacctgagagaagcagctcaactgtagagactaaaatattcaatattttagtcttaactgtagagactaaaatgctcaattttttttaatgaaataaaaaggtcctcttttttcaagcaacatgtaaaagtgttgcagggctggttgcttcccatagcaactggatataatttactggggaagaaccagtagattccttctaggggaattcatgttttaggccctgaaggacactataaaatcaaaaaccttgtataattttcccctctctgggcccaacaggagtaaggtgaccccacatttagagaggcagttgtgaagtatgggtattgggggtagacacatgtgtttcagaatcctattctatcatgagtcaacttggtgatataggaaaatgacttaccccttttgagcctcagtttactcactcgcaagatgggatagaatgctactcttttttttttttttttttttttgagatggagtcttgcactgttgcccaggctggagtgcagtggtgagatctcggctcactgcaagctctgcctcctaggttcacaccattctcctgcctcagcctcctgaatagctgggactacaggcgcccgccaccatgcctggctaattttttgtatttttagtagagacggggtttcaccatgttagccaggatggtcttgatctcctaacctcgtgatcagcctgcctcagcctcccaaagtgctgggattacaggcgtgagccactgtgcccggccaaatgctactcatttttgtatgacatagtagccatttgataaagaatatccacttttatgagaaaaaca

SEQ ID NO: 775 - DNA, 4001 bp, Homo sapiens
tcattaccaaactgcagcggcactctgagctattttaaaattttgaagaagcacagtgattcttgatgtcagttgaacactatgctaagtattagctgaaagtagttaacagttttaatattgtaaaagactgtgttccatttgctgacatcatatctttgcaaagctgggtgtttgacaattgctatgacaaaaagcaagtattgcatgaaaactgaggtagaatagaaatgaagggttcatgtctgatctgattccaaggtttgagaagttgtgcagtgctcagcaggcacataaaccttattattaagtaattgggattaagaatgaaataaaaatattatttttcttttagtttgtatattacttgttcaaaaaactacaaagttgttagaacataaatagttattaagtttttgtctacttaataggagaaactatggtctgggggcaccttgaagaaattgcacaccaagggctccttgaacctagaaagttgaaaacttctgggcaagagttttattttccgagtttattttattgacccggagattttatttgttgatgtcaagaaaatgcatattatactatatttgaggctagcattgtatcaattagccaatgtttaactgtttccagtgtgactcacctatgcatttactaggaagccattggcactgtcagatttgtatccagccctctatttatgcattccccatcttctcctccttccctactccctctgtctctctctctcacacacacacatacacacacacacacactcctacaccttagtgcatgaaaatacttcagaatactggttggcacagactgcacaatgataccctatcctcaagtgggttgtgacatttcaggagtaatcagagagagattcagctggatggcagttggggtgggtgaaggtgcctacttagcccctgggaacaaaggagcacagctggtaagaaacttgggtccaaggagggccatactctgggatttctgtcctctagcagcagctcctcatttactcaaatgttcctaaccacaacaagcaaataaaaattctcccaggctttaggtcctctgtgccagttacaaggccatagcagattccctaggatgcaggggaaactctaataaccaaggactcagtttctccatctgcagaacagatggcatagacctgaatatctaaaaatgattttcaaacccttgatgtttatgatcttgtgaatttaactggagcaggattagtaaaaaagatgtgccaatcacatggaaatcaataaattttgacataatacatagaatgaagcacgaaacacttttaacaacagaaaaaaagatgacatgacagaacagattagtcaaattctaaaggggcttgccttttgcttcccacttgtgccaaatgccaacatttggtagtcacccttcaaaaactatgatctcagacaatgttagaagctgctgatggaagcactaaaaaaaaaaagagacttttcctcttgcattagaaatccaagtttttcccatttgattcaaccacttaataatctacccaacagtatacttacctgtgtacatggaagacaggtaagtatactgctgggtagattattaagtggttgaatcaatgatattgtcccattataagtatccaaacatttactactcctatactttgggccaaggagtagctttatagctcctccagggttggacagagaaagctgctttctgataaggtggttcttccctggagcacaataacaaaacaggaaaactccagaccccactttcctcatccaaagaaatcagagattatatctggttacttactttacgtacttgtaatttctggtgccaatggctctgccacgcaggactctggtattagcagagatcaaaatgaatcagtatgagccagtgctggcttgggagtccccagcacagtggataaacctggtctaagagataaggaatgttaaatttgaaacccaaggttagccgttgtttatattttaacttgttgattaatgcaacagcgaaatgctaggagaaacactgtctggtgatatgtactttagactcactcttctgcttacagactataaactaagttagggagttacaccagcatcctcacttgttcatcagttttattctttaaggggatgagaataaaataagacaattatgttaacagttactacaccacagattcacttttaagggctttgatccatttcacctttagggacaattattatttttaaaaaatcatatattactcacattagtaaactcaatttgtaaaggctttttaagtgcagctgattgcccaagcacttgggaaataaaagacaggtatatgggaggagtctgatcttgggaatcacaagtcctgggttcgagtattgcgttcaccagctattatcagagtcatgttggaaaaattgtataacttttctcagctttagtttcctcaatttaaaataggcatgatcgagtggctgccaggggctggggaaagaagggaatggggaaggattgctaatgagtatggagttttcttttgggtgtgatgaaagtgttttgaaactggatagaggttgtggttacacagcattatgaatgtactaaatgccactgaattctatactttgaaatggttaacgacagattgttggaaaatggtggataggaggcaggactaacttgcagtttccacgcagacagacagaacagcatgtggagactcacacagtgaaattttcctccaagaagtactgcatgaacataccaggaaaaccaaaagaattcacaggacctttgaaagaagtggcttgccgctgcaaactccatgagacagctgaaaaactgtgagtgcccaaagtgtgagtgggggaaaaaatctgcctccaaacacgcaaacccactagggaacctaaaaatccagatcacaggagaaggatttaaccttacctagagctgggatgaatttagagagcaaaacgaaatataaaagtagaagcagtgggaagagccctgtaggtactcttggtgcccagggaagtcatttctgactttatctcacaggggtccttgaggagggctgccagtgaaattgaggaaggaccacagggagaaggaaacttccagctgaactttgtaatagttttgactattagcctgagaaacacgaatacttatccaggagaccttagggcaatcttgcattctccctatactaccgcagctgatgctgtcttgaaaatgaggaaaaggagtcattatacaaaaaagatacttgaacacacttgtttatagcagcacaatttgcaattgcaaaaaatgaaaccagccaaaatgcccatcaatcaatgagtggataaataattcgtggtatatacataccatggaatactactcagccataaaaagggatgaaataatggcattcacagcaacctggatggagttgcagaccattatcctaagtgaagtaacttgggagtggaaaactgaacattctatgttctcactcataagttggagctaggctatgagaatacaaaggcataaaaatgatacaatggactttggggacttgggggtaagtgttggagtggggggtgatgcataaaagactacacattgggtatagtgtacactgctcagatgatgggtgcaccaaaacccacaaatcaccattaaagaacttatccaggtaacaaaacaccacctgctcccccaaaagctattgaaataaataaaataaaaaattctaaaaaataaataaaacaggcataataacatctgcatcagatagttgtggtggggattagatgagataatctatgtcaagagatttgtgtatatatagtaaatactgtgtatgattgtaatgatgataatgatgatgatgatgatgctgtcattgttggaccagataaggtgtcttgattgctggttcataacactgaaatgac

SEQ ID NO: 776 - DNA, 4001 bp, Homo sapiens
aacttaaacttttgtttaatctttttgagcaagaatgcaagttagggcatggttgtaagtcagggcttatctgtttagaagtcacgtaggccgtggtttgaaggccagttcctccagttgtgtggccctggccatctcacttaacctccctcactttcagtttgctcatctataaaatatatagttattattagtagctaacatttattgaactctatgagtccggaacttatctaagttctttatatgaattatctcccttaatcttcaaaatagcactatgagataatcacactttcctgttattatatccatttataactgagtaaattgaaacacaggatgtaaataacttgctcaagatctcacagctagaaggtggtaagctactacctattgagaggttgtgggaaggaataattgtaactccttatagctatctatgcaactttctaagttttatacaaatttttaaggacagtgacatggtttggctttgtgtccccatccaaatctcatattgaattgtagttcccacaatccccacatgtcttgggaaggacctggtgggggtaggtaattgaatcaagggggcagctaccctcatgctgttctcatgatagtgagtgcgttctaatgagatctgatggttttataaggggcttttccccctttgctcagcacctctctttcccactgccatgattgtaaattttctgagtcctccccagcattgtggaactgggagtcaattaaacctctttcctttataaatcacccagtctcagtatttcttcatagcagcatgagaatggactaatacagacaaatagcattatcaatattttggtttgattaatagaataaatttaataaaacatatttaacaaagagtttcacagcagttatactagaatgtcattgataaagctcagtaaacaaacatgcttcatttgtcagagaaaaatagtaatgataagagcatggtctctaaagaagcatttggtttaataattgaaacagaagtgatatcttgagaagaatccctgttacttctatttttgtaaaatgttctctaatattagcgtattaaagaatgacagaagtatgggctgtaagacaattgctgaatccaaaagaagagatcttttacatgcctgggtcagctacctgggttgggttagtattgactgggggagagatgccagcctatgacttcagttccattatggccacatcaataagtagaaataaaatctgatcagagttgtttaataaatttctcaatatgacccatcagtaactgtgattcaccctgaaataacaacacaacctgttcaagacccaagaaaatctcacttactttgaacctccacactcctccaatatcttcagttctctcaaagcaagtgggctcaagtccctcatccacacagcacttcagagaaattaggccactgaccccagctccaatcacagctaccttctttgccatcagctcctgtcaaggagttgatcaatcaacattacttaactgggacaaccggtaagagaatccttatgatgtgctcaggtaattggctttaaacattgtagcagtggtaatttaataagcagcactattgaataaagagccagtcaaaaatcctgctctcttcttgcctttgagaaaagctgagtttcttatggactttgttgcaaaccttgcttacatctagctttaatatttaaaagcgacccattgaacaaagccagactatgcagtaacatactagggatgtgagccaaatttccagctagagttctgagcttttccttttcagcttctttccccagcgatcatccttacctttgtttttgccttttggcaccgtctctttgacagaatagttttctcccttggttgtgtgctgggaggcagttggaagcgtttttaagagttggaggtggctgtgagaaatgggaggagttccgtattcctccagcattcttccagctgaaactccaaagacttagttaggagtcctagaattaggcaagaggctcgtgctctgaggtcaacagtagtaatgcaatgtctttacagtaacagcatatactcttacatagtagcaacatatactcttaaacatacagatagtttaaaaatcctttttataatgatgtaataaatattcattcacaaatgaacatatagggataaataacaaggttaagattactcctcaccacccagaggtaactgctgttgacattttggtatatccttccacctatttgtagatacatacacacaaacagaaatggaatagtctaatttccaacttgattttttaactttctagtatatcaatattgtgtacctatagcagcatttttcatggttgcatgaatctcatttagttgatggtttaattatctaacaaatattcagttcttgcagttaagcactatttctggcagattaccatgcctggatgaacaagacagattatgttcctgatcttatggaattcacatttgtgttctggcttagttttcatagacttgatgatttctgggtcctagcatactgtgttcatcttttcccagattgctcaccctgtccaggctcatatcttattttgatttttctgcctatgtgtatggtggcttggatgaacctagtgggacttctaagatctttctatccactgctgtctttttgccttgatatagaactggataattacctctgctaataatttcagttattagggttaacatttattagcagactaacttaggagactagcaagccctcgtgtaccttagatagagtctaactgatgaggtaaagaactttattctccaaccccaaaagaccagtttctctaaggagtctgagacgttttacataaacttattcaataaatatttactgaacacttcctaggtgccagaaactttctaagtgatgcaggtacagcaatgaataaaagaggcaaaactctctgcctttgtggagtttactttgtagttgagggagccagacagcccatcaataaaataaaacaagtggtgatgaccactatggagaaaaagaaaactggaaagggaggtctggagtgcaagagtgaagagttgttttataatgtcaaataaggtgttctagaaaaacgttttccctgaaatttcctaaaataaattggtcgtgataaaaggccttctctgtgtaataagtgcagcaactctatgacaagactaacagatataacaaaagtgatgatcaatgactaaggaacaaaagagctgaacacatttctcagttaaaatgaaaaaaggccaggcacagtggctcatgcctgtaatcccagcagtttgggaggccagggtagggtattgctaggagttcaaggtcagactgggcaacatagtgagacttcatctctgcaaaaaacaaaaaatcagtcaggcatggcagcatgcacttgtagtctcagctacttggaaggctgaggtgggaggattgcttgaggccctggaggtcgagactgcagtgggctatgattgtgccattgtacgccagcctgggtaacagagcgagaccgtgtctctaaaaaataagtaaataaaataaaaggatacaaaagaaaaattttaaaaaaagaaaaaaatcaagccacttcattggcagttgggtacacattttgttaacagcctgttaacaattctccaattttatctttgcaatgtcttctctaggtagttatgatattgatggaagccctgttaaaaataattgtacctgaccaacatacagagaaaagaaaatacctaggtatagaagcaaagttttaaactgactgaacccttaaaagatgatggaggcagatggcttagttatcctccagggataactgatgtggggatattaatggccttttgtgtcaactaaacatacatctgtgttcatggtggcatgcatcagctgaggagcaggcatcttctaggtaccagca

SEQ ID NO: 777 - DNA, 4001 bp, Homo sapiens
gcaggtttggaaacctgtgtgcacacagtgtgctcttatacacttcccaacctattttcctgtctattacaacaacatgctactcactgaaaatttccacaggcccccaatgtcattgctcttctcaaagcaggtgggctccagcccctcttccagacagctcctgatggaggccaagccactcacaccagctccaatgatggccactttcttccccatggtaacctgtgcaaaggcccagagaacatttccagtaacaacattgctgaaaatgtatttacttatttatctatttattttgatttcgctctttggcttaataaaaactttactttttaataaacactggctgagtatggtagctcacgcctgtaatcccagcactttgggaggctgaggtgggaggatcacttgagcccaggagtttgaaagcagcctggacaacagagtgagaccctgtctccacaaaacaaaacaaaaaacaaacaaaatcagctgggtgtggtggcacatgcctgtactcccagctactcaggaggctgaggcggtaggatcacttgagttcaggagttccaggctgcagtgagccgtgattgtaccactgcactccagcctgggtgacagagtaagaccttgtctctagaaaacaaattccttttagtgatctaactacattttcatttctctctaatttctaaagagaaagttttcttctgaaaaaaaaataagcactttgtttttagtcatcagctctccaaaattaagagactgatgacccagcatacatatttatcttttttgcttttggactttgtcatttactgtctaccaaaaagagtaagcagaagaaataaagattcgcaactaaaacacctgtagacacatccacccacccacccacatacatatgcctgtatatgggaatgaagaaacacatatgtatatgtatacacacacacagtcatacacacacacacacacacacgcaatctgtatcttctttttacttagatacggataatgaggaacaaggtctgaagatgtctgtatttcagtgtgccaggtagtcaccccttctccccatcaataatgtacttcaccttctcaattaaaaagacaagtaaatggtgcatacctatagtcccagctactctgggattatatagtcctgttgagctggggtatcgcttgagcccaggagtttgaggctgcagtgagctatggttacagcactgcactgtagcctaggtgacagagtgagaccttctctccggggggtgttggggaaagaagtcatgttcttacctaaaaacaattttttcccactaccttcagcgtccattcccctctaagaaaattacgtttcctaacttttttctgttcctgacactgtctttaggctctaccactacttctttcactacttttttttttctttttagacaaaatcacatagctatgcagggaaatagacttggatgattaaacatcatgatccgtgattcccagaaacaaacaaactgcctgaattatatcattctcattctagccatatttggtataaaactacagcatgctccttcttcatttacccatcccaccctcaaccctttactatatcaccttttattctttttcttttctttttttttttgagacggagtttcgcttttatccaggttggagtacaatggtgtgatctcggctcactgcaacctctgcctcccagattcaagtgattctcctgcctcagcctcccaagtagctgggattacaggcatgcaccactacgcctggctaatttttgtatctttggtagagatttggtttcaccatgttggtcaggctggtctcaagctcctgacctcaggtgatccacccgcctcagcctcctacctttttaattttcctacccgttctttgtcttcttttcttctgtgtgtctacgtcctgtccaaccgtctgggcagtttgaaagagaaaatgttctagtgagcctacatattaggaagattgttgaaaaatgggaggagctgctcttaaagagatactcatttattggtccttgaatgggtgagcacacgccaaccctctgtgatggatgggactgtaggccagtctcccatggccacccagtttctacttttcctttgattatggtaaacacaagctgctggttatactcttggacccttggcctgggagtcaagtagtttctcccaggtgactttgcagttctgtactccattttattatgtgttatttgaaagtttaccttgttttccttattcctagttcttttgtgggtagctcatagtagtcctccaaatactgtagaaacttagctacttaattgagatagcccaataaggaggatgacttttctctgctctctcttttcatgtcctgtcttggaattttggggtcaaaggcctgtatttctcaagcttatatttacttgtttctgagtacagtgtgtggtcacagaaaagatcaaaattccacaaattgatctattagtaccaggaaccaggtaaaattagtaccaggtaaaattatgttggcagttagacaaaataaactgcacctaactcccagtcatgaaatatagtagaatttcaaaaaaagttttcctatcaactatattttgatgtcacttagaattataacatctcactcattttgtctagttaactccttcattaagcaagtgatacttagtgtaaactggtatatgtctaattttgaggaattacccttcatgccttttgaagacagtaatcttcatctctgaagtgtgagtatgagagattccaaatcacttctatagctctgtggccttgggcaaatcacttaacctttccaatcgttgatttactcattaataaaatagggataactacactattaattcctgtctggctattttttttttaacaaggattagaggattaaagggtatgtacacataaatacatgtatacataggtacatataaaatgtggcatgtagttaaaaatgagcaaatgtgacttgtagataaaaattaaaaacaagtcataggttcatgaaattttctagggctgcaattcagacaacatgattttctctgctctcattttacatagaacttcttttcagtttttaatgctacataaatagaattaaaataatgcaaagaaaagattgtgactacttcaggaagcaatactactcctatagccttattcatttaaagattggcaggacacacccaattctaccttggcctccgatgttttatctctctaggaggtgaaaaggccacctattctttgctgtccttcacaagaatgtatctgaagtcgacacatttattagtcctgtctctctctagcctatcctttgcttgccacagctttctgcagagcccctttttaaatcttcagaatctcaaatgcccaggctctggttggggcagtgggcattctctactctgttgtcccctccaaatcacaaaactgctaagaagaaactttcatccctggatggttgctagattattgttgctgttggaggatatgagtggaagacttatattctgttctcttgctctatattttctttgtattttaaagaaatttttgttttcttctaattgatttgctggaggcaaggcatatatctcttgtgacacctgttgtcatgtctgatgatgcataacagttgaaagatttctataaaatgagagtggcttttggagactcagacttgatcatcaaagctatgatggaacattccaaagatgtggattctttagggtccatattctgaagctaatatctcgtaaagaatcgagtgaacaacaattagtgcaggcagtgctaaatgaagctgacagtctgttgcatcttctgctacaagtttaaaaagtgtctcaaacttttttagtttcatagccagaggaatgctgtgtttatttccaaagatatattttttcatatgtttttagctatctttgt

SEQ ID NO: 778 - DNA, 4001 bp, Homo sapiens
aaaggagtaggcagacatacctgtgttttcctttgagttgaggagtaggaggtttagacagcttctaatcagaaacaaatggcctccaccaataagaatacttgaatttccaggccactaggtagaggcctggggctggcagatctttgctgtgctctatctctgcaatcataaggtaaaaagaaatgactgctaactgaattgccaaagtgaaaaatatactgacgtgaatagactggaagcaaattaattcattcaacaaatatgccctgggtacctctaagtgcaggtcctaagctaagtatggggccctgaagataatgaagaccctgcaactaagaaatagtagtaaagtcttagaatttaaaaaagaccgtgactgctcttaagatgttgtatatggagaggctgatactaccttgtgctaagtcctatggtagcagcatgctctaggcatgaatgcttgcactctcctggcctgtttattatccctgtctagagacctagttagtgacacagagtggcctgtggggttaaaaacgtgctgggcaaaagcactttaaggactgacttagagactctacaggcagtagaaacaaattgggaattagcaccttttaaaattaatccgtatttacagactataaatttctgaatgggagcaacctttttaaattttgccttgagtcagtagaggaaggtagtgagtgaactggaaattgagagatctgagttctagttctgcttctgcctctaagcagcttgtaaccctggacacaattctcaatttctctgagccagtgcttccacatttgtaaaacagagggttcaagtggctttctctttgtttccttcaagcttgaaaggactgttcttatgtctgaaaaccaagtaattggtgcacaaaaaaaaaaagatatgaattcaaaggtaggcgagaatactgcaggcttgaaggattgggagaacgtgtgtgcaaactctgcaaactataaagtggacttcataaggtacttggttgctcaaaggtgcttatatttatttatttatttatttgagttggagtctcactctgtcttccaggctggaatgcagtggcacaatttcggctcactgcaacctccacctcctgggttcaagtgattctcctgcctcagcctcctgagtagctgagactacaggcaggcggcaccacgcctggataatttttgtatttttagtagagacggggtttcaccatgttggtcaggctggtctcaaactcctgatctcaagtggtctgccctcctcggctttccaaagtgctgggattacaggcgtgagccaccgtgccagccataggttgcttatatttagtcccttggcagaaaggagacctgacctattgaactagacctttgtacaacgggaaaaccccaccctatacctgactgaccagcaaatgtaggaatcctttatgagacatggagagacttgggtgatttgcaaatcatgtaatcaattatgatttctttgaatttgaaatttgatcattttatgtttcttatcatcatcctaccatgctcttgctttgttacagtatttttttcccacgccatctatggggtatttgtttcccaatggctggcatttccatctcattcataagatgaaatcagaggtcactggagtcactgaaagtctcatgattctgtttatctcactgacactttccttttggatggttctgtccacaacataactttgtttccttacaacttccctttgcttcctgactctctccttaattctcttgctttagccctagtcaagagaccccaaaagaagataatcacattcattcttaaggaacacactccaagaaaaacattcatcttttgtgaaagcagtttctggatcatttccccattaaaaaaaaaatccaggacacttaccttggttagcatagagcagattctttgacttaaattatttctcaaagtcaaggaaagtgtttgtcttttttttttaaaaaagctcaaaacccaaattcttttttctgaaagaaaaataaatggaaagatgacttttgtaaaagtgccctcagtttaaaacaaaagccattcgtcttttctgttatgctagtgacagcagaaagtatacagactaaggaaaaaaagttgtgtaagaggcaagcgtgatacttccgtgatcttaagggagggcggaatggtgagttagaatacagctgttggattggcagaacataaacgcttcctgcccctttaccccaccctcctcaacgtcatagttctggcaaagccctaaagctatgggaagcacatgatagcgtcgcttttgccattatagtctgtagagggcgccaaatcaccccaaattacagctttctcagcgaaacaggagttctacttttggaaacaaacttctacaccctgactcttgcttggattaccataggagctgtccaaaggagaaagttatttagatgaccattacctcatcaagttctttcatgcttggagttctccaaccccagaaatgtgattttaaagttcaggacttacaaggaatttaagctgttttgtccttcagattggatcagcagagggagctggtgaaatgtgtttgagaaagcataaagctatttttagatattaacctagggcacaagaaaggtaataattatagaagctgtggcagaaatagaaaacttaactgtttttccttccactgtgtgcttgtaagataatataacagaccatctttaggacttgtgtttagggacattttccaacatggttcactgaacaatttctaaaccacatttgcttgtgactacacatgcaaatgcctacaggagtgaggagggtaacatacacgaggaaagtgggccagatatgatctgactggaaagtactttctctgtctattcagttcagctaaatgttgctatttgagaaaatgagcccaatatggcaaggccttaggttcttttcagtaaaagctgcaaatacagattttaatataaaatcttctgttggcagcaaatattttcttttgaaaaatatcatggaatattatgcagccataaaaagaaataagatcatgtcctttgcagggacatggatgaagctggaagccatcatcctcagcaaactaacacaggaacagaaaaccaaacactgcatgttctcactcataagtgggagttgaacaatgagaacacatggacacagagaggggaatgttgtagggcctgttgtagggtagggggtgaggagagggaacttagaggagaacaggtcaataggtgcagcaaatcaccatggcacacgtgtacctatgcaacaaacctgcacgttctgcacatgcatcccacttttttttagaagaaataaagaaaaaaatttaaaaaaagaaaaaaaaatattgtgtccagagttagttccttccggtgggttcctggtctccctgacttcaagaatggagctgcggacctttgtggtgagtgttacagttcttaaaagatggcacagacccaaagagtgagcagcagcaagatttattgtgaagagcgaaagaacaaagcttccacagagtggaaggggacccgagccagttgctgccgctggctggggtggccagctttctcttatttgtcccctcccatgtcctgtttctgtcttatcagaatgcccttttctcaattctccccacgattggttacttttagaatcctgctgattgatccattttacagagcgctgattggtccattttacagagcactgattggtccattttacagagaactgattggtgcattttacaaacttcttgctagctacagagcactgattggtgcattttacaatcctcttgtaagacagaaaagttctccaagtctctactcgacccaggaagtccagctggcttcacctctcaataccccctttaaacaggacaccccaactgcttttgagaattgcgcaatgactgct

SEQ ID NO: 779 - DNA, 4001 bp, Homo sapiens
tcctctgtttgagaaaaagcctaagaattttggcattggacaggacatacagccccaaagagacctcaccctctttgtcagatggcccccctatatcaggttgcagcagcaaagagctatccttttataagctgctgaaagcacttcctgccattaaccagttcacccaggcttcgcactgccaaacagctactgactgcttacgcgggcccacaagcacagaccagagacaaaacaagagaagaagcagagactgttgtcctggactgagaagaaagctgctagcaaaggggatacccccatcgagacaccacccgtctttccagcaggggttaacacaatcaccaccttggtggagaacaagaagactcagctggtggtgattgcacacgatgcggatcccatcgagctggttgtcttcctgcctgccctgtgtcccaaaatgggggtcccttactgcattatcaagggtgaggtaagattgggatgtctagtccacaggaagacctgcacgacgttgccttcacacaggttcactaggaagacaaaggaggtgtggctaagttggtggcagttttcagaaccaattacatggacagatatgatgagattcgctgccaatggggaggcaatgtcctgggtcctaaatctgtgggtttgaatcaccaaagtggaaaagggaaaggtgaaagaagttgccactaaactgggttaaatgtacactgctgaattttctgtaaataaaaagaataaaaattctccttcaaaaaatgtaaaaataaaagcaaacccagcaaatccaatgcatgtcagtttggagatcaataaaggtggctggtattctttggaatataataagtttaactatctttttttaatttttttccttgagacggagtcttgctctgtcacccaggctggagtgcagtggggcgatctcggctcactgcaagctctgcctcccaagttcaccccatcctcctgccttagcctcccgagtagctgggactacatgcacccgccaccacgcccggctaatttttttgcatttttagtagagacgaggtttcaccgtgttagccaggatggtctcgatcgcctgacctcgtgatccgcccgcctcggcctcccaaagtgctaggattacaggcgtgtgccaaccgcgcccggccacctgacactgttaagataaactgtcgtatgcacctagttgcagggagggtttcaagtattaagggactaggagatgtatgtacctggaacctccagagccctccgatgtcatcagtcctttcaaagcagacaggttccaagccttcttctacgcagcacttgatggaagagagcccgctcactcctcccccaatcacagcaattcttttcttagtcatggtctcccgagatcttcacctgttagtgtcgcctgtcctaaagaaaggatgacaaaagacaaaaagcacacatcggttaacatttttcaaggaagaccttggccgtggcattcgaataaattctgtacaagaggtgtcttgaggaggacagattcgacggtcctcttcaccagaggaaatctttctgctggcatgggggagccctgcgcctgcaagacccagagctgagagtgctctgctgcggtaccggatctcaccgcctttcctgaagcgctcaacagatccttcagctgcgatctggaggagactcaacaggcggctgttgtcaaattactataaaccaacaacggacaaacagcgagagccaacggggaggggctgtagcactccacctcctttcagggaccactcccccgcccactcagcggcacccattctccctccctcgatgggaataaaacgtgggctgaagctgctttgggcgaaaaagttaatcctacaacttctctatatttcagctgctgttgccagcactctcaattactttctctgaaacccctagccccgtctgtgctcgcttctgcatccacttttaacttcctggtttttgccttaaagtgacaaacacttcctagtgaagggaaaactgtcaacaaccccaaagccagttctactccaaatgcttaaatgaacacctacctttcaggtgatctgttcaaacagattgtagcaggatgagccacagacaaaactcctcagacaccgaattaaagaaggaagaggtttttattcggccgggagcgtcggcagactcgcgtcttaagagccgagctccccgaaaaagaaatttttggcctttttaaaggcttacaactttaaggggtccacgtgaaagggtcgtgatacatcaaacaagagtgggaaacgtgactgggggctacaatgcttttttcatacagtgtcaggaattcacagataacacaagtagtttaggtcaggggttgatgttattattattactttttttaactcctagggccgggtggtggtgccaaggttgtctggcaatttatcttacttttttttttttccaactttttgctttttctctcctcctgtcttgtgaacgaggcaaggtggtgggaggagggcagcagtagtagcagtggtctccttccttaagatgatcctgcccccacttccgcccccggctcacctatacctctctcctcccctcctcacaatctggatctaagaatctacacttctggaagaaatttacttttaaatccccatgcactgagctgagtgctggagtatagtgaggaatgtattgtttcctactcagaggggcttacagattagtggaggagaccaaaacataaacaggtaattttaacgaaataaaagtatttttaatagtgctttcacacagttatattagtaaccaaaaatacaaaatatccacttctaaaatgtaacttttcaaatataaagtcatgtagaaccaccaatataacagatacaagatttcaggcactgggttagaacaagggcccatccagacaagggttctatttgacagatgtgaggggttgtaagaggcatggattgtggctcatgccttggatccttgctctccttctaccactccctgagtcaattttgctcttccaatctgcacctgctaatcttggactttttcatgagaggcaactgatattttgtttgtgccattgaattttttgttgtatttatagcaacttagcagactctaattaacattaatgtgttttggaactgtcgaacttttttttttttgaaacagggtctcactctggcacttgggctggagtgcagtggtgcaatcatggctcactgcagcctctatctcctgggctcaatctaccctcccacctcagccttctgagtagggactacagctgtgtgccaccacacctggtaatttttgtattttttgtagaaatgaggtttcactatgttgctcaagctggtcttgaactcctgggctcaagtgatccacctgccttggcctcccaaagtgctgggattacaggcatgagccaacaaggccagcctgtaaaatattttaaagactaatatctttcacaaaagcattcaactataaatgtgaatttatactaaaatagtatcttttaaaaataaaattctgaagacagtgtttcaacacaaccattttatatgctagaagttaacttaaaatgaattacttgtaaattggataattttgaatgcactagaagaaatgcctaaaggaaaacatgaatacttttataaactgagtattaatttcctcctactgaatcagttttacaaataatgcaagaattacttttaaaatgtagttaacaatgtaattttattttaatgtccccctacttcaattgtgtcttataattaattgcttttgaatatagcaaatatgttttgtgttgtattaaaattacttatacaatgttttaaaccttgactcaaatgttctctctcttgcctagctgacaatttgcaagtaagtcaatttcttcattgaaaaataacttgatacatccaaattaatatacagactca

SEQ ID NO: 780 - DNA, 4001 bp, Homo sapiens
aagaggaaatgtgggtctgatgtcatctgagagggaaactaaaggtatggaaggtaagagactaggggtggcctgggtaccctaccctggttacctatagccaatgcatgacatactcctgtgagcagtgggcatcttcctgagtgtcacccttggacagagaaaccttagaatctttcttggcctggaagagtcacatacagccctcacattgctgttgggcctactggggttggcaactgtaaacagaagaaagaaaggagtataaaagccaacatcatcagatccagtgaactgatgggaaagaccccaactatgacactcaacagagttacctcctgaccaccatccatcccagacctctctgtcccctcaaaacagtttccttgggcccacttcatcccatcagttcctaggttgcagaggagcaggcaccctggctcatccacaggcagcctcaggcctcagacaaagagccacagtgttttggagaagctgacccaactgcccactgcctgggcaagctggctggttcctggctctggccaggagagaagacgaatggagcggcccactgccaacagagcatttttccatgcacagccctgggctgttgcaggaccaaggtggctgtctggagggctggcacagtgagcctctgtctccgtttctccttctttcagactgggcaccttggcagacaagagccaccttccccttcagactcagctttctaggggctgtgcaccctgcccacttcagcctcttcttagagccatgggtgctgaaagggtttgatggggagcttatgcctctccttaccccatcccatctcttagcaatgttgcttcagggttgcatagtcttacactgtttcccataatgctagaggccctcctgtgctcagagtttctgtaaggtcgaaagtttccaggactgccacactatcagctgggggaagtttactcaggagctactgctgttctttcatttctccactctagagaaagatctctccctcctatcagtggagaaggtcaagccagaggccatcccctcacctggattgcatccccaccccaatccacagctccctggacatggccagttctcaatgcttctttttattctctcctttccactccaaacacacacacacacacacacacacacacattctacacaaaagtttccccctctcccataatagcatttatgtaccaaacccctctataagagagattgcagggacatccaggtcttggaatacccttcaaaatgcccacactcccagcatgatgggatttatgagtagcagggaagaagcttccctagacagagggtccttcactttttcatgcctgagaattggaggtcccctcagcacccataaaggaactgtaagagaaaggtacagggctggaacccctcccttatacaccctctctgccactctccagcatccctggggtcatggcccagatgtggagaaggaggaatgaaccctccctgcctccccatctcccctatcccctaccacttttcctttatttcttttaaggaactgctagggacaaacccgaagtaaaacgactatacttacctcaagttgaacttttcagagagtgaccacgtccctctgtctggcctccttgggttggagaacgtgtgagagaggaagagagagaggagtgaaagagtctactgagagtgtgcgtgcctgtgccagaccagggtcccgccccaaattcctaatcaaatattgtgaaaaggggctgaggaacccggatcctggtttttttcagctctgctgcaggggcggagttcacgctcaaccacgcaaatccttcggtccgcctgacgctataaaaaccaccttttttccactcacttatcttccctgaaacattggcagccctgggtccctttctgctgaatgagttagtggcgccctagaagttatttgtacagtctcttatgaagcgcctggatttctcattaaagccacaaaggcagatgcagggatggggagggccagggtttggtaagagacatcttaactccttcagcaacccacatgtccctccagagagcgagaactcgcgcttctcagctccccctatagacaggtcatcaggctagtggataagggagcatgaatgacaagggacagccggctctggttccagttctatccctaagcagtgtagacttttctaggctacaggtcctgcccacctccaccactggaacaaaaggaaaggcagggactccagcatttgctgatcactgcttatgcactagcatcatccacttccacttaatgctcacaacaaattcagagttaataacacttaccttgctgggttgtagcaaggactgtatcaggtgatgtgtgggaggctcctgacctggcacatagctgaggttcactgtgtcctacccatttcacagccatagaattcctcagccagggaaagacaagatcagaaagctgggcaggagctgtaccatgaaaggacttttgggcgatggaagtgatttggtttttattctaaatgtttttgttgttgttgttgttgtttgtttgtttgagaaggagtctcagctgggcgtggtggctcatgcctgtaatcccagcactttgggaggccgaggcaggaggatcatgaggtcaggagatcgaaaaggagtctcgctgtgtcgcccaggctggagtgcagtggcacaatctctgctttctgcaacctccgcctcccaggttcaagccgttctcctgcctcagcctcctgggtagctgggactacaggcacacgccaccacgcccagctaattttttgtatttttagtagagacagggtttcatcatattggtcaggctggtcttgaactcctaaacacaggtgatccacccacctcagtgccccaaagtgctgggattacaggcgtgcgtcatccggtccggcctattctaaatgtttaaaaaaaaaaacatgtttcaagcaggagaagccatgggatctgatttgcatgggatctaatttacattttaaaagcatgtaggaggggctgctgtatggagaaggggaggccagggtggaagcagggaggctccaacccagcctcaaggagaggtaatggcagattggactggtgcaatggaagagaagatcttatattttagacagagaactgacaagtcttgcagagttaggaaaagtcaaggatgattcctagaattttagtttgagcaactgggtaggtggtggtaacatttcttgacatgggaaaggtgacgtgggactgagttgggtagaaaaccaaagttacattttggatatgctgttagagatgcctgctaggcattcccctggagatgcacgtagaccgttggacatatgaatctgaatctggagtttaggggctggaagaaaacatttgagaaccattataatgtgggtcacacagaatctcaatagcttagataaactcatgtgtcctaaatgttctctcctcaagtatgttaactggcttatgccaacatcaaagaaacacctttatcttaaaaaaataccaactgagaaaccctgagatgacttgaatttgaagaatttagaagtgtcgaggcagatggtccttttggtttctccaataggtttgagcttttgacttagcgtgtgggctgtcagaaagggccttgtcagggacccattctcagaatttaagaagagatttcaaaaagatgaaacctaatgaatgagccttttctgaccacctactatagactaggtggtttacttatgttatcaaagataacagtagatattttgcattggaattagtgtttttttttcaaagctacttttaatactttggggtgagccccacaggaataaaaaaacactgggaaggggtaacctcccacccgccacttccaggaggggccagggggagagaggctacgtgaggggaaggaagcacaaaagggacccgctgcagac

SEQ ID NO: 781 - DNA, 4001 bp, Homo sapiens
tccttaaaactgttattctttagtgtgatacaaagtgaattttttaaaaatcttaagagttaaatctaaataacatgcctccactgttttcctatgtttactttttagaagtattctacttacattttagtttcctttgaagcacaagtcatttaagtaggcaaaagttaaaatattttgtaattataaaaacgaatgaatgcactctggtaggcatgaaaaaaataaaaaatttaaaaatttaaaataaaactatacccatttcctttcattgataattcactataatcaattatagaatgcacaaagtgtaagggaaaaaggccaataatgcctgagaaactaaccaatgtaaaagaattaaactttatgtaattcatttaccatgcaatcctccccaatataagaacaattaatgctatctaagaaacggaatgaaggggctcctaaggtattttctcttgggtggtgtgttttcagactgggtaagcacttgtacagaatgttgcacaagagattcctggctggctaagtaaagcattcactagatggactctaaagtctcacagttctaagattcccaatctatgagtagacgtgaaaaataagaaaacattttgcctttcaattaacccattggctttcactcccaccctagctgggcacacacatactcaaaagttatttctcccctttctctgcagtgatttcacgagatcctcgcgaacaaaaggcacggaaaacaggcacaggtggaataaaaaggggagtggctgaggccaggcggctctcgggacagcgcccccacgcccccagttctcccggccgcacctgagaaatcactgccctccgcacctgagaaatcactgccctccacacctcgacccttccgcgccggcgccaggagcaaattctccgacctattaccctccgcccgtaccttggccagacactgggcattgtctggagcctcctgtgccaaagaaaggcaaggaggaaaggaaaggagagaacgaaggagaaagaacaagtgagaataaagaacggaaagggaagtaaagcaacagggagaccgtacgctccttttggtaaaattagcttcctcatcgatcactcgatttaattcagcccccaaaaccaacccaccagcccaaaggctgcagccgggggtggccaaaccggagtccctcgaagctgtgcccgcccgaagcactgaggcagggagagagaaatgtgcgtgtgggctgggcctggctggcccgaggccgggctccgaacaaagccgcctgggtccccatacctggggcgagggctctgggcggcgccgccccagacgggcgacgccctagccccgcggacctggcccgggcgaggaatcgcggccggtcccctccccgccctcgaacagcgccccttggggacaatgggccccctcccccgcctccgggaggagagatacaaaggaagagaggagccgccgggcgcgaagccaggcgtcgggaaaagtgaaggtggaggagggagaaggaacaagaggggatcacggcgcacgcaggagcccgcgggctgctcccccggccgtcccgggcgccgcccgagctgcaccacggcggcaaaggcgggagcacggactagcggccccctagacccccggccgagaagggaagaggagtctgcacacaaagacgagcgggaccctcaccctccgccagcgccggaccgaggacggcggagcgcgctttcaccgccgagggtccgcggcgcccgcccaacccgcgcttctcaggggccggggtccgtgcggggcgcccctctccccgactcacccacagctccgtgccccagctcatggcggaactttctggccgtctggcggtgccgctgtccttcagtctgtcggctccacagtctgtccgacctctcactcgctggccggcgggctagcagctcagcgggtctacctcgaaaggtgccgccaccgccgggctccccagtgagtgagaaagacgcgactggagaagcctccgccgccgacgcgtccccgcctccccgcgctgggcgggagggggccggggccgaggggaggcggaacgcggcgcggggagggggcggggcgcagtgcatcctgggatcggggaggacctgggctagcctggccaccgccggcggggtccccaagcgggcacctggtcaccctcgctggcccctctcgctggtcgagtctcctcctgcaggtaccccggagcttggactgcccccactccgctgccagtcggacccctgtttccaagatagaaagggagagaagggaaaagacccccaccgccgctattatctcattcctcctctgcgctgagcccctttacatgaggcaattttagttacctgcctttcctgcctcttgtctcctccactcgggagaaaccttgacagggaagcgtcatccaaatcctagagtttagactgaggagagttgtgttttatttttttaaatcttgatgcttaaggtgatctctcctttcaagcctgatgctttggcatgacgattcttgggaaccaccaaaatgtgcacaggttgaacagcaaatgtgaaggcaacatgtccccgattctgtctttaattaaatattttaattttataaattctgtcaggaaattataaaaagaggcagctcttccagtaatcatttaggtatgttgccagcgcacgagatggaagacgtggacaaatgtgagccgagctgtcacctgcggaagatgagaaggcagcttgccccatgtctggaatgggcacctcgtgggtgagggttggatgggagccagatttttctctggtagtgtaaacagcttattcggaacttcagatctctttcacctcccagtatcggaaccttggaggcaggtccactacttccttttttctctatggagctacttcctggcctatctccatggaaaggctgttagctagtttggctggtgctactagatatcaagtacgctgagcaactccctaacatatgctttagtattaatagcttgtctcctaaagcaagcaagcgcacacacacacacttcaaaacagtcaactagtagagtactcctcagtgcgtcatgacagctgggtgttttaggaagctctcccaacgggttctttgtcagcattgaaactcctcccctacctggcctggacaggtgttccaacctcttccgcttaatccgtattcttttgcctagctgcgctccctcttggagttgaggccaacagcctgagttcgcctgacagtccagttgctaatcttcctaaattctctgctgtccttttctgaggccactttaagcatacaaatgccctcttccaagtgggttatagccaatttttaaatgcttaactttgtaccatgcagtgaaaagcctgtgaaggattgaacaacactttctaacatttttctacattgcctctattccaaaataatttcttcgtttatttatgtcacctaacactgttaaccgcctctcccatcacttcctatcactccctagaatcatgaatgtattttgcaattgcaagtaacattaattagtaaggggaaatggatttttttttttttgagacggcgtttcactcttgtcacccagcctggagtgcagtggcgcgatctcggctcactgcaacctccaccccccaggttcaagcaattctcctgcctcaacctcccgagtagctaggattacaggcgcctgccaccacgcccagctaaattttgtgtttttagtggagataggttttcaccatgttggccggtctggtctcgaactcctgatctcaagtgatctgcccccctcagcctctcaaagtgctgggattataggcgtgagccactgcgcccagctgggaaatggatttattaaatgggtgtcattatttagcaccacagcaataccaagatttattatatctaagtattgtcataaaagctaagacctatagaatataattt

SEQ ID NO: 782 - DNA, 4001 bp, Homo sapiens
cactcctacccccatctgccactactgtcttgatgtgtccttccctcctaaggacagtggagcattacctgctgggagatggcaaatccgatgacaacctcatcctccagaacatcccagctcaccactgcagagttggccttgaggtgcctgacggtgacgttcactggggctgagggactgtctgggggacggggaggcacctaagcctgagcatcccctattgtgaggcccagacccactgtctcataagtaagaaggggaaacctggggaaggccatgcaggaggggaaggaagaaactaaggcctcaagtggggtccagtgacatggctctcagctcttcagtgggttgaagaaccaagcccaagaggccccaggctcctcatgactgggacggaagcccctgctggccacaggccggccccatgaggggtccaaggctcaaagtgatgggcctgggccggggccctatctaagggatgggtggttagagttgtggagagagttatgtaggggacataggtggacagaaactgaaggttagctgatgaaaagcagacaaaaggactccccagtccagtgctcttttgacaatactgccctgtccaatgagtgaccttgcgcgaaggagaaagacccagagatcgagaagtgtcaggctggggtgagccctggactgggagtgaggagaacagaagtatcctcagagctgtggtggcccaggcagaataaagcctgcggaagagtctgtgtgagcctcttatccatgctcttccagccccaagatgcaggtggggaggtggcaggggaagatggggtcactcagagcagggcccctccatggcgagtggagaggagagaacaggtaggggaagaggatgaatgaggaatcactccagaagagacaggagggaagtgggggtgagagtgatagggatagtgggggtcagtgaggaaaaccgtccaggagaggggcagtgcagtcacataaggctcagtatcttccaaggggcaggtgcagcacggggcagagctgcgcctgagcagcacccctcaccccacagagagtgaacttgagacccagggggctgggcctgggacctgagggagacagagccagacatggagggggaggtggagagacaggacacagacaggtggtggcagacacagaaccagaggacagagaagtggggcatctgagaaagacagctgcgagagagcgctccccgagccacggagggagagatgagccgggcagcggcagccaggagggacaaagacagagtggcaggagaggctgggcaaggacgggccggccccatggggcaggccagacactgtaccagatcaggggtgccggggcccaccccacgccctgcgccctcaggtgccagcccccatccccttcacacgtgctcctgcacagcgggaccccatctgcccctgcagagttggcttgcagggctttgagaggtcctggggacacagagagaggcccaggtgggggaactggtgtcctcagctgctccctgggtcaaagaagggagctagggaagctgaggcaaagacctggggttaggggaatgggattaggggactggggaccacaagaccctaggaaacccagggctgaggtgacaggggagatttggaaactgaaggacaggtctgggggtcaaggaggtaggaagacgctgggggctgggttaggggagcagtgtttgggccgagacaggagtccctagggggcagagaaaggaccaggggactcccaggtagctgggctcgagaggagcctgccccggcgccggccccccgccccgggcccccttacccgcctgcaccagcgcgaagcagacgcagcccagccacaggcggagcgcggcgcgggcgcggggcggccaggcgctcggcgacccggggtgtatggtggctcctccggccggcaggcccggggcggcgcagggggacgcggctccggcgcccggcggccgctcgcgctcgcgctccggcccccggcccggccggcccggccgctccggccgccctgcgccgccccgagccgcctgcatgtcggctccgcggacagcgactcccgcgcggcggcggtggcggcggccgcgtccacgtcgggcgcccggggggcggggcgcccccgctgcggggagaggtgcgggggcggggtgaggaccggagggcgcccccactcccgcccccgctgcctattaggtcctctgccggggaggaaggggcttcgcggacccacggctcccgccctctcaccgagcgggagcccagcggggttctccgcgcccccgccgcggtcactctctctcccgtgcacagccctgacttggctgccgctttctgccctttcccagggtagagagaggacaagtgccaccgagatgcccgtttgtgcccccacccctaagcgcgcctcccttccctgggcctagggatcccctcattccacggtagacccgaggccttgcggctggggcagacgggagcagaggggagagatcacagtaaggctggggtgagcagagagtgctaagtggacactagggctccgtgtttccagtggggttgggaagaggctgctctgtctcactggagagtccagctctgtgaccccaggccagtccttttccttcattttcatccccatagtgagggcagtaatgagcgtctaccaggggccagatactatgctgagctttctttgcattatgtggcttaattctcagggcaaccctgtaaagtcatactctgcacactttgcacaggaggagcctgcagcttggacaggctacttgacttgtccagggacccgcagcagagccaggatttgaacacaggctgatctgactcccaaagctgtgcttaactgaactgtctccccacccagagtgacttcacccatccggagattcgtgagactctagaattggccggggccagctcctccccagccagaaaacagtctgcagcaatctctaagagcatctctgagaaggggagtggctccagcccccttccctcatctcagccagagaaacaaggtggaggagagaggcatggaccagggctcagggccttttgtctcagcaagaacccctgagccccctcccacgactatccgaaattccactactagcggggcattcctttgggtcttaaaggttttccagaagccctggaagggctaattttctttggaaaggagacgtcttgcaaagttctgccacagaaacgtcttcagggtcttcctctccatccccctggttttacattaaggaagtgaggtctaccgatgggaagagcttggtgcagattcacacagtgggtcaagaggagcgatagacaaccctcctctccttatgcccacccaggactccttcgctggccctgtgttcctccttggtcaccttggaaggggtgagatggaagcgagcttaggggctcttgttgagcagcagaattttcctgcccatcccctcagtgcccccagacctgccccactcggcagggtgacactgcccagccctatcatttcccccgccacataccttgtcctgggagagcctcagctgggacctcgacccgtttgggagaagagccccggagccagagcacctctctctctcttttctctttgctctctttctctttctctccccttattatcttctctctctttctccccgcagctgctgcctgccccaccccacccggccccgccccaccagctgcagcttagcccctagggaccccccaccccccatccatcagacaggaagacaaccaggaggcccgcaggagcaactggagcctcttcaggcctccagcacaggaaccagcaggaaggagagggttcagttagaggacacagaatctactcccgtccctgcaggggagaaaaggagggagggtcctggtggggtcttggcctccagtccagcgctggggaaaggggaaccttggcgccat

SEQ ID NO: 783 - DNA, 4001 bp, Homo sapiens
gtcaaggaggtaggaagacgctgggggctgggttaggggagcagtgtttgggccgagacaggagtccctagggggcagagaaaggaccaggggactcccaggtagctgggctcgagaggagcctgccccggcgccggccccccgccccgggcccccttacccgcctgcaccagcgcgaagcagacgcagcccagccacaggcggagcgcggcgcgggcgcggggcggccaggcgctcggcgacccggggtgtatggtggctcctccggccggcaggcccggggcggcgcagggggacgcggctccggcgcccggcggccgctcgcgctcgcgctccggcccccggcccggccggcccggccgctccggccgccctgcgccgccccgagccgcctgcatgtcggctccgcggacagcgactcccgcgcggcggcggtggcggcggccgcgtccacgtcgggcgcccggggggcggggcgcccccgctgcggggagaggtgcgggggcggggtgaggaccggagggcgcccccactcccgcccccgctgcctattaggtcctctgccggggaggaaggggcttcgcggacccacggctcccgccctctcaccgagcgggagcccagcggggttctccgcgcccccgccgcggtcactctctctcccgtgcacagccctgacttggctgccgctttctgccctttcccagggtagagagaggacaagtgccaccgagatgcccgtttgtgcccccacccctaagcgcgcctcccttccctgggcctagggatcccctcattccacggtagacccgaggccttgcggctggggcagacgggagcagaggggagagatcacagtaaggctggggtgagcagagagtgctaagtggacactagggctccgtgtttccagtggggttgggaagaggctgctctgtctcactggagagtccagctctgtgaccccaggccagtccttttccttcattttcatccccatagtgagggcagtaatgagcgtctaccaggggccagatactatgctgagctttctttgcattatgtggcttaattctcagggcaaccctgtaaagtcatactctgcacactttgcacaggaggagcctgcagcttggacaggctacttgacttgtccagggacccgcagcagagccaggatttgaacacaggctgatctgactcccaaagctgtgcttaactgaactgtctccccacccagagtgacttcacccatccggagattcgtgagactctagaattggccggggccagctcctccccagccagaaaacagtctgcagcaatctctaagagcatctctgagaaggggagtggctccagcccccttccctcatctcagccagagaaacaaggtggaggagagaggcatggaccagggctcagggccttttgtctcagcaagaacccctgagccccctcccacgactatccgaaattccactactagcggggcattcctttgggtcttaaaggttttccagaagccctggaagggctaattttctttggaaaggagacgtcttgcaaagttctgccacagaaacgtcttcagggtcttcctctccatccccctggttttacattaaggaagtgaggtctaccgatgggaagagcttggtgcagattcacacagtgggtcaagaggagcgatagacaaccctcctctccttatgcccacccaggactccttcgctggccctgtgttcctccttggtcaccttggaaggggtgagatggaagcgagcttaggggctcttgttgagcagcagaattttcctgcccatcccctcagtgcccccagacctgccccactcggcagggtgacactgcccagccctatcatttcccccgccacataccttgtcctgggagagcctcagctgggacctcgacccgtttgggagaagagccccggagccagagcacctctctctctcttttctctttgctctctttctctttctctccccttattatcttctctctctttctccccgcagctgctgcctgccccaccccacccggccccgccccaccagctgcagcttagcccctagggaccccccaccccccatccatcagacaggaagacaaccaggaggcccgcaggagcaactggagcctcttcaggcctccagcacaggaaccagcaggaaggagagggttcagttagaggacacagaatctactcccgtccctgcaggggagaaaaggagggagggtcctggtggggtcttggcctccagtccagcgctggggaaaggggaaccttggcgccatctgctggcctctttgggtaaaacctagatagatgtagggcattgggagggaggagatggcagtgcctgagggcttgagagagaaggcggctgaaggagggggcttggaggatttggagagttgtgactgtgggggtacagccttctcagtcctcatgatgcatggggtgcttgggccttaattctggggaaagccctggtgcctggaatctggcagccagtgagagctggctgggaggatttagtggagccctgggtgaacttgggagggagctgtcagaagcagccactgcaggccagggcgctggctcacgcctgtaatcccagcactgtgggagtccgaggtgggtggatcacctgaggtcaggagttcgagaccagcctggccaacatggtgaaaccccgtctctactaaaaatacaaaattagccgggcatggtggtgtgtgcctgtaatcccagctactctggaggctgaggcatgagaatcatttgaacctgggatgcagaggtttcagtgagctgagcacaccactgcattccagcctgggtgacagagaaagactccatctcaaaaaaacccagccactttatgtaccccatcccttagcgcaaggcttacgatgcagttggggctcattaaatgattgttgactgtatggaaaaaaaatcattcttccatcatatgtttattgagcacctattatggaccaggccctgtgtaatattctggaaacacagcagtgaaagaatgagtgaaaccatgaggacctgggtagggactaagggtgcgcctctgtcctcccaagctgcactcactgggcttcatttggaggactccacagagacccccttgagggctggccggtcacttacacattgacacctaatggggtcaccagcatttggaccctcctgcgtgtccagagtctcagcacctaactcaggctgcaggtgcccaagccagccccgggtacccatttagaataggaagtttcctttttatagcctaggatggtcatggccccagtcaaggatggtcactagacacccctcacccgccctgcaaatcacaggaagaatcaggaggtcaggagttgctttggggatataataattgagcacctactttatccatgttattgttttattttattttgagacggagtttcattcttttgcccaggctggagtgcagtggcgtgatcttggcttgctgcaatctctgctccccaggttcaagtgattgtcctgcctcagcctcctgagtagctgggactacaggtgcccaccaccatgcctggctaatttttttatttttagtagagacggggtttcatcatgttggccaggctggtctcgaactcctgatctcaggtgatccacccacctcagcctcctaaagtgctgggattacaggcgtgagccaccgcgcccggactttatccatgttattttgagtcttaggctggtatgtgtcattaacttccattccatatcaggaagctgaggatcagagaggtaaggggacttgccctgtgtcacacagccagtgaactatagagacatgtctcaaattaaattatgcggctgcaagttgagggcttgatccagtctgcctaccgtatcccctcacctctaaggacctctgaggacaaggatccagggctcagggctcacc

SEQ ID NO: 784 - DNA, 4001 bp, Homo sapiens
agttagattctgtccacccaaagtcgacttatttaagaagccggccgggcgcggtggctcacgcttgtaatcccagcactttgggaggccgaggcgggcggatcatgaggtcaggtgatcgagaccacggtgaaaccctgtctctactaaaaatacaaaaaattagccgggggtagtggcgggtgcctgtagtcccagctgctcggagaggctgaggcaggagaatggcctgaacctgggaggcagagcttgcagtgaaccgagattgcaccactgcactccagcctgggcgacagagactctgtctcaaaaaaaaaaaaaaaaaaaaatgccactttgtatatggccaagcagaccctcctatagtttcctggctaatcctaaagatctctcaagaataagacaagtaaataagaataaagcaagaggtggggtgttgctatgttgcccaggctggtcttgaaatcctgggctcaagcaatcctcccatcttggcttcccaaagtgctgagattataggcgtgagccttggtacctggccaggaaatagaaatttttaaaaacttactgtatatgcatgaattttatgaaatttcatggctcagacatgtatctgtatcaaattttttaactgtcttaatttcacttccttttctgtggtgtagacaaaataataaataaaaatttttctaatttatgttgaatcactatgagaatttatcggtgatatggttgatattatgtggttcctacagataagttaaccctcctaaaaataaatttccattccaggtacttagatttctagcacaaatgagctaggaggggcctctagataaattatttttgccttcggttatctactcaagaaagatggagatcaactatttttaaaagagggtcccctttcagccctgagtgactattgtctatatttcaaatatgcaatattagaagtataaagttctttttaaagtagggaatattgacaatttaatcaaatataacatttctcattttccctctaattccccggaagataaacaagaacatttgtataaattagactctgtacaatatcttaactggaatgatgatcattgtaatatttcacacatggctaaccgtatatgagaaaatgcatgcctacatggctctgtacattatagtcctcagcaagaacactttatgaagatttgtctttcgagttcaatccatttatttgtcttaccagttattgtctccccaggacccaatagagtgcttagcacccagtgtgagtgctcagaaaatattgaatttttttttctcatatagcctttagatttcagggtagcccgtgaattaacaatggaaattaaaatcaaatacgagaaggaaaaacttgcaggtcagaaaattgtacctgattttgctgaagcaacctgaaaaggaaagtttggaaaattagaaccacacagaaaaacacaacttgaacaaacgtaaaacatgaataaaagcggtaataaattaatcacaacatttttacatctaacgtgagcagtctttcaatccatacaagtatttctccacacaaatcatttcccagcacccaaatctaccacaaaacaactctaaatagaatttagaggctggaggcagatcccattactatttcatttttttcccctttgaatctgcctattgaactaagtcagtagctgctgacagatttttcagaaatctttgttcttaaaatataatgataatcttgttttctttctctagtatatggcattaaatttcaaacacgcaaacatatacaacctcggtacaaaccaaagtattctgatttctatctccctattccccaactcctcaaaaaaaaaaggagagaaaaataatgtgtctttcttttttcccctaaatagttgtgggtagttggaatgatgaactcaccattttaagacagataagaatgaatccaatcaaaggcaaacatgtctctcgtccaccagccatcctgttggacatagtactcacatggcacaaaacaaagcaatccgggtcctctttggcccccaggagtataacaccgttggtcgctgggatgtagggctgtgatgctgggaagagaccctaggaagtagctcctccccttcagtgtggagctgacctgtaaccaggggcacttggagaccggcagggacaggtattgcaaagactgaaaagaagaagagagttggagaaagccacggcaagcgggccaaaaagctactgtaaccttggtttcaaagcaaccttctttttaaaacaatttctgtctaaataaaaattttagaaagctgcacagaaagttgttgatgtggtagaataattattttgaactcggggatgctgaccagttttatttttctttttcacctttatttgttgttgttcttttagttcaaagtaagtgattggtcctactgtcaggaagaatttgttgcaaaacttcaacatggaatatgaaagggcaggagcatgtccctgtactgagaaagatagtgagaggtccctggtgagcacattaaatttatccatcccccgtaccaccctgcagttccagtacctttttttttttttcatttttttagagacagggtcttgctattttgccaagcagcctccaactcctgggctcaagcaatcctcccacctctgcctcctgagtagctgagactacaggcatgcaccactgcgcctggctagttccttttatttccggagctgtcttcctagttcacactcttaataataattagcatttaatttaagaattacaatgtataattttaacaatgaacagatacataaatgaataataaacataattaattggcttatctgaaatcacacaagaattaaatgatcaaactagagttaaaacgcatcagtctgatttctactttcaaccaagataggattacaaaaaagggaaaagaactgcatttaccgtccctgactttaagatttaccataaagctaaaataaaatagagaccgggtggtattggcatgaagatagataaatagatcaatgggacagagagtccaaaaataaacccacgcatatatagataattgattttcaacaaagatacaaggcaatccaaaggagaaagaatagacttttcaacagatggtgctggaacaactggataaccatatgcagaaaacataaactttggttcatacctcacaccacattaaaaaatgaactcaaaatggatcatagatctaaatgtagcacctgaaactataaaatgtccagaaaaaaaaacacaagagaatatctttgtgactttgggttaggcaaagatttcttatatacaacactaaaagtataatccatttttaaaatttgataaatttgacttcattaaaatgaagaatatctgcactattaagggaatgaaaagataagccacagactgcgggaaaatatatatcttataaaggacttgtattctgtgtgtgtgtattctcaaaacccagtaataggaaaacaactcaatacaaaatgggcaaaagatatgaacaaacactttacaaaagaagacatactcgtggaaaataaaggcatggaaaaaatcctcagcatcactagtcattagcagaatgcagaaaaggtttttttttttttttttggagacggggtctcattctgtcatccaacctggaatgtagtggcgcaatcacacctcactgcagtcttgacctcccaggctctaatgatcctcccacttcagcctcctgagtagctgggaccacaggtgtgcagcactacacctggctaatttttgtattatttgtagagatggggtttcaccatgttgcccaggctggtctcaaactcctgggctcaagccatctgcccaccttggcctcccaaagtgctgggattataagcgtgagccattgcgctgggcccacagaatgcaaattaaaaccacagtgagatacatacttattggatgt

SEQ ID NO: 785 - DNA, 4001 bp, Homo sapiens
tgaggcaggcagggaggggtgtcccccggctccgcagcgccccctggcggcccagctcggccgcgctcaccttccagggcacgacccgccggcggcccccgccactaccccgggaatccgagctgggacccgccgctggggcgcaacggaaggagctgaggctttcccttacctgggcgggcctcagcccctagtcccctcggggtggcagtggttggtggtgggggattgtccctcccgcctagcggctgcctaaggcggaagagctgcgggctagggcggagctccctgggcggggtggggcgaggcgacaggggcgggcgtagcgcctccgctgagggacccggcgggaacaaaccgccgccgcggcgggagctgggctcgagtggccggaggcgggcccttgtcttcgccgccgctcctgcaccctgtgctccctgaagccgccgccttcagaacgctcagcccctggatgttaaggctcactcgggcgccagccgcagccagggaagtggcggcggtccccacccgtcctctccccaaggcggcgcccgggccaccgggccgaagcgcagtgggagcgcgaggctgagacgccgggacccacgccgccccagcgcggcccgccggcgcccacccgagcccgcacggcttccagcccgaggggagacgcattcgagtgatcaccaggagcgaacttggcgcccgcagccttgggcctgggagaggtgagattgcggcggcgccctctcctccctccgctgtcgggcccgccacccctctccgcgcggagaggccgggcagagcgccggccgctgtggccgcgttcccggggcgcgggccggtctactgctccgagtttgcctgttctccgaccctctggatctcggcatccgtttgtctcagtctctgtgactatctcactctccgtgagtctctgtggaaacggcatttgtctggatgtctgttcatgggtctgggaatccgcttaatttctccctcccctctccctggccccagttgccctgaggactggacaccccccaccttcctggctcccagggttctgggccccaccgacaggcggcaggacctcctccgccccctgcccgacaccccctcagtgaaccctgacctccaccaagtgttgccttcatctctcaaaagtcttgtgcaactaaggttggccctgtgccttgtttctcgctagccgggttcctgcccatcctattagacctctttctcccccggcctccctccaggacccagaaacaagcagcttcaacacagattgggcccatttcagcctctggggcacggaaggggagatgggcgctggacgtgagcaggaactgagcggatgcctgggctgctgccccgacagcgccgcacagtggctaaagctcgggcgtgcgaggccggaatcccagctgcctccgctgtagcaaggctgtgtgaccctcattaggtgacttccccgcttcggagcctcagtttcctggtctgcatagtagttaagagcagcgaccttaagtcaggctcctggggttccaatcctgccttcactacttaccctatctgtcaccttgggcaaggttctttgcgctttgtttctgcctttgtaaaaatgaggctagtaacacctacctcagaactgatgtataagtgtagccatattctaggccatttaggaaagggtactgagaacactttgcagtttcatctaacagcagcctccaatctacgggatagcctggtgttaatccaactctcccattccacagatggagctacagaggcccaggatagggagaaagaactcacccaggctcctgcaaagaaatagaacagagttgggttgcaacccttttcacagaatcctcaaaatagagttcttcatccccccaaggtaagggcagaaaaaaatggaaggcaggtctgactactcatgtcctttgagaggaagtcgcctgggccccctctgggacctctgaccaaggggatccatttaatgtgctgttccagcataaactgtcattggaaaaaagagaaatctcgtcctcaaaccatggacagcaaattggacagggactagtagccctggaattggaatttcctgggtgacagactgtccggggaaaaaggtcttggagagaagcttcttgcatgagtccaaggaaactcacatacctagggttgctagatttagcagatttattttatctggcaaccctacacatacctcaagcttgctcttgactacatggatatctgtctcacactcccagaaccccactcacagataccccacaccatggaccacacaccaactccaacccagctcaactctgctagtatctaaacaagtggagagaaaaacagtgttggcgtcatcctactccatttcaccttctgaatgtcctcatttcttttttttcttttcttttttttttttttttttttttttgactgagtttcgctcttgttgcccccctgctggagtaaaatggcctgatctcagcagctcaccacaacctcagcctcccaggttcaaatgattctcctgcctcagcctcccaaatagctgggattacaggcaggcaccaacatgcccggctaattttgtgtttttagtagagaggaggtttctccatgttggtcaggctggtctcaaactccctacctcaggtgatccacccgcctcggcctcccaaagtgctgggactacaggcgtgagccaccctgcccggcctgaatgtcctcgtttctaaaacagcaaatgggaaccagtagcttccttccttgccagcactcccctggctccccaggctttggtcagggtgagactagccagggcacttgctgcccaaatttcctgcttcagagaagttctaccaagcagctacagcagccagcccttgcctctgcctggccttgctgcacgttcactgctactgagacctacactggggaaggggagtacagaatccccagcttctgctctgcagggttggggagggagaatccagacccttcacatacatactttttacaggagcggaaactgaggtccaggagatcatgttacttgtcaggcttttgaggggcgctaagctgggttggacctacgtgtccgggttcctagcccagaacccctctgtttatccaaatagctgtttctctaaccgagctcctctctgtatagagggatttctagtagcctctcctcccttccaaggttctgggccagtttgttttcaacagtgtcaggagtaagtgcactggggactgggagaagggccaccgcgggattcggaatttatttcgttttctttgcttcttctgtgacccttacttctttcgcctaccggctcagcctgttcggcgtcttgcagcagtgcctgcgatcccgcgtgagtccgtcgctccctccgcgaaaacctggactctttcccagaagccttgggctccagcaccatgcctgctgcagccgccaaagagcgggaagccacaggctctgcgggtcttggttacagcgtctctggtcgtgccgggcctccttctgcatctgttccacggcccggccatctccctcgtgcagcccagaacaattgggaggaagcgttggcgggcggagggggatgcctgttgggcttttccactagttactgagtgttttttgcgaagagtacgttgctatcagtggcgtccgggtcgtctctccctctcttccttttggtccccataaatgagctgttctcggctctgggaaagaaaagccctccagcgattatgcggatctaattaagtcaatcaggaaactgccggagagcggcactggcttgaagcggagtttgtcctgaggcacagcggaacgattgcacgcggcccttttcagcggttcgagctcggccagcgccgggctgcaaacggaagcctgagctgggcttggggaactacgcccgcagatttctctaattttattcacaaaactggacacc

SEQ ID NO: 786 - DNA, 4001 bp, Homo sapiens
tattcattcatatataaacagacttttataatagaatgacactttttgcctttttgaaaattttttatatttaaaatctcccaacgtctctatacattcttttctcagataaaacttcggagagtgaaccttcaaaaaaaatgaaagttcagagctctaaatctacggaatttgttttttcttaaaaaaataaaaaccccaaaaggaaagtcaataatttttttacaaatatatacaaagaatttccctcccatccccacggtactaagagcaggcgccgtcggggtgcatttttggaaaattcggttttcggttttacctgtatggaaagctatccccggcgggcgcgcggtgagtttgctcgaccagcttaggtgtgcgcgaggggatggaggccgcggaaggtaggcgttgggggctcaggggaaaggaaattggggagaggcagagtccaggattgggcagcgggaccgggaccgggcttgggacagggcgcgcagcctggaggtgcatttgttgctcgaggccgccgccggaccctgggtcccggccattggcgcgtccctattgcgccggccatttggcttgagcggcggccgcagcagcggcggcggccgaggctgcgggctgcagaaactgtccggagagtggcacgctaagaatgggcgcgatggtggcagtcgtccggctcagcgacagcggttggtgggtggccatgagcgctgccgactgcacggtcccgggtggccgcagaaacgactgcgccgtgctgccgccccctgaacccccagtgccgccggcgaccccagcgcccaccgccgagcccccaggagccgcggggcccccacctatgatgttctcgatgctgaacgacggccgcgcgcttggctcggacttgatgagcgacgcggtggtgcccgcggcgcccgctgtgcccgcagcggccgcggcggcgcccaggctattgagctgcagctgcaggcccgggccgagctgtgagccgaaggcggccgctttgcggcccagctcgcccgagggcagcagcggcacagcgggaggcagcaccggtgccaccggcggcagcgcgtacgggtactggagcgccgccgcagcagccgcggccgccgccgctgccgggtgcgaataggcaccggccgccgccgcagggtgcaggccgtaggggcggccgtagggtcccgcggcgccggccgccgccgccaggctgtaagcgccgaagctctgcatcatgagcgccgtctgctcgcgcaggtgctcctgctggtggcgcttgaagcgtttccggcgccgcaggaagctgccgttgtcgaacatgtcctcggactgcgggtccagggtccagtagttgcccttgcccgggttgcccggctcgcgggggatcttgacgaagcagtcgttgagtgagaggttgtggcggatgctgttctgccaggcggggaacttctccctgtagtaggggaagcggttgctgatgaactcgcagatgccgctcagggtcagcttcttctgcgggctctgcaggatggccatggtgatgagcgcgatgtacgagtaaggcggcttcactaggctgttcttgggcttgctcggggccaggcctcccgccgaaccgctgcccgcgccaggcccgccgccgctcgcgccgccctcctcgccgccaacaccgcccttgcagccgtccgcctccggcgcgcccacgtcgccccccggtccggccccggctccggccgcctccttgggcaatgtcaggggctgctggtggggcggctgaggctgtccgtgatggggtgccgccgggggcacctcgtccgcctcgtccaggcgcagctccggcggccccgcggggctatcgcaacctgcgtcgctgtccttctcttccagcccgtcgtcgccctcgcccaccacatcgatgtccacgtcctcggccgtcagcaccgtctggccggacatgtcgctggcgctgccgccgccggagagggtcatccctcctcggggttggtagcggcggcggggagggggcagcgggcgatgagggtgttcgggggctgccacggagctcaggggaagagggtttgagtgcccccgaaagatggggggcagggagaggggagggggccgcaggtggcttggggcccgctgggctcagctcacactcggcggccccgcatcgcgtggcgcgggctctgccgtccgcccccagcggccgcgctccgcgaactcctgccgtccctggcgctcggtactaggcgctcgctaccgctcccggccccggcggttctccacgccgcgccccctcacttagcccgccttcctcggcctctggccctggcgtggggcgcaggagcggtccaggcgggcgcgggacgccgggcgccgagcagctcgggagggcgcgggcagggacagtagcgggggggcagggggctgggtgtcagggacgccgaagccccggtagtcgaaagtcccgttttaaggactggcctgatagattactttctacttaaagatccagcgggaggcggggccacgtgaccgtgcgtgacgtcagggccgcggccgagccggccaaactcaagttggttcagggaattgtcaacaaagggacgagagacgcgcaactccgctccgcactgtgcgccagcatccccggggcacggagggcgctgcggcccgcccggagacccccccacccaggctggatccgggccctggggcccagggagcgggtgggtgtgagtgtgggtgggtgtgagcgagtcagggcgtgggcctgggagcgtccgcgggactgtgcgactgtcgctgccctgccttccccgccccctctcccttccgcccttctcccccccactttgtcacactccttagacagggactgggcgacctagaacgaggttcccatatcgtgttttaaaaagcaaaacttagtctctgttttgctttttgtttcattgtttttagctttaaagagtaagagcagcgcacccggctccctcctgctaattagatttcagattcccctctggcctcagtgctcattccggggaagacacctgctgagatgtctttttccccctcccccaaccaaaccactcaggtcctacctgctctttcccggcttgatgcgggcgtgttttcctgtatgtattttttcgtgcggccacaaaaagcatcagctggggttcccgaaggtcagaaaatggctattgattaatctactagaatagttgccgagagaaataaaaacgacgtaaaatagcagggaacctataaataaagaagccataactggctacttggagttgttaaacgacttagcatatgaaaaaatcggaaatgaggcgctggggaaggagctgggattggcagcggcctgggtaagtcgagtggatccgggaagaggcctggtgtcttcaggttagacgcagcgcccaggggcggctgaagaaacgtgaggggtgcgggcagtgacttcccgggcggcgggcatggccttgggggaacctgggcagacttgggcatgccagcatgctgggatctccgttgctgccagctaacgtggattttcttctcttaaggtgtggacaaatcctccaagatttaacttccaagaaaaccggcggcggagcgggtggaggaggcgaggatgtgtggccaatgcacgcggagtgcaaggcaagtcagtgatagtaggaaaaactgtggggatttcactgggactggagggggaggcaccgcaaaccgacccccaagtgcgtggctggggtgcgtggacctcacacctccaaggaaagtcagtgctcttgacgcggtgaatcagcgatgcgcctcctctttcctccctcatttaggccgcctagttgggagccgcaagagcctgcctggtgtggcaggcacacggaacccaatccctgtctgtccgctgcggcctgggaggggagcgccggcctcaccagaggaaggagcacgaggggaggagttcc

SEQ ID NO: 787 - DNA, 4001 bp, Homo sapiens
tcaccagccagcacaccaagtccagaaaaaagtttctttctttttaattaaaccagctttaattaaaaataataataacccaataagtcctaagttttccaggggatggggcagacctaaaggcccaccaactcccctttcagtcaggagccctggtgctgcctgtctgaaatctccaagaagtgtcctcagggcgtgaagaaggcagccaggtgtgtctacgtgaaaggggggctctctcccaggaagaagctgagggcagacaggtaagtggaggtggggggcaaacttgtgggaaaatgaagggacgctagcaagtaagtcatgaacccaggagtctgacccaggagtgtcggaaaaacatgagagaaggttgatgaagtacagtcggtggaggaggcggcttgggatcacagatctggcttccaaaggcttggaactcaccaggaaacctggggtatggactcactggaggcgagtcagctccggggcaagggacccacagacagcgctggggtggggggcgccgcaaagctgggggcgctcacaagtggagggagaagaaatgagaggctggcaggtcaaaggggacgcttctgtccagtggcgagatggtgggagcctccccagggatgggggacggagaaggatgtagcaggagtttgagtccaggaggccacgacgagaggcgcagggtgtgctccaagccagggtggggggtagagatggggcgctcgagggcggcgccgcaggtccggggcacaggtcgcacaggtgcctgcccgcgcggcgcaggctcacaggtagcgctccagccccgacgcgaagcccggctgcctcaggtaggcctccccagggctgagcgggccgagagcggctgccggcccggccaaggccaggaggggctcagcgggcagcgggccggggccggggcgcgtcgcgggcagtaccaggcggtcggggacctgcgagtagagtggcggggaggcggcggcagcgcagggcgggaaggctgcggctgcggcgtcgggcgcggcgcagcagggcggctcgggggcgcccagccccgctagctccggctgcaggttcaccaggctgtcgacgctgaacagacgcgcgggcggcgaggggcccggtccggcagaaggcggcggcaccagcagcgcggggccgggcgcgggcgcgtagggcgcgtaggggaaggggagcggcggccctggcgccgcggccgcgtgcgcgggcagctcggcgcgcttgaagcgcttgcggcgccgcaggaagctgccgttgtcgaacatgtctgcggccgcggggtccagcgtccagtagttgcccttgcccgggttgcccggctcgcggggcaccttgacgaagcagtcgttgagcgtgagattgtggcggatgctgttctgccacttgcgcgggctgtcgcggtagaaggcaaagcgttcggtgatgaagcggtagatggcggccagcgtgaggcggcggcccggggcgtgcgccagagccatggcgatgagcgcgatgtacgagtagggcggcttcccgcgctgcaggggccgccgccgccgccgccccgggccgggcgcgggcgtgggggccgcctctccgcggccagccgccgcctcctctggctcccgccctggctcggctcctgcgagcggcgacggcggcggccccgacggcgcgaccgctggcagggcagggaagccagagaacgcggcgggcggatccatgtcgctgcgccccgccatcggctgcggcagcccctgcccgcgcggctccgggaccgcaggggccgccgacccgctttatatggacacggcccccccccaaccaccgccgggggagagggctcaggccttgcctgctggccagcgcctcccctctaatttcctctcccagcccccttactctgttcacggtaccctcctccatttcgcccctccctttctgcctttggatcagtttttcccagacccagactcaccccttccccatctcggttatatcagcccctggccccatcccactgtatttggtcagtccccttccctttccacccctccttctaccccctctcctttggatcattcccaatcacaaatccacccattcactctcccagccccctccccattttgctcctccccattttgctcctcccagtagtcggtccccccatccttctcctggccttccatccccagctggaacagagatgaaggccgccttgccagccctcagtatcctgatggggaggtgtcaggcccactcacagacattagggaacctgggccaaggtaatgaagcagcggggcagggcagagccaggccggttttgtctctgggagaatgtttgactgctccagatcagggtcaccatcttgcctctctgccacccccctcccccatacccctgtcatgccctccctccaggccttgagagcattctctgaaaaaacagaattgtggaaagtggtgcggccgctttaaatgaagagcccccaggaaatccacaacttggagctgcctttctggctgcctcctctccacacccccctgttaaagaaaacagcttttcttcacatacacacacacacacatacacccacacacacagtacaaaatgtaggcttccacagactgggggtctgaaaaagccgccttctgacccagaaacaccacactcacatctcactggggatggggggtctttggcagtgtttgttaaaaactcagtctgagaagttccacccacaactggcatccagggggatgcagcacccagcctattttgggaaacttcttctcccaagagacaggagacccatccccagctccaagggaactacagggtgaaggagccttgtcttaaagtgggttgtcctggggacaggcagatcaagggacttggacatggagcagggctggaaggacagtgagcccactgaggtgcctgaggtgctgagtttaaggggagctcagtctcagggccttgcaagtgcagtcagcacttgagagccagggcctccttacatttggggcatctcacttgccccatcctagtcccccagccatgctatagagtgtccctaggtataggtgaccaaagctagttacagcaggcctgtaaactccaaactcaaaatccagttcaaaatccaaactcaaagcatggagctcaagggcccctctctcagctccagtctcagctgatgacatcacagccaccattactgagcattttgtatttggtaaacactttatgtacattattgcacttaagtttgggcaccccgtgaagtgagtactgttattattcctgttttgcaaatgaggaaactaaggttctgagaggttaagtggtttccctgacttcacacagctagtagtaagtggtagagctggaattaaatgtgaagttcaaagctctagcaccccactcttctaagaatgccatcctttaaggctgagctgagacattagaaataatcagagtatttccagctcccacaacttcagctgccaaagtagattcttagcttctctcctcacctcctggtcagcatatctaggtgcccattgggcataaccacatggatatttcaaggtatctcaaacccaaatgtcctaaatgaaatgcatctcttcctctacccggtacatcctccagccttggccggctctccttgcagcattccatatctcagcaaatggacctctcccctttccttcccaccaccaccagatgaaagtgtggttatcatcatcttgggctccttcctccccactcactctccacattcaggcaagtgccaagtcccgtcaattccacatgggtcccagatccatccctccttcagttctcctggcctcagttcaggcttcattgctcaccgagtacttctgggccagtcccttagcaagtgctccaggcaagacagaaatgaagactcgaaatctggtggagagacagacaactgccagttatgata

SEQ ID NO: 788 - DNA, 4001 bp, Homo sapiens
ctgtaccagataaaaggaaaaaaatgtcaaaaatatactcaaagaatgtacaatgtgaaaaagtgagaatgcaggccactttggaatctagtaagtgactttgaaacattaagtttttttattttacccaaactaatgaacaaaaaagagccaaaataaacacgttctagcctcatccaaaaaaaatctaatgaaagcatgagaaacttcccagttttgtcctcggcagcacaaaaccaagaagattcacctcaattctgagacacaaaagcaaaaagagaaatcctcctatttatctaagaaactaaaaaacttaatcacgtctatataatatataccactcagaaaaagagaggagttactgcttttctataaatatttgctagggaccaggaggaataggcttctctcactgttattgcgggaacaatctgtggtctcaaaacagcaaaacagaagatggaaaccctaatctggaagagacattaagaaaaaaactactcaaaccatgtttcaaaccagtttcaaaaaaagagtgtgcaatgggtactcaacagagtaagaggaaaagtgaagtaaaagagcttctacaaaataagtgactaggtgaaactagtgctgccttgtgagaaaaagagctatgcatataacgctcctatgacatcacgctttttcactgggaaacaaaatagaaggaagaaaacacacacaaataaatctcagaaaaagaccaaaaaggtgcccaccaatctctaactccttcaggaattagagtgaatggctctaactcattcaggaatccaaccagggacaacacagacgtggaatgcaccaacacggaatagtaaaacctttgctaaccagacacacaaaaagtaaaacagagaaatgaaaactatacacctgaatgcatcggtagcaagcgcttattctctataattaagcaacagagaaaagaataagagcagctaatggaagaggaaaaaagatgttaatgaaactaagccctgttatgtcccctactggcctcaatttcagagtacaactctcgattcttcatctaaccaacagccggcctcggcaaagcaaactgaccctaacaccttccacgccacccggaggaaatcacagaggaaaaaccatcccgttaacctccctcctcaccagctgcaaaaatggagctgggagggggggcgggagacactctaccacgtgggcaggatgcaacacacacaggacagcaacacgtccgcatggaacggctgcctttgccctaatcccagcaaaggacacagacacaggatgggcgggaacgcaagcaccctcgcatgggcctcctctccccaaagggccactccaaggcgtgaggtacagcccgccctgccggcagaaaagcgcccccaagcttaaagggaagaagccgcagagtgccggggtcgggggctagcccaggccaagggacaggtcatggagggaaggagacggtcgctgccctcggactaggcgcccccgggatccacgtctggttccccggtgccccgcctgggggaggggcgggagacgcgaagccgctgcttcccagctgaggggcagcagcagctgagaagcgccgcgggggagggaaggacccagccctcggcgtccgccaggccccagccggggcccaggccccctgccccacccgccgcccaccccgcaacgcggctgcggctggaagagagagggcgtctcgcggaggacagcccctgcctccgtcccgggagatgccacagccccgcctcctcgcccgccgcccaggcccggccgccctggcggggggcacttacctcaggctgcgcaggccgggacggcccggccgagcccccggccgctccgtgcgtctccgcccccccgggaaaggtcccaacggtgcctactgcgagcggtcgaggccccgagcagccccgagagcggcggcggcagcaagagcagccaacatccggggccgcgcacccggaactacttcccgacccgcatcccccgcccgccctcgccgccaccgcctcctgcggcgtcgctgcgccgccggcccggcgtcagcggcgtcaagtccctgcgcggtcacggtcgcttcgacgcacgcaggatccctccgctgggacaagtagtgccctgagactcccgaggctctgcatcggcgcagccggtgtcatctagcggccggcagttccgagcgacttggggtccttgtgcctcggagtggcgtctgggagcaaaggcggcggaggcaaccccgcagttgaggacagtagggatcggtggctttggaccctgcccacggatacctggggccccatgccccgaaggaatggtgccttctgccctcccccgccccccaacatccgccacctcaccgaagcgcccggcaccttagcctcctctccaggaaagcggacgccttttccgacctggcacaccgcggattccgggacccccaacaaaggcgccttggaccttcaggacacccctcttttcagaacttcatgagtcccaggtgctagactcatgtctgcggaggcctttcccgtgcctggtctttctttctttcttaaaggagttggacctctaaaggcccttctaattctcaaggtagctacccaggttatggtactactatcagtaggtggagcgtttagaagggtagtttggtcgacgagtgaactttggaatttacttctacgtcagtcttcactgattctttctctaaactattagcactgataatctgccctataatttcacacttaattacattccagtgtagtatttgctgttgcttcattcgcgttagtcacatattcccctgcagcgccaaacacgcttttgaactcacaatgggtggctcaatatttggagacttagatatttgttagatgaatactaggctgattggatgagaggaaaaggagaggcatgagtgaattggccctgggtacttttttgacatagtctcaaagggttcagataaagacctccagcagatctgagcacacaattccttcagtaaacattgaacacctgccgtttggtcaagcatttctaggcactggagattcaaagtattcacatattccttttctttataagactagcaagattctgaagattcatgtactcattcactcaacaaatatttgccaatcactactaaggttgccagacactattttagtgcttgggatgtatcagtaaacagaagagagagagaaaacaaatacccttccctgttggagctttcattctaatataaggagaaagatgataaatgtaagagaattatgtaatatgttagaaggcatatggggaaaaaaaaatacaccagggtaaggggtatgaggaaaactggaggaagggggtttgcaatttttttttaagagggaatcctgctctcccgcccaggctggagtgcagtggcgcgatctcagctcactgcaactcccgggttcaagtgattctcctgcctcagcctcctaagtagctgggattacaggcgcgcgctaccacacccggctaatttttgtatttttagtagagatggggtttcaccatgttggccaggctggtctcaaactcccgaactcaaaagtgatccgcgctcttcggcctcccaaagtgctggcattacaggcctgagccaccgcgcctggcctgcaattttaaatagagccgtcagcatgggcctcatttataaaatgactttaaatcggagacctgaaagagctgagggagtcagccatgcagttgtctggggaagagtgtcccaggcagaaggaacagctagctggtggaaaggcctggagacaaaagcctcgggaagtgttaaaaataatgagaaggccaggacggttggagccgtgagcaaatgggagcctaatgaggagataagatcagagagaggggtctcaagtagggagctgtaggaatcttggctgaaacagaaccactgctgggctttgaacaga

SEQ ID NO: 789 - DNA, 4001 bp, Homo sapiens
ctgttctttcgatataagttgaagctttccaagagaccacgtatcttattcgtctcttcatacagacttcacacatagataactcggtactttacagaagtacacaaatgctgacttaccaaaaaaaaacaaaaagcctcagtatgtatcagaacaacattctccattttccactgccccacccatacttagcataatgaaaaaatataatctaaaatctatatttaaatattttcattctacatagaaggaaagggaatatacgaactgtaccagataaaaggaaaaaaatgtcaaaaatatactcaaagaatgtacaatgtgaaaaagtgagaatgcaggccactttggaatctagtaagtgactttgaaacattaagtttttttattttacccaaactaatgaacaaaaaagagccaaaataaacacgttctagcctcatccaaaaaaaatctaatgaaagcatgagaaacttcccagttttgtcctcggcagcacaaaaccaagaagattcacctcaattctgagacacaaaagcaaaaagagaaatcctcctatttatctaagaaactaaaaaacttaatcacgtctatataatatataccactcagaaaaagagaggagttactgcttttctataaatatttgctagggaccaggaggaataggcttctctcactgttattgcgggaacaatctgtggtctcaaaacagcaaaacagaagatggaaaccctaatctggaagagacattaagaaaaaaactactcaaaccatgtttcaaaccagtttcaaaaaaagagtgtgcaatgggtactcaacagagtaagaggaaaagtgaagtaaaagagcttctacaaaataagtgactaggtgaaactagtgctgccttgtgagaaaaagagctatgcatataacgctcctatgacatcacgctttttcactgggaaacaaaatagaaggaagaaaacacacacaaataaatctcagaaaaagaccaaaaaggtgcccaccaatctctaactccttcaggaattagagtgaatggctctaactcattcaggaatccaaccagggacaacacagacgtggaatgcaccaacacggaatagtaaaacctttgctaaccagacacacaaaaagtaaaacagagaaatgaaaactatacacctgaatgcatcggtagcaagcgcttattctctataattaagcaacagagaaaagaataagagcagctaatggaagaggaaaaaagatgttaatgaaactaagccctgttatgtcccctactggcctcaatttcagagtacaactctcgattcttcatctaaccaacagccggcctcggcaaagcaaactgaccctaacaccttccacgccacccggaggaaatcacagaggaaaaaccatcccgttaacctccctcctcaccagctgcaaaaatggagctgggagggggggcgggagacactctaccacgtgggcaggatgcaacacacacaggacagcaacacgtccgcatggaacggctgcctttgccctaatcccagcaaaggacacagacacaggatgggcgggaacgcaagcaccctcgcatgggcctcctctccccaaagggccactccaaggcgtgaggtacagcccgccctgccggcagaaaagcgcccccaagcttaaagggaagaagccgcagagtgccggggtcgggggctagcccaggccaagggacaggtcatggagggaaggagacggtcgctgccctcggactaggcgcccccgggatccacgtctggttccccggtgccccgcctgggggaggggcgggagacgcgaagccgctgcttcccagctgaggggcagcagcagctgagaagcgccgcgggggagggaaggacccagccctcggcgtccgccaggccccagccggggcccaggccccctgccccacccgccgcccaccccgcaacgcggctgcggctggaagagagagggcgtctcgcggaggacagcccctgcctccgtcccgggagatgccacagccccgcctcctcgcccgccgcccaggcccggccgccctggcggggggcacttacctcaggctgcgcaggccgggacggcccggccgagcccccggccgctccgtgcgtctccgcccccccgggaaaggtcccaacggtgcctactgcgagcggtcgaggccccgagcagccccgagagcggcggcggcagcaagagcagccaacatccggggccgcgcacccggaactacttcccgacccgcatcccccgcccgccctcgccgccaccgcctcctgcggcgtcgctgcgccgccggcccggcgtcagcggcgtcaagtccctgcgcggtcacggtcgcttcgacgcacgcaggatccctccgctgggacaagtagtgccctgagactcccgaggctctgcatcggcgcagccggtgtcatctagcggccggcagttccgagcgacttggggtccttgtgcctcggagtggcgtctgggagcaaaggcggcggaggcaaccccgcagttgaggacagtagggatcggtggctttggaccctgcccacggatacctggggccccatgccccgaaggaatggtgccttctgccctcccccgccccccaacatccgccacctcaccgaagcgcccggcaccttagcctcctctccaggaaagcggacgccttttccgacctggcacaccgcggattccgggacccccaacaaaggcgccttggaccttcaggacacccctcttttcagaacttcatgagtcccaggtgctagactcatgtctgcggaggcctttcccgtgcctggtctttctttctttcttaaaggagttggacctctaaaggcccttctaattctcaaggtagctacccaggttatggtactactatcagtaggtggagcgtttagaagggtagtttggtcgacgagtgaactttggaatttacttctacgtcagtcttcactgattctttctctaaactattagcactgataatctgccctataatttcacacttaattacattccagtgtagtatttgctgttgcttcattcgcgttagtcacatattcccctgcagcgccaaacacgcttttgaactcacaatgggtggctcaatatttggagacttagatatttgttagatgaatactaggctgattggatgagaggaaaaggagaggcatgagtgaattggccctgggtacttttttgacatagtctcaaagggttcagataaagacctccagcagatctgagcacacaattccttcagtaaacattgaacacctgccgtttggtcaagcatttctaggcactggagattcaaagtattcacatattccttttctttataagactagcaagattctgaagattcatgtactcattcactcaacaaatatttgccaatcactactaaggttgccagacactattttagtgcttgggatgtatcagtaaacagaagagagagagaaaacaaatacccttccctgttggagctttcattctaatataaggagaaagatgataaatgtaagagaattatgtaatatgttagaaggcatatggggaaaaaaaaatacaccagggtaaggggtatgaggaaaactggaggaagggggtttgcaatttttttttaagagggaatcctgctctcccgcccaggctggagtgcagtggcgcgatctcagctcactgcaactcccgggttcaagtgattctcctgcctcagcctcctaagtagctgggattacaggcgcgcgctaccacacccggctaatttttgtatttttagtagagatggggtttcaccatgttggccaggctggtctcaaactcccgaactcaaaagtgatccgcgctcttcggcctcccaaagtgctggcattacaggcctgagccaccgcgcctggcctgcaattttaaatagagccgtcagcatgggcctcatttataaaatg

SEQ ID NO: 790 - DNA, 4001 bp, Homo sapiens
gaaagggaatatacgaactgtaccagataaaaggaaaaaaatgtcaaaaatatactcaaagaatgtacaatgtgaaaaagtgagaatgcaggccactttggaatctagtaagtgactttgaaacattaagtttttttattttacccaaactaatgaacaaaaaagagccaaaataaacacgttctagcctcatccaaaaaaaatctaatgaaagcatgagaaacttcccagttttgtcctcggcagcacaaaaccaagaagattcacctcaattctgagacacaaaagcaaaaagagaaatcctcctatttatctaagaaactaaaaaacttaatcacgtctatataatatataccactcagaaaaagagaggagttactgcttttctataaatatttgctagggaccaggaggaataggcttctctcactgttattgcgggaacaatctgtggtctcaaaacagcaaaacagaagatggaaaccctaatctggaagagacattaagaaaaaaactactcaaaccatgtttcaaaccagtttcaaaaaaagagtgtgcaatgggtactcaacagagtaagaggaaaagtgaagtaaaagagcttctacaaaataagtgactaggtgaaactagtgctgccttgtgagaaaaagagctatgcatataacgctcctatgacatcacgctttttcactgggaaacaaaatagaaggaagaaaacacacacaaataaatctcagaaaaagaccaaaaaggtgcccaccaatctctaactccttcaggaattagagtgaatggctctaactcattcaggaatccaaccagggacaacacagacgtggaatgcaccaacacggaatagtaaaacctttgctaaccagacacacaaaaagtaaaacagagaaatgaaaactatacacctgaatgcatcggtagcaagcgcttattctctataattaagcaacagagaaaagaataagagcagctaatggaagaggaaaaaagatgttaatgaaactaagccctgttatgtcccctactggcctcaatttcagagtacaactctcgattcttcatctaaccaacagccggcctcggcaaagcaaactgaccctaacaccttccacgccacccggaggaaatcacagaggaaaaaccatcccgttaacctccctcctcaccagctgcaaaaatggagctgggagggggggcgggagacactctaccacgtgggcaggatgcaacacacacaggacagcaacacgtccgcatggaacggctgcctttgccctaatcccagcaaaggacacagacacaggatgggcgggaacgcaagcaccctcgcatgggcctcctctccccaaagggccactccaaggcgtgaggtacagcccgccctgccggcagaaaagcgcccccaagcttaaagggaagaagccgcagagtgccggggtcgggggctagcccaggccaagggacaggtcatggagggaaggagacggtcgctgccctcggactaggcgcccccgggatccacgtctggttccccggtgccccgcctgggggaggggcgggagacgcgaagccgctgcttcccagctgaggggcagcagcagctgagaagcgccgcgggggagggaaggacccagccctcggcgtccgccaggccccagccggggcccaggccccctgccccacccgccgcccaccccgcaacgcggctgcggctggaagagagagggcgtctcgcggaggacagcccctgcctccgtcccgggagatgccacagccccgcctcctcgcccgccgcccaggcccggccgccctggcggggggcacttacctcaggctgcgcaggccgggacggcccggccgagcccccggccgctccgtgcgtctccgcccccccgggaaaggtcccaacggtgcctactgcgagcggtcgaggccccgagcagccccgagagcggcggcggcagcaagagcagccaacatccggggccgcgcacccggaactacttcccgacccgcatcccccgcccgccctcgccgccaccgcctcctgcggcgtcgctgcgccgccggcccggcgtcagcggcgtcaagtccctgcgcggtcacggtcgcttcgacgcacgcaggatccctccgctgggacaagtagtgccctgagactcccgaggctctgcatcggcgcagccggtgtcatctagcggccggcagttccgagcgacttggggtccttgtgcctcggagtggcgtctgggagcaaaggcggcggaggcaaccccgcagttgaggacagtagggatcggtggctttggaccctgcccacggatacctggggccccatgccccgaaggaatggtgccttctgccctcccccgccccccaacatccgccacctcaccgaagcgcccggcaccttagcctcctctccaggaaagcggacgccttttccgacctggcacaccgcggattccgggacccccaacaaaggcgccttggaccttcaggacacccctcttttcagaacttcatgagtcccaggtgctagactcatgtctgcggaggcctttcccgtgcctggtctttctttctttcttaaaggagttggacctctaaaggcccttctaattctcaaggtagctacccaggttatggtactactatcagtaggtggagcgtttagaagggtagtttggtcgacgagtgaactttggaatttacttctacgtcagtcttcactgattctttctctaaactattagcactgataatctgccctataatttcacacttaattacattccagtgtagtatttgctgttgcttcattcgcgttagtcacatattcccctgcagcgccaaacacgcttttgaactcacaatgggtggctcaatatttggagacttagatatttgttagatgaatactaggctgattggatgagaggaaaaggagaggcatgagtgaattggccctgggtacttttttgacatagtctcaaagggttcagataaagacctccagcagatctgagcacacaattccttcagtaaacattgaacacctgccgtttggtcaagcatttctaggcactggagattcaaagtattcacatattccttttctttataagactagcaagattctgaagattcatgtactcattcactcaacaaatatttgccaatcactactaaggttgccagacactattttagtgcttgggatgtatcagtaaacagaagagagagagaaaacaaatacccttccctgttggagctttcattctaatataaggagaaagatgataaatgtaagagaattatgtaatatgttagaaggcatatggggaaaaaaaaatacaccagggtaaggggtatgaggaaaactggaggaagggggtttgcaatttttttttaagagggaatcctgctctcccgcccaggctggagtgcagtggcgcgatctcagctcactgcaactcccgggttcaagtgattctcctgcctcagcctcctaagtagctgggattacaggcgcgcgctaccacacccggctaatttttgtatttttagtagagatggggtttcaccatgttggccaggctggtctcaaactcccgaactcaaaagtgatccgcgctcttcggcctcccaaagtgctggcattacaggcctgagccaccgcgcctggcctgcaattttaaatagagccgtcagcatgggcctcatttataaaatgactttaaatcggagacctgaaagagctgagggagtcagccatgcagttgtctggggaagagtgtcccaggcagaaggaacagctagctggtggaaaggcctggagacaaaagcctcgggaagtgttaaaaataatgagaaggccaggacggttggagccgtgagcaaatgggagcctaatgaggagataagatcagagagaggggtctcaagtagggagctgtaggaatcttggctgaaacagaaccact

SEQ ID NO: 791 - DNA, 4001 bp, Homo sapiens
tataacgctcctatgacatcacgctttttcactgggaaacaaaatagaaggaagaaaacacacacaaataaatctcagaaaaagaccaaaaaggtgcccaccaatctctaactccttcaggaattagagtgaatggctctaactcattcaggaatccaaccagggacaacacagacgtggaatgcaccaacacggaatagtaaaacctttgctaaccagacacacaaaaagtaaaacagagaaatgaaaactatacacctgaatgcatcggtagcaagcgcttattctctataattaagcaacagagaaaagaataagagcagctaatggaagaggaaaaaagatgttaatgaaactaagccctgttatgtcccctactggcctcaatttcagagtacaactctcgattcttcatctaaccaacagccggcctcggcaaagcaaactgaccctaacaccttccacgccacccggaggaaatcacagaggaaaaaccatcccgttaacctccctcctcaccagctgcaaaaatggagctgggagggggggcgggagacactctaccacgtgggcaggatgcaacacacacaggacagcaacacgtccgcatggaacggctgcctttgccctaatcccagcaaaggacacagacacaggatgggcgggaacgcaagcaccctcgcatgggcctcctctccccaaagggccactccaaggcgtgaggtacagcccgccctgccggcagaaaagcgcccccaagcttaaagggaagaagccgcagagtgccggggtcgggggctagcccaggccaagggacaggtcatggagggaaggagacggtcgctgccctcggactaggcgcccccgggatccacgtctggttccccggtgccccgcctgggggaggggcgggagacgcgaagccgctgcttcccagctgaggggcagcagcagctgagaagcgccgcgggggagggaaggacccagccctcggcgtccgccaggccccagccggggcccaggccccctgccccacccgccgcccaccccgcaacgcggctgcggctggaagagagagggcgtctcgcggaggacagcccctgcctccgtcccgggagatgccacagccccgcctcctcgcccgccgcccaggcccggccgccctggcggggggcacttacctcaggctgcgcaggccgggacggcccggccgagcccccggccgctccgtgcgtctccgcccccccgggaaaggtcccaacggtgcctactgcgagcggtcgaggccccgagcagccccgagagcggcggcggcagcaagagcagccaacatccggggccgcgcacccggaactacttcccgacccgcatcccccgcccgccctcgccgccaccgcctcctgcggcgtcgctgcgccgccggcccggcgtcagcggcgtcaagtccctgcgcggtcacggtcgcttcgacgcacgcaggatccctccgctgggacaagtagtgccctgagactcccgaggctctgcatcggcgcagccggtgtcatctagcggccggcagttccgagcgacttggggtccttgtgcctcggagtggcgtctgggagcaaaggcggcggaggcaaccccgcagttgaggacagtagggatcggtggctttggaccctgcccacggatacctggggccccatgccccgaaggaatggtgccttctgccctcccccgccccccaacatccgccacctcaccgaagcgcccggcaccttagcctcctctccaggaaagcggacgccttttccgacctggcacaccgcggattccgggacccccaacaaaggcgccttggaccttcaggacacccctcttttcagaacttcatgagtcccaggtgctagactcatgtctgcggaggcctttcccgtgcctggtctttctttctttcttaaaggagttggacctctaaaggcccttctaattctcaaggtagctacccaggttatggtactactatcagtaggtggagcgtttagaagggtagtttggtcgacgagtgaactttggaatttacttctacgtcagtcttcactgattctttctctaaactattagcactgataatctgccctataatttcacacttaattacattccagtgtagtatttgctgttgcttcattcgcgttagtcacatattcccctgcagcgccaaacacgcttttgaactcacaatgggtggctcaatatttggagacttagatatttgttagatgaatactaggctgattggatgagaggaaaaggagaggcatgagtgaattggccctgggtacttttttgacatagtctcaaagggttcagataaagacctccagcagatctgagcacacaattccttcagtaaacattgaacacctgccgtttggtcaagcatttctaggcactggagattcaaagtattcacatattccttttctttataagactagcaagattctgaagattcatgtactcattcactcaacaaatatttgccaatcactactaaggttgccagacactattttagtgcttgggatgtatcagtaaacagaagagagagagaaaacaaatacccttccctgttggagctttcattctaatataaggagaaagatgataaatgtaagagaattatgtaatatgttagaaggcatatggggaaaaaaaaatacaccagggtaaggggtatgaggaaaactggaggaagggggtttgcaatttttttttaagagggaatcctgctctcccgcccaggctggagtgcagtggcgcgatctcagctcactgcaactcccgggttcaagtgattctcctgcctcagcctcctaagtagctgggattacaggcgcgcgctaccacacccggctaatttttgtatttttagtagagatggggtttcaccatgttggccaggctggtctcaaactcccgaactcaaaagtgatccgcgctcttcggcctcccaaagtgctggcattacaggcctgagccaccgcgcctggcctgcaattttaaatagagccgtcagcatgggcctcatttataaaatgactttaaatcggagacctgaaagagctgagggagtcagccatgcagttgtctggggaagagtgtcccaggcagaaggaacagctagctggtggaaaggcctggagacaaaagcctcgggaagtgttaaaaataatgagaaggccaggacggttggagccgtgagcaaatgggagcctaatgaggagataagatcagagagaggggtctcaagtagggagctgtaggaatcttggctgaaacagaaccactgctgggctttgaacagaggagtgataggatctgactcgtgctttcaaaagatcactctggccgccgtgctaagagcagaactaagaggacaatggtggaagccagaggctccattacccaggtacagaatgatggcttgaactagatagtagcaatgagtaagataaataagatgcagtctcagccgggcacagtggcgcttgactgtaatcccagttattaaggaggctgaggcaggaggataggatcacttgagcccaggagttcaagtgcagcccgggcaacacagcaagcccccatctctaaaaaataaataacgtacagtctgtctatggtctcccaacacttaggcagaggcggaagattgcgtgagcacaagagttcaagactagcctgggcaacataaggagactgtctctacaaaaataaaaaaattagccggcagggtggtgtgcatccttggtcccagctatgtgggaggctgagatgggaggattgggcccaagaggtcaaggctgcagtgagttgtgactgcgccactgcactccagcctgggtaacagagtgagaccctgtctttaaaaaaaaaaaaagagagagaaactagacttagctccaagtctggagcttttggggttttcttcctttataaaaattttttaa

SEQ ID NO: 792 - DNA, 4001 bp, Homo sapiens
tgtatgctgggtgctgtgggcacagaatggttctgacactgccactgtcttccaaaagcagggtagagaggggaaatgagacagaacacaaatgactaaaacctgctaccagcagggagagggccagagaaaggggagtcctaagctagctaaaaagggtttagggaaggcttcctggaggaggcatctgaactctgtacccttgaggacagtgaatacatctacagggaggagtaagccagggcatggggagtgcaggacacacttgggggaaatgtgttctggtgggggttgagcccaaggggatgggagaggggatgcggaaagagacccaggtctactcctccagcctgtgttcctgccccacagtggccggtgagggacagaagctgccagcactaaccctgagagccatgggctcccaggtcaggataccctggctctacaatgctgcccctgggtatctagagctgttcatgcccacaagtctcccctcctccactggcacacctccttcctctgacccagctcacaggcaccacagggcacagccccctcccttgacataggcatgcctccctcacagaggccactcctcccatagggaggctgacagttcgcctcctaggcacaggaggggtctccagcctcctctcccccaaaggcatagactatccccactctccaacaagatggccaggggaggagctgggtcgagaggccacaatccaagcaagcccctgtcccctcctaaggtggctcccccctttccactggctggcactgaggcctccctggggtaccctgcccctcccccagcccctaaatggatctgggctccgacagctagggaagtggaaaaaagcatcctgggtgggtatggacagatccccagctctcaacaccctgtcctcacaccagcaggggccatcaccagtgacccccatcctgatctaggtaaggggggcagcagccaccccatggagaactcagatctcaggtcacctgccgagttccccactccaggctggttggtgccctagggtgaactctggcaccacaagaagaactgtgggcccatggtcacactcctcaccctggggacagctccaggaagcgcaatgatagagatttgggagggaaagccggcattggccccaagtcattattccagcgctctaagaagggtgccctggtggaaagggtaaaacaagagtcacacaaagcagacttgggggaggagggggaggctccccaatgtccgcggcctgggaatgggttcctctgctatgcccccaaggacagggtggggacgtgcctcggggacgcctcaaagcggcagtcccttgtcaccctaccagacctcccaccccgcatccctccccgcaagggagcacgcacacagctgctcccagtacgcccccgcccgtccgctggccggccccacgccctgggcgcacactctgtgaccccggggggtgccaaaaagccctccttctgacggccctcctggagcccaacacacctagcagcccctggaagccccagtcggcgtccccagccccctccccagccggacgcccccaccttccagccggccgagctgttgctgtcgcctttatccttgaagtagggcacgtaacggaccatccagtcgtagatctgcgagagcgtgagccgcttgtccggggcgctctcgatggctttggtgatgaggtcggcgtaggacaggttcccccacgcgttccgccgagagctcttcgctttccgcagcggtccgacctccgcgcccaggggcggcgctggggccatcgccggggccgtagcccggcgctccggcccgcagtcctcggcgccctcggccacccctgcgcccagcgctccgtcctcgtcgccggccaagtcaggctgcggcaggggccaggtacacgagcgcggccggctctgcggcgcgaagtccgggtccacgtccacctgatgcgctcgcagcttcgcagccatggtcccgcccggctcgggcgaggaggggagggaggcttcgcggagggtgggcgggcggctccgggatctgcacgccccggggaggcccgcgggaggggtccctggcggcgctgtctcagccgcggggcgccatgggccgaggcgcggaggcagggggctggacgcgctggggagcacgaagggagggaaagacctgggcagtgagggggcggcggcccgggagcccagcgggcacacacctcgcccagccccgcttctagcacctgccgcctgcctgcgcctgcagccaccaccgccaccgccgctgccgccgctccccgggcgccggccctgcgcacgggccctgctctcccgggacgaggccggattgcaccatgccggagcccgagccggtgccggagcccgcgccgccgccgcccggtgaatgctgccgccgccgccgctccggctccagcgccagctcccgcgcctgccgcgctcagcgccggctgcacctcgggatgggcgggggacggggagggggcgggcccgacgcgggagggggcggggcgtttcgcctgcggccgcggaatcctcagccagcccaggtgccccgcccgcgggctgggagaccgggcgctgagctcccagctcggggcgaccccgccgcagcccctgcaagcaacagcgccgcctacggagcaggggcggagcggctggcgcgaccccgccccctgctcggcgcggaggcgggggggctagggggcggagccctaacactcccattggtccgcggctggactgtcctgcccatgggctcgacaggatccctcccagaagcgcgtcaccggttattgttacaacccggggtttcccggggcaacgggatggggcggggctcagggcactggccccgccttctactccggagaggactgccccgccctctgtttgtagactcctgacgttcccaagtctccgttccaggactctgacagggaggatgatcgaactctgctcttctttgtgccctggactgagctggggaaaaagaatgggtcaagaatacctgggttctaggctaggctttgccacaattctcgctcctccatccgcaaacatgttcttcatggtgcctgtggtcatagttttagagctccagttctcaaagtttgacgcagagcagaatcatcccctagagcttgttaacattgctggaccccaactccagagtttctgattcggcaggtctgggttggggccccagactttgcatttctaaccagctcccaggtgatgcacgagagaccacaccttgcaaaccattgttttagagtctgtgggaggttcttactgcggttgttggaacaagcacttgtctaaagttcacagtgtttggggagatgcttctcaatcagttcctggatatttattgagcacctctgacgcaccaggcactgtccagggctctacagtgagagcagcaactgaaacaaatgaggtcccctactgcatagactagtcaggagtcagatgctaatcagatcatcacatgagctcagaagggcgaggctagccgagaggttgggcagtccgtggcctcatcctacaggctgctgagctaggtttcccagtcaccactgcacctgctggccttcgctcagggtatttatcccctctgcctagaacaccatttccccgccgcaaggccctcatcagagattctcccactcttcaaagctccgtgcaaatgtcaacttagccctgacaccttctctagccccaactcccaacactttctgttctctgcttgcccagaccacttgttgagctgccagcaacaccttgtgcccctttagcacaatattcctattttgccaatcaggaaactgaggcccagaatgagcaggtgattcccctggtggcatggccaggactggaatctcaagctcctgatttctttaccagccagtaccttgctcctgaggacgctggagatgcgaaggtctctgggcagtggg

SEQ ID NO: 793 - DNA, 4001 bp, Homo sapiens
aagaggtcaagagtattttttcccactaattgctttcttcatgtaaattgctggaggaactctggagtggagaggacctcaagggttctactgataaggtccaaaggagtattcctatctgaatagtgtgaatttcattaaaactaataaaattttcttttaagtaacattctggaagtttttcaaggtaagtcataatgggtaagaacagttgctattccttttatctttctaaaaaaagtcaatttatgttcaaattttaaagtttgtaaagctgtgggtagagatatgcagcttatacactgtaagtcacagaaaccttttcttcaatgattattctgcttaggacctatattataaaactgaccataaagcgcgtaccaattttggctccagcaggatccacaaaaacgtgatattgaactccaaggggtaactcctttcttttcagcttttctgacagctgttggttgtaagcaagttcctgtttttcatcagccgctgttattgcaactatgtcccagaattctccacgtgctacaagtttgcctatttggaaaaagcaaggaaatgaaaacaaaaattatcagaattttctagttgccacaggtttgcctattgagaaagatgataaagaaggtaatatccattatcatcttccaaaatgtatctttggcttttgaaagttagggaataattagtggtgcattaatacgattcaaaatagttataatgaagactgttcacaagttccttttttttcttttagatcactccctccttttatggtttgcaatccaatttaattataaattctgaatgacataatgtttcttgattaagagagcgacttttaacttgccaaagactattgcctcaattcttcaataagaagaggagataaacataaacaaatctccagctttgcaaatcaattcttatgtatcacggacacttggtgttaggtgactaagaaagacacaacccaaagatcccttccctcaatgttgctgtttataaatgtgggtactttattttctattactttaagatgaaccatgcaaacttacataggctgttagaatataacataaaattctggataacagaaggtcccaactctctgatgacatctttaaaagacagtgtgcacttttagtagacagttggaatctctttattgataaacaaaatgatttagcattttaattagttaacaaacagaacttgtcagctagaatctaatagtcctgaaagttttactgttatccaagaattagtcccagtattttttaagcagtcactgcaacacaaatataatcacttttattagacaggtgtacagggattaagtgtcatagccaattttttgataacaaatttcttccttttaatttttaatccataattcctccatgttctgttactccctcaacaaacggttacattacagaagtagatgaacgtaatgtaaagcgtgaagtagatagggggctggcatctactcataaagttcaaaatactgtgcttcgtatcttttagatttatttaaagcaacttttattaatgagctaatcaatgcataacttcactagtaagattttcttcttcttcctccgccctcatttttaatatctatactactaagaataaagtaagcaacaagcatgtcaagcagggacagtgaaaagaataaaaaactcaaaaggattattagctagctactcctggggagcgtcataggcctacagatgagaagtaaacgggaagtgacagtccagcaaacctcctggcacgtaaaagcaccctccctctgcattgcccaggagaactccggtgccttctctggtacctcttagctcggaaaacctccgcaattttcgctgggtggcttctcgcagcgatacttccggagggtccctagcagctgccatagccccaccttccctgagaccgcgccgcacagcacgcatgcgccctggggtgcgcctccgcccggttgtttctgacccgccccctccgtgcgtcgcccacgtaaccacgcccccggagcgccttggctggcgcccggaaaaccatgatgtggagaacttggatgttgtcttgtttctctagcaacggtctcaggagcagatggccgcccagcgatttgtctgactgtgttggggctgggccacttgtctccaactcataagggcttgcagcccagttgacccggtgagtggttcagtttgggtgacaaaattgttagaaccgacccgctaaggataaggcgaaactacattctagcttcccagctttcacatcaaaggcggttcgtcctaactggtggtttgtttcagcctggagcagttccccaggatagcctgatagaagatctccgccatctctcctttcccccgccaccccgggccatctgcccccaaccctgggtcatgatacatacacagtctgaatatttaaaatctctgctctttctaggaaccttaagtttgtggttcctagagagtgagccaccccacccctctgttttttcttagtaggctacacacgacagcctctcaaatagtgtctttgaaagttgtataaaattcagtccgcaaccaggctccaaatatttttggtattttggtttcttctctggcattcttttgtatatgcagattaatctagaatgttcaataacactcttaggaataagtcagcctttttaggtgtttttttgggtagctatataaaggtgttcctgttatagaacacgaggtttcttggttttacagaccacttcatctttacacagaagaaaactgaatcagagaatagtgagttagtcaaggtatcacaattagtaagtaataaaagatttaagaaatatatttcaatcccaaacccagaacttgtggtatttcaccataccgtttgattttttgagacgatttctctgtatcaacgtcttcattaggtacgtagacattcagggcaccataaactcttgtcataaatttacttagtttttcttctcagacttgttatacaatcgtgttctaatagtggaaacatttggataaaatggcagattagattactctttcatagttttacatttaaaacttcattaattaaaaaaacagtatcttattgaagaacatttagaaaatacagagacttgagtgaaagtaaccaaaggagaaagtagcgagagaaggtcagagagagaacaaagggccataggaagaattttggtttttactcttgagggaaacaaagccattgcagggttttgaagtgacttggcttatgtttaaagagatcactcggagataggagaatagattataatgggggatgaggcaatgatagaagcagggagacttctttggaggttactgcaatattgcaggtgagagctggtgaaggcttgaccaggatggtagcagtgggaatggtgagaagttggtcagattctggatatatttttaagacaaaaacaataaaatgtgctgatggaattaatgggtgtggactgtaagagaaaaagaggagtcaaaatgactgccttgggatggattggccatcaattaagatgggtaagtttccgactgaggaaggtttttggggtaatagggtccagaatttgattttggacatgtggaataaagagacatgtgtatgcagtgaatatgtaatggaagtttgtgtgtgtatgtgtctgtatgcattatacatacgagtctagaattcaggagagaggtctgggctagagatacaattttgggaattgtcagcaagaagatagaattaattttaactgtggaactaagtgaggtcccaagggagtgaaggtcagcagagcctatatgtttggggtctgtatattctaataaggtgaaataaagaaggaagaagtaaccaaataaaaaatccagtggtaacaattgtgaggagacaaacagagtgatgtgttagattctatcatacagaatattaaatagagtatttat

SEQ ID NO: 794 - DNA, 4001 bp, Homo sapiens
ggaggcagaggttgaggtgagccgagatggcaccattgcactccagcctgggcaacaagagtgaaactctgtctcaaaaaaaaaaaaaaaagaatgaaaagaaaagaaatatatcttacagaaaaacccatacagttaagcaaggattatttccagtagcaaaaatgttggataatttaagtggttacaaaaataaactacgctatacccaaactatataatacttgctaaacgttaacaaaatgaaatagagtaaacagataacaaatacatcagctaataattattgagtgcattctaggaggtaggcattgttttaagtactttgcaagtatgaactcatttcacaaaaatcccaagacatgaatctgcatgttaagaagatacatgctcatgctccactgaggaatcaaaacaagaaaactgcaaaatgatatggaatgtaccaaaatatacataacttaaaaggaaaagaaaaaaacctttatacatgcttccaattgttctcaacagtgtttaccccttaggaaggtatgtgttttcaggatgggaagagtgggcttcctttctttaatgccctttataatgtgcattttttttaaagcatgtagtgttttataatttcaaaaaacactacaaagtatgtacatgtaagactgtacagaaactgatttgaaggtggttagatattttcttttttctattttcaaacattctatgttacttttactatttttgtttgttttgataaagaagaccttcacccctctttcaagatccatttaaaacgccgtcaactactgtcctatgatacaatgaagtgtatggactttgaaatatcacagacctaggtttgaatctgtccattaatgtaatccagcaggcaccaccatagtgaccctggacaaattatttaaccttactgagtcttagttttctcacttgttagagacaatgccaccaatatcaatggcttgcatgaggattaaataaaatactatctccaaaatatctagcacaatgaccaccattaacaaagtctcccatataaaactgtcttcctttcttggattcttgcctaattccaccaacctgaaataactgttcactccataagctttagtttttcctaataaattttatcatgtttttctgccacatttggtgacttgtcttttggtaaacctctggatatcagtaaaggtgtcctacacattgatctccattcattctgactagcagacaaccttcaaaacagtactcatacagtgtgattgttatgtgaattttgagaaaatccaatattaaaaaagctgacaggtgtgaaacagagagtacacttcaccaaaaaaatcaacatactggctaactaaatgacgaactaaaactcacttctccaacctaacaaaaccatctcttaaaaggtctttgttttcaataagctgatagatcaaattaagcccccaacttcagttctatcccagtataatactcaaatcttaccacttttttaaaaatacagaagtggctgggcgcggtggctcacgcctgtaatcccagcactttgggaggccgaggcaggcagatgacctgacgctgggagttcgaaaccagactgaccaacatggagaaaccccgtttctactaaaaatacaaaattagccgggtgtggtggtgcctgcctgtaatcccagctactcaggaggctgaggcaggagaattgcttgaacccgggaggcagaggttgcagtgagccgaaatcccgccgttgcactccagcctgggccacaagagcaacactccgtctcgaaaataataaataaataggccagacgcggtggctcaagcctgtaatcccagcactttgggaggcggaggcgggcatatcacgaggtcaggagatagagaccatccttgccaacacagtgaaaccccgtctctactaaaaatacaaaaaattagccgggcgtggtggcgggcgcctgtaatcccagcagtatactcaggaggctgaagcagaagaatcgcttgaacccgggaggcggagcttgcagtgagccgagatcgcgccactgcactccagcctggcggacagagcgagactccgtctcaaaaataaatgaataaataaataaataaaaataaaaaataaaaatacagaagcaaatgaaaatatctgaactgaaaagtttagctatgttaagaaatattcctaataacacatttacaatttgaaaaatcccctttaccctttagggcagtatgacaagcacacacaaaaataagtgcagtgataacaccttgccaccctggagtctttctgaaattttaacgacacaccagggctagggagtgggagggtaaggggactaaaagttctagataaaaagccactttaaaaaccaaataaggttctaagtgaccctgatataggtaaccatgccactagctttaaatataaaaaaagagttcctacagttttaaatttaaaattaaaaacaaaaaaaaaactcctgcaagaataaagtcaatgattttcaggatcccaaacacgtctctacttataaccacccatatcttggaattaaagcttgttagtcaaagtcacaggacatattaacctaactcgttagtgaacactcattagctcaattcaagctccagaacatagtttcggaatacagcacccgttctgcctggccgactgccctggtcagcacaggcactcgctctccagtctgtcgctaagctggatttgatttttaacgctttacaaagagctttgacattaaggaaaaagacgtgacacttaccttgagaagcgaaggcagcctaaccaacttccggttttgttacaacttgtatcacatttcagcagctgggtggagccagttaagccttgagccaaaagggaacctttcccaaactaagctgcagaacttgatttgcaagaccagtgctagttttaggactccatttctgaaaacttagaattctgttttacactaaggaacagtgtttgccaactagtacctacttcgccacaaaaattatagtttttgtgtttaattgcaaaactatttgaaaatacctgttctataatagtgctaagtaaaagcaaattaacttttaaaaagtggaaaaagatcagattgcatagaaccgaaacctttctgcagtgtgaatgatataatgcaaaagaaatcttttattttgcaaattacccctgaaatttaggagttttgtttctttttaagcctttaatctgtttcacaagactcttttgcaaaagaaaaattttagggctaggaaaagacaatgtaattgaatttttaacaatctttgtttttattttgttttttgttttcctgttttttactttttttcttctctttaatgtaattgaaaatattaaacattccatttcagaccttgagtgacattgtaattgcccagtgggttcaccttgcccgctgtctagacagagccgatttatcaagacaggggaatcgcaatggagaaagagtaattcacgcagagctggctgtgcaggagaccggagttttttgttttgtttgtttgtttgttttgttttgttttgttttgagacggagtctctgtctgtggcccaggctggagtgcggtggcatgatctcggctcactgcagcctccccgtcctaggttcaagcgattctcctgcctcagcctccccagtagctgggactacaggcgcccgccaccacgcccggctaatttttgtattttagcagagacagggtttcaccatgttggccaggctagtttggaactcctgacctcaagtgattccacctgcctcagcctcccaaagtgctgagattacaggcataagccaccgcgcccagcccggagttctattattactcaacacagtctccccaggattcggagatcagaatttttaaagataatttggcgggtaggggcttgggaagtgggagtgctaattggtcagattgga

SEQ ID NO: 795 - DNA, 4001 bp, Homo sapiens
ccatattttgtctgctctcgttaaagtattaatcagataatcctgttcatctgcatttggtcaaggaactatatcatagcttcttagtaggaaacaattcatgcattaaaacaaacaaacgaaaaaaaacaaggccgggcgcagcggctcacgcctgtaatcccagctttgggaggccaagacgggcggatcacgaggtcaggagttcgagaccagcctggccagcatggtgaaaccctgtctctactgaaaacaaacaaacaaacaaaaaaaacacaaaaaattagccgggcatggtggcgggcgcctgtaatcccagctactcgggaggctgaggcaggagaattgcttgaagccgggaggcagaggttgcagtgggacgagatcgcaccactgcactccagtctgggcgacagagggagactccgtctcaaacaaaacaaaacaaaactccagtatctacctacagtgtgcgataccaattaatccaatgtgctggttctggtaaaataaaatagttggttccagtaaataaaatagttcccttaagttttacaaatcaatctaataaaacacgctaagagtgtttgtcatagttatatgcttgttgctaaacatgttcagaatttcttaaattacgtggaaaaaaccgcagaactaatattaatgatgaccttttgttgactactcctagtatttctggttataaaaaagtacaggtacatgtttataatgcgttcacattagatgtgttacaacggattttatgaattctaattttgactcaatgttccttcaactgtcccggtaaaaagttaactaagtgaactcctaatgcaacgaaaacacagcacaacactggtttctaattatcattagcttaaaactagtaaaaaatgcccagcacctagtacaatatgcatagtgtcacagagaataggattcttttgcttacatgcaaatctataccaacaccatacattttgaaatgttaaatatattaggggactatctaagaatgtaaagttcaaattaaggtatcttttattttcctggaatacacgcactattttaacagctttcgtctgggaaagtggtgccttcagggcaaatgcacgcactacgtaatacaaagaggtctggtcagtttacgactctgaactgagaggcagattcaaattgaaacctctggtataatgggcctgaggccattttgagaaataaggggggcggactggtggaacagactgacacgtaaatcccgcccagaaaaaggctgctttcaagtcccttccttgtagaggtgtgacggtgaatggtactgaaagcggttttaattgcgagagagaacggaaatgagctgtaaaggctactttaatgataaatcccttcccttgctatggctccaggacagaccctagttctttcccaaactcattaccagaaccttccattaaattgtgtgaaactaactgcgctttatcccctggaagaggatctttatctaaactagctcactggagacacgcgagtgccgcagaagcgggagaaagacttcaggccttctttgcgtagcacgcgtcggggttctaagtggattaggcaccaagaacacaaaactgggttctggtctctaatcgttattaccaacatggggaaacgtgtctcttcacatttcagcccggaagaacacctctttcctcttcctcatgcgcttaagggtagcggcctactcagtcagcggccaattaccgtgagctttcgggattccgccgcgcggtccacacttacctgccgggctctctgcagtgcatctttgaaagcgtcgttaactcctccaccaccaccgccgccaccaccgccaccagctgagccagaagaggggggaggcactgttgaatagtctgccatggttgcactataagagccgctgccgcctgttcagagacttcctctcagctaacagctaagaaagaaagaaaatggcggccgtcgaagctctattacattcttgcgcgaccatcgtgccgtaaaggggcggagactgaaggaacaaaatctcgcgatgtttccgaggcaacgcgctggtgtgggttagggctgagaaagaacgacaggaacagagacgtcgcgaggattaagtttaagacttcgcgagaacagaatttcttttggcacctcctctccgcgcgttcttggggtgaggctgggtaattgttcctgcagggtggtgggtgatagtggccagttgactgcgactgtgtttgggtggtgggaagcctgaagaaaaggttgtttcttaccggtcgctgcctcagggaggtagtgcggtagaattttccgctatgggtcattctcggtgtccgcggggaagggcgtgacaacgacgggcgtgacggcgaagcaacagtgtctcgagagcgctgccgcccggagggcgccaggagaagtgcgtccgagacgccgcgcggtgatgctcctgaaaacgtctgcccggcgtagcgggaacccagcatgattttcagggtagtaaagtgtccctgtattttacttacagactgtccgattttttagttttatcacgagggtgggtgttgaattcaggctggaagcctgttagttctcgaccatattttaagttttttgtttaaaataatgtggatgaggctctaaaagtatgactgcccttttctttatccaaaaacgtgattgttcttaaagttcagtgttagccagatttaataacctagtatatgtatgtgtccatggccatttttattaagggtttttttttgtttgtttgtttgttttgagagtctcgctctgttacccaggctggagtgcagtggcgcggtctcggctcactgcatcctccgcctcctgggttcaagcgattctcctgcctcagcctcccgagtagctgggacaacaggcgcctgccaccacgtctgggctaattttttgcgtttgtagtagagacggggtttcaccgtgttagccaggatggtctcgatctcgtgacctcgtgatccacccgcctcggcctcccagaatgctaggattataggcgcgaggcactgcgcccggcctgttaaggtctcttaagttaagaacagcattgtttcttgaccaaaatagattttgtagcttcttaggcgtagtttctcccaccccatcctgtgggtactcaaatgtaagatcatattctgaattgtcatcacaggactaggtatatatatatatatatgtgtgtgtgtgtgtgtgtgtgtgtgtgtgtgtgtaaattggtattttatgttatgtacttcagttaccaagtaatgccagacatttcttcagaccttctccaacatatcgtggcatgtaatttactgtgttaatagtagtaagctccaggaatcgtgaggatactttagaagtcttactctttattattgagtatatcacagtgactttttttttccaaaattatttgtttaaataacaaacaatgaggtaaaatgaactttctcgactttgtggcattttgtcttacttggttaggtctaaaaaaatactttttcagcagctcttaagagtaattgtgagaaatatatatatgctgcattctttctgaaaacctaaaagtaatgtgttcatttgcttaagcaccaaaatagcagttaatatgaatgtagatacaggtgagccatcatttccctttaatcagcttttaaggcagtagtatccatttatagctctgatgatctttttcagtgttcatggccatccctataaattttggtggaatttgcatttgaaaaatcagtgcacgtatgggactacagatttaatcataatgtatagaaaaacagtaaaagcagtgttgggtgtgcggctaggtagaaattttccagttgtattttgaaaatgtcttgattttttcatattttattaattaggcaatacaatcagatcttttgatcaatgtaatttaccacagtgctataatttaccctcaa

SEQ ID NO: 796 - DNA, 4001 bp, Homo sapiens
agcctacataaattgcctctcatttattatagaggtgacaaaagacccaataactgggagaaaaggcaagtgttgaaataacaaccaaatcactcaatatttaatttgcttttatggcacaaaaataggtaatgcactttatggttcaatcattggccagagtagggaactccaggatttgaagggccagatagtattttaggctctgtgggagcacattcctctctgtagtgtattcttctttaaaacattttacaaccctttaaaaatgtaaaaaccattctcacctcatgggccttaaaaaactggcagaggaccaatccctctggccagtttgcagaccctggtgcagtggaaacaaccttgacgtcatgagacctggagtctaggacattatattccttcctctctttgggccagtcatctcatccatgaaataaaaggcatggaaagaggttatctcccagattttaatttttctcacttgtaagttatggatccctaaggcccctaggagacaaacacttcctctgcttaatcaagtcttatactcccatacatttaatggcaaacactaaatgccagttgtaacttctctttagtacaagtgaattcaaagttcaagagaaacgaaaacccggaagatggctgaggaaccaaggtaaggatggaagactgctctaagccaggggctggggaaacctccccgcctccatttttactcttctccaacccacttctctcccagcagccgaatgaatctttctagaagctgatagtaaccactccctgacttaacatctgtcaatacagggctctcaaggctcactccttcaggacaagcccctgccttgacaacttcatgggtcgtggtctccccttatccccaccccagcgctctctactctgttctctgaaccagccacccccaagttccaacagttctcagagagagtcagacccttcctggacacttcctacgtaaaagggattgagaggagcaaacgaatgactatctgtactgttgcccaaatacactgcacaccagaactcccctctctttccctcttagagacattagggctcaaagggttgtatccttatataacccctttctacaaccatagaagaggctgcagggaggctgaagtgacatgtccaggttcacagttgaattagaaccaggctccacaccactgatttgaaaccctggagtcctgatagtgctgtcaatctgaaagggacatcaggtatggcctaactcagccctctcggtgcacaggtgcagatacccagggcttcccagcctgccatctccctgaaccttcatttatcagtccccagtcaaacgcacctcctcctcctcatcaggtgtgccaggctcactcctgtggccgcaggaggccacacgcgggccccggggtcatgggggcgaccggcagctgcgcgccccagctggccgcccagccccacctcctgtttgccgcccgagccgggaaggggcgccgctccccgggaccacactcacttggcgcccgcggcctggaagaggtcggcccactcctccgggtggaagaagcgcgcagtgaactgcggtccgaagtcggcgtagctgaagccgggcgggtagttgtcgcgcatgaagcgctggtactgcggccgcccctcgccctgccagtgccaccagaaccactcgctgccccaggcgggcaccgagaacacgccccagtggatgaacaccccgaacttggcttcgtcgaaccaggccggcagcggccgagaatccaggctcggccagtctggggtgtagcggcgcggaggctgggcccgacgcaccgactcggccgctccgaggaagagcagcagcagcaacagcgcgggacccgccggccgcgacctcatccccggagcccgcatcgctacccctcagcgacgcggcccactcttaacgcgcaggtgcccgcgggcggctccgcccactctgactaacgattggcccggaaggaaaaaggggtgggacaacctggacaggttggcccgagtcgcttcctcctcgggtcggaggagcgccctctggtgctcaagaagggaaagacgcagggaggcgttgacagcgcttcgctgaaggacgaataaaaaccttgaaaagggacttaactgcgaggttaaatcgtggaggtgagcaaggcccagtgtgtgcggagaactcacatttaagaaggagtccattgagccggacgcagtggctcacgcctgtaatcctaacactttcggaagtcgaggcgggaggatcgctctgagcccacaagttggagactagcctgtctctataaaaaataaacaaaatgagcctggcgtagtggtgcacgtctggagtcccagctactcgagaggctgaggtgggaggttcgggatcgcttgagcccgggaagtctgggctgcagtgaaccgaaccgtgatcacgcctctgggagtagtccattttgccgcagcaatcctgcaggggtaggctgaagtgagatcacgagttttatttagtgatcacttgggagccatagggggcttttgagttgtcctgtagcacaaggctggaggaggagataacagaccggaagggtatctaacagccctgacagaaataaggaggtagagggatgatgggaagaaacgttatgaaaggagaggaaagagaaaactgggtactgaaagagggagagcgggcaggaccgtttcatctgtctggtatttactgagctttctttgggaattccgaggcatttcaaatagcttagtttgtaccgagataccgccactgcactccagcccctgggcgacagagccagaccaaggaagaaagaaaggaaggaaggaaggaaggaaggaggaaggaaggaaggaaggaggaagtggagagccaagaggacccaggattgcctggcagggaagttccccagttcctctgcaatttgcacatgctgcacatactcaaacgggaggtgaggccattagcgagggaaatacggaagtcagaagtctctgaacagacaaggtggctcacgcctgtaatcccagcactttgggaggccgaggtgggcagatcacctgaggtcgggagtttgagaccagcctggccaacatggtgaaaccccatctctactaaaaatacaaaaattagccgggcatggggtgcgcctgtaatcccagctactcaggaggctgaggcaggagaattgcttgaactcgggaggtggaggttacagtgagccgagatcgcaccactgcactccagcctgggcgacagagtgagactcggtctcaaaaaaaaaaaaaaaaaaaaagaaaaagaaaaggaagaagaagtctcatgactccacgtagcacactcagttcccacatgccagtgagagaatggcagcacatcagagttgggactttgaagatcctaggcaccatcctcttccctacccttcccattgtaccgaggagggaactgaagcccagagagggctggggggctgcccaagatcatgcagctagtttgagtcagaggtgggactagaatacgtgtctccaggtgcaaaatctatgcctttgttcatgctgcttctttcttgcacctcatgagaagtcagagcctatgttgacagaacccagcacttcctcactctggcagtgacaaggagagaaaatgactattgctgaatcacagctgttttcttttcttttcttttcttttttcttttcttttcttttgagatgcagtcttgctctgtcgcccaggctggaatgcagtgctgcaatctcagctcactgcaacctccacctcctgggttcaagccattctcctgcctcagcctcccgagtagctgggtttacaggtacgccaccacgcctggctaatttttgtatttttaatacagatggggtttcgccgtgttggccaggctggtctcgaactcctgacctcaagtgatccgccagcctcagccttccaaagtgct

SEQ ID NO: 797 - DNA, 4001 bp, Homo sapiens
tggtaggaattgagttggcagaaatgaaatggagatgtgtgtagggcattggacgaaggagagagtctgagcagaggcaatggtgtgagccagtgatatgtttggcaaaaatgcatagctgttgatgaaaggagtaaagtgtcagtacctgattaggacaggtgacatgaaaaatgtgaggagactagcatcaaggccatgcctctggctcctggctacttctttaaagtttaaaatttgttttgctgagccctatagagtcactgaattagctattactacagatgaagctctgtacactggaggaggaggactcagatatgtaacaaccggtttttttctctttctagcccagagtttcttactatgatctggattcgtggggaggaaggctgggtagagctagactcatcatctgctttggtgttcttgggagcttatctcttttcctgccaggtagatagtttttcctttctttccttcccttcacctccagacctccctccttcattttctttccttctctctgtctgtctgtctaaaatatagttgggaagaaaaaggtatcagccatgggaacctctggtgcacaggtgtaaggaacaaagagcttttctgccttagaattaatcagttatctcctactcactgtagctcagaagttgatctaccttttgatgttaaaatgctaaatctcacggaagttataaaattttctctcttcccacccctaacaagaaggaaaaacaagtcctcaacagacttatatgcatgtagtaacttattacacagttcctaggtgtgaagcaagtgtctgaccctcaggaagctgctccctctgcagtgctcaggtaagaacccatcaccatcgcccacctgctcaccctccctgcttcccaccccaggacaccacacctctcaggaattacatgagatatggtataaaaagtttttttatttcaaaatgcaaaatggtggtcattgtaataattaataataataacataaaaagcatttatccttcctccctagtgcaaaatggtagacgcatttagataattcacacagtgttggaaatgtcatgacaatgcagtgctgcacagcagcaaaactcaatcccaaactcctttggtggatgcttgtggtaggtcagttctagatgtcagcggtttctctgaagttaagtccaaataaaaaacagcacgtgctcctgcactctcccagcggagtcaggctcctgtgcgcgcgccccctctgtctctccattcctctctcggtctgtctctgtctactgcgtctccctcccactccgctggtctcccacagttcctaggaggcgtgctgccggttggacagggcccggccgccgaggaccgtgtcctgctgcttgcctttctcctgcagggcttgcttctggagagcctgtcgctccagggcggcctgcagctccgccacggctgcctcctggtcccgcagacgtctggcggccgtgaaggggctgcacacagtctccatcaggccgagcaccacgccgaagagggccagcacgctgcccagcacgtacagcttcaccatcttccccttgcgcttctgggccatcatctccttggccagggggatcagctcctggaccgtttccatctcggctctgggctctcggaggcgggaatgacctgcaggaggagcagcaggagaggggcttcagccaccaaagaacggctcccaccaccccgcacccagctaatcttggggagggctcatagaaaggcggactaccttagtggcacggcgcgagcaggaggcagcgcgagctgcagttggcagcggtcagcgcgtccgttggtccgaccgacctcagcgttctcctcctctcggcagctgcagctctcccagttggagactccgccgctggcaccgctttagcgtccgggggccgcttatatcttttctctgagacacgcctcctgggctctccggcccaggccagcgcggtcagagccaggggaactcggagggggaggaagaagaggaggggaaaaggagggggtggaacccggctgggacctggcaggaggtggccacgcgctgagcacgctccgactgtgtgagctagggggcccggcgcgggtgccatcgcagcggggcgcgtgggaaggccagtgtgcacgcgaaggtcccactccaggcgagcgcaggggaggacccggagcccagggaggtgtccgcggacatctctgacatggcggcaaccttcttactggtgtcagcgggtgcacagcttcccttgtccaggacagcctgacattataaataatgagggaatttgggggttccatctaaagaagaaagctttcatttttattcggaagggttgtcaccttcccacgtgtgtggcaatggatcagagaggagaaggcaagggggaaggatctgggtaacaggacagaacaggttacgcttggataaagcaatatgtgctaatattgtttctttcctgcctggttggttttatttagaggtacatgcatgtataactagagtcagttgatagaaaactattcattgatggtgcttttatgcacagaggtgtgtgtgtgtgtgtgtgtgtgtgtgtgagagagagagagagagagagagagagagagaaagagagagagattagtctctttgcctgcgagctgtttccttatgtacttccgtgtatcagggaagagccttcaaattcaaattgttctcacttccacttgagaagtggagttgggagcttgggggtagggggtcaagtatggaaggggctgttggtagaagttcatctgccattttagaatggaagtatttcatgctctcctcaataattctctgccaccctcctgggtttgggggtacaacttcactgctccagctcaacttcagctttgaagcagtttgtgggcagaagggcgtgtagtagacagcttaggtaagaatccagagtgtgagtactcttggacgtgtgaagatgtaggattgattttgaccagggttagctgtaatcacctggggctgagggagcgttctagtttggctttggttatggatatgctagagttagcaaacttggggaaaaagagaggcaaattggccaaagggttagcaaacttggggaaaaggagaggcaaattggccaaaggcctttaagcagagaaagggagggggcaggggaaagaaggggaaatcaaactggccagaaaattgcaaaggtcagtgatgcaatcttgcaacagcctttgcagtcggtcggactgagccctgaagggcgggtcgggggaaaaggctgtctcagggatcaaatattttagtttttgaattgttaacagtaatctttctttgggggtctgaagcaatttctcagatgattcagtttaaaaaggcagcaataacaactaccctttgccttgactattaatagttcaggcaagggcttgtgtgtggagaatggtcaaggttatctaaatagcttatttgaaattctatgttttagaatttagtctgagtgaaggtgaccaggggccaaatagaattgattattcctggaggactgtgtttcctgcttattgttcttttaaccttgtcaggcaggaaaattctgtaacaagggttcctgccaagtttaatatcagtcttggcattttctttgaatcttccttatagtttcagagcaacctctgataactggcagaaatgattagtgagctttcccaatatctgtgagggttccaaacccattgacttctggaagagcatgtgatgtgtgccctgatataagggctgtcacgtggtttccattctgaaggtgagtcagcctagcttgggacccaaaattctgaaattgactggtccagtaagcatttcctgtgtttctgtaactcagagacgcaaaccacacgtcttcctaggtcagaaggctgtaatttacctggggttcccctttcctgtgatttgctgtgttagtgcacatcacc

SEQ ID NO: 798 - DNA, 4001 bp, Homo sapiens
caaagtgctgggattacaggccagagccaccacgcccggcctgtttgttttttaaagagacagggcctcactctgtggtccaggctggagtgcagtggtgcaatcacggctcactgcagcctcgacctcaagcgatcctcccacctcagtttcccgagtagctgggaccaccagtgggcactaccacgcccagctgattaaaaataatttttttttctctgtaccgacaggggtctccctatttcgcccaggctggtctagaactccagggctcaagggatcctcccacctcagcttcccaaaatgctgggattacaggcgtgagccactgcgcccggccaaaacctttcaataagtgtgtgttttaataattcatgaagtgcttgagctcttgacaacaaagtactctattatccaagataattagagtaattacttttgtttatttaagaatctggatggggcagttttctctttattgtcatcaaagcacgtgtgaaaatacatgcctaagaacatctctactggattgggtggaccaagtgattagatgaaaatatggtcttggatggccaaaattttgttacatcgttgatagtaagccatagactgtccttttccaaagacgttgggttgggggggaccccctagagagaaagcccttttgggaaaagggagaggaatgggatgacctctggctcaaggaagtatgtgaaaacaggagacagccaacggaaagaattgcaatggaagaatctatggttcttttagtattgctcaagtccccactgggcggccagctgtacaaacaactgtgaaagaagcagaggcgaggccgggagccgtggctcacgcctgcaatcccagcactttggaaggccaaggcggggggatcccctaaggtcaggagttcgagaccagcctggctaacatggtgaaaccccgtctctattaaaaatatacaaaaattagccatgcatggtggcgcacgcctgtaatcccagctactcgggaggctgaggcaggagaatcgcttgaacccgggaagcggaggttgcagtgagctgcaggttgcagtgagccgaaatcgcgccactgcactccagcctgggtgacagagcaagactcagttttgaaaaaaaaaaaaaaaagagcaaaaaagcagaggcggggcccgtactgctctcattcagattaccgagttcactagtaatctttcaggtcattatttgggtcagataatgagagtcgccgtttccctctctatcataaaccctacagttcctcacaccaatgtctgtctgaaagatgggaaccaatttggggcagggggccaaactcagcctcggcgacaggcctcggccccggctccgcgccgccccctagtggtcacctccgcggcctgggcttcccttggtccagctccccagccccaggtcttacacccacccccttcttcacctccttccagtcccctccccttcctcccgacagcatccccttcctccccgtccccctcccgccgctgcccccgcttcagtgacggggagccgcgaggtctgcacccagaagtccgaggctgggctgggaagcggtgtgacttctcacggcactttcctttccagccctgacgccccccggagtccacacatctcttctttcctcctcacctcctcgtccgggacgctgccggccacgcttccacggagcccgccagtttagtcccgtttccttctctagttaagactccctgtcaaggacggttactttttgcccttttcatgtgtgcatgttttgggggcctttaaccccccctcgtggagaaacagaggcaacaaaatggcggacccggaaatgaaggcgccgcgagtaagatttctggcggaggaatctgtgaagggaaaatgatcagaaaactcatgctcccattctaacagaaagatgatgcacccccgaggttcatcgcctttctgctgaggcacttctgaggtggaaaagtgcgtcaccgaggcatgctaggcaggactatttaacggggcggaggactgctggttacgtatcttgcgcgtctgaatagttccagcaggggacggatcctaggtctggtgttggcgccaagaacctggcgaactgctgagggagactcggagcgtgcgtcagtcatgcagattgcgtcttaactcttggctgcttcttcggggtccggggcggccaggtttagtttgacaggaaagcctcgtttccttatcccaacctcggctgcagctgtttgggacgttcctggctttgtgcattgggttctggtgcctgatggacacatttttccagttacaggccgaatgtaaggaccccagagccaagctgtcagtgagaacagtgaaacaaataactgagtcatttcttttctttctttcttttttttttttgagacggagtctcgctctgtcgcccaggctggagtgcagtggctcgatctcggctcgctgcatgctccgtctcccgggctcacgccattctcctgcctcagcctccggagtagctgggactgcaggcgcccgccaccacgcccggagatttttttgtatttttagtggagacggggtttcaccgtgttagctaggatggtctcgatctcctgacatcgtgatccacccgcctcggcctcccaaagtgctgggattacaggcgtgacccaccgcgcgcggccttttttttttgagacggagtctcgcttcgtccgtcgcccaggctgaagtgcagtggcgtgacctcggttcgctgcaacctctgcctcccgggttcaagtgattgtcctgcctcagcctccccagcagctgggattacaggcgtccgccaccacgctgggctaatttttgtatttttagtagagatggggttttattttaccatgttggccaggctggtctcgaactcctgacctcaagtgattggcccgcctcggcctcccgaagtgctgggattacaggcgtgagccaccgcgcccggcctgagtcatttctttttggaggcctgcaagaggatggagcatgagtttgcaaatccatttagtcactttatttaccaaacagttgatccctgtctccacccaccaattgccatggctgaaggactctgaaggggcccttcaaaactcagtaaaaatagaaaaggacgcactacttatccttcctggccccattcttcgttagactgggaccgtctttagatgtgggcttttcatggcctagagggaggatttgtctttttttctcccacctggggacttctctagatcatccttatttagggtatagtgtcatccttatttatagtacactgcccaattctgtcctatccatattggtatttacagtttctcttttgagagttggagtcttgtctcattcccgtttacattctgtttggctcagtgctttcctatagcaggcacacaaaaaccagaagttaagcagataacatatttgagtgaattcgtttatcttcttaggcacctaggagaattattacctgaaatataatgttggtagtcagtgggcaagcagaagagtggttgtacctgtctccctaactacttttctaattttaagttgattttgccctttcattatctgttcaatgcgaagttcaccatctaatgtctaaatgctactcaaatcattcttcctctaagttgaatattattatagaaagataaaatgaggccgggctcagtggctcacgcctgtaatctcagcactttgagaggctaaggcgggcagatcacctgaggtcaggagttagagaccagcctggccaacatggtgaaaccccgtctctatgaaaaatacaaaaattaaccaggcctggtggcaggcgcctgtaatcccagctacctgggagcctgaggtgggaggatcccttgaccctggtgggtggaggttgcagtgagcggtgatccccgccactgcactccagcctgggtgacagagtgggaccctgtc

SEQ ID NO: 799 - DNA, 4001 bp, Homo sapiens
ttccaccctggggagaccctccaggcctgcccctagacgccaagagcaggaggttgagcccagcacatgtgtgtggacaggatgacctcaaaggagaggctgcagcatgcagccaggtggtaactgtttttaactagagagcgaaaggggagctgagcaaagcagtgcacctctcaccaggcaaggtgtcctccccaacggcacccctcttccagggatgggagtgactgcaggcccagaggccccccactcctggctgggccgtggccttccagctttcctgcccaaggaaacaggcacagaatcccttccccgtcagcccaggagccagatgcaggccaggattaaggatcttcagattttagagcagggaaatggtggacacagaggctgtggctgggggcggcctgaagaatttcccagcaggaagtgtatataaataatcccagaagtaggattaataaagatgagaagagtctcacgtccatgcgggacgggacttgctgccaactgaattctggtgtcgaacttgggctaaaactttggggtttcagagccgtctggatttcagcctcttggctaagtggccgtgggcctgggctggcagctgtccccatggctccagcacagcatccacaactgtgccccgagcttcgtccttcctctcaccttgaaggaggggaaggacaaagggagaaaggcccactgggattgatggaagaacaaagctcttcccaggacacgggctgcttagagccaggggcagtgccgaccccgcggtctcctgatgggcacacggctgcagctggacccaggccttctgggctctgtcccccgcacctccaatgggaaaactctgacacaccgccccgtgttgggtgctgccatctctactacggtcagccacctctatatctacatcttcacggtctctgagatcctgaatgctgggggatggctctttgctgtttcttctgcagtctttgcactgaggtgattttcaaagacgcccctaaatgtcctctcgtgactcctagggaaggcggccagccaggccccgtggtggggccaagttgcctgggtggctgaggagcccatttcagatccccagagaggagatgggggggcactgtaggccagagggggctccagccccggggggcctccttctcagcctcttccttctctggggagtccctcccaaaatagttaagaaatccaccatctcttttctgtggccaggggcacctggccgccgtccacctgcacacactcaggagttctgcccacgccatttgaaacggactctgaaaggagaccccggaggccgggcccaccctccacagcgagacagcctcctccgtccgtcccagaccctccggctggggaagctcactgggggaacggggaacggctcccccgcaaagggagcagcctccccgcaccgagttctcaggtctttcctctcctcaaggcacccgccgggcagggacccgcgagtgccgcggacccggggaccctccacgcgcgccgcggagcaggggaaccgggaggctccgacgccctcgcccagcccaggttcagcaccaggacggcggacagcaccgggcgggggcggccagcgcgggggtcgccgcgtcccgagcccaagggcagcgtccgggcgagtccaacgaggggcccgcggggcaagaccccggggagggaggacgcggggctctcagacttggggtccggggcccggggctcgcgccggccgctctcccagccgctatctcgggccgacgcgggccccccaccgcccccgaccccgcgccgcgcggaccccgcccgctcacctggtgccgcggagctgctgcgcgcagaggagcaggagcggggccagcagccgggcgggcgcgtccatggccgcggcgggctcgggacggggtccgcgcaaacttggctcccggcggccgcacaggcggcacaggcgggcgggagctgagcgagcgcggcgcgggcgcgagggggcggacggagcgcggagcccgccccgagcccgccccagcccgccgctccctgcagcccggccccgcccgccgctcccctctcctccccccgccccccgccccatcccgcccccctccgccagccgcgccccctccctcgcgggcagctctccctggccggggtctggctctccgggaccgctgccctcacgcgccgcagacgggaccctccgggtgtcttcatgggaggcgacaccggcacaagccccgcgtggacactgtggcccacgggcgcggcagaacctcgtcccgaggcggtttgtggggggtcgcacgtctgcgtggctgcttctggctgcgccggcggtgggtggggagggggccagtccctgcagctgtcaggagagagacccccaccagcggctgcttccaaaaccctcctgccttcgcgggagctggggccaggcgactttgggagcaagtcctgatccctggggaccctcgacgggggcggggagaggaaaagcaggtgggggctgcgccgcaggccgcagttctgactctccacacctctcatggccccaggcccgccctccacacccctaggatctgggaaagggaaggcctcacactctcctgccttggatcttttgaacataaagttgcgctgccatttcctgaagctgctcacaaactttaatcattgttgtgtcagttattcacttctgggctcgcgatgtcgctgacagcacagtgtcaacccctcgtgaaaacacttaaaaatggcgaagctgtccccgaggctgcgtgcttctggatgaagggccctggccgcacaggggcaggtggaggaaagtgcagagagggatttgcttcggaatttccagcccaatccctactgtgggaagtggaagaatgaggctggttccagtttgcttgctttatttatgttatgttatgttatgttatgttatgttatgttatgttatgttatgttatgttatttttcgagatggaatctggctctgttacccaggctggagcacaatctcggctcactgcaacttctgcctcccaggttcaagcaagtctcctgccacagcttcccgagtaggtgggattacaggcacctgccaccacgctcggttatttttttgtatctttagtacagacggaatttcaccatgttggccaggctggtctcgaactcctgaccccgtgatccgcccgcctcggcctcccaaagtgctgggattacaggcgtgagccactgcacccagccctagcctgctttcttaaatcaaggaacggggctctaacaagcccaacaggtctcaactccaaggcccccttcccggctgctcactggcccctgccgagaggggtcctttgggtacagaagcactgacctccctgtgttcccggggttcctgtccgagcctgtgctctgcacacgtgccccttcccacgtgtcccttccatggattaatttaggagttaattcatgaagaggtgcccagagcttggcccggcccccggtgagaggcattatttttattcttccccctccagaacaggggtcttgtccgtcttctccttggtggtgtattggatgaagtaggtgctcagcaaatgtaggaggaggtgcagactccacatctgcaaagtccatgcacccactgcggccagcacgccatcactgcctccggacagtgccccgccctccctgtctttccttcctgagctttggaactaagcagtgagagtggttcatggtcgcaatcccttcaatatctgcgaagagcttatctgaggatatcttggtgctgatcacctctgagaagcagcgttgatcttgactcactggatccgattcattcaggataagccacaccctattgccattttcttcacgctcctctattatctggggcataaaattaacattcaattttcttctttttcttttaagagacaaggtcttgctctgtggcccaggctggagtgcag

SEQ ID NO: 800 - DNA, 4001 bp, Homo sapiens
aaaaaagagcaaaatttagaagacaaaagtagcacatttacccctgaaaacataacttccctacctaccaaaggtttttatcaggaaaaaaaaaaagagccattaaaaaaatgcaagattgcagagaaaaaaaattccactctatcctcttaatgtatttctagggaattaacaaggtttgtctcctacacaatttctatttttagctctgactggcagagaatgaagctgactccttaatgaggggtgagccaggaattcatttggctttatctaatctgccctgctaaaggaattagtcacgggaggcagtgcagatgtaggtagggagtagctgggctgactgctgactcacagggatctcttccgctgctggcagtccccagcatgcttagacatgttctgtaccacagaaaatcctggtgatgaaactagcacatctcggctgaaagtccagccacactctagtcggacaaaggcagccaccctcctgacccccacctaccacagatccacaatcaggcaacccagccctgactcccgtccttccggggctctaccctgcaggctgcagtcccccagtcccttaccgtcaccagcacgcagtgcaggtccgggggctgctcggcgccctcgctcgccgcggggccagcgtcggtctccaagagcaggagctccgccagccggcccgggttgctgacgcgcaggatgttgatgtcgttctcgcagcaaaacgcctggatcagggtgaagtggatctgcagagccacatctctgtcgtcgtcctcgtccgccgccagcaggcacaacaccacgttatcggggtcgctgggggcagcgggcggggccagtgagcgcagaagcgcgggcgccctcaaccactgcccgggtccctgggggtcgccgcccggcccgctcgccccctcccttccgagacaggcagaaaagcgacaggaagtggcgcggccgggcgaggggcgcccagccaaggcgacctcccgggctggggcgggaaggggtgccatgggggacgcgcaagggccccacttacacgttgagcagcttggccgcttcgtacaccccgacagtgatcgtgcgctgactcagggctttgctgagcacttcctccagggcatcccccaccttatccatcctacacgcgggcaagggcgaggggtcccgtcagccccggtgccctcggggccatcgccgcccccctcgtccggtaccacgcccctccctctcgaatgcaagcaccaccgcgcacctgggctctacgaaaacccggcgctcccgcggccccgtcaccccccatgacccctgcacgcccaaggaccgggcgtcccgtgagaagtcccgagagtgcccctgccacaggctgccagccacgggagccgcacgggcagcgacggccactgctgccctttgcaaaggccccggcggggctcgttcgggttggggggcacgctctttcagtccgtgggagctccacggagagtcccgagggagcaagggcgggagttgccctgtgcaaactttttagcttcctcccctgcaagccttccacagcccggctgcaccggggagcgcggggtaggtaagagaagttcgggccggaagagtccgcaggccgactcacctttcggtcttctgctctccagccgagaattcctccaaagtcatattgcaaactgcaggtcgcccagggagagagcgcggcgtgcgggctgctcctgccacggctagcgcgcgggcgcctgctttctgcactcactcacaggcgccgctccggcagctcaggccctggcgctctccggccgcccctcgcccgcccgggctcctcctcctgtgccagccgccgcagctccggccacccctcccgccttgcttgctcgctcgctccccggacctcgcctcgccacgggccgcacgacactaattgggccgctgcctcccagccactgcctaccagccactggaggacaaagggccccgctctccggggttatcctgccaaccctcagccaaccaccttccgcctcatttgcatgcagcttggccattgggctatgcaaatcagcctgctccagcaatttgaccccagctcctggagtcaggttgagaggagcggaaaagggaggagccacgcgggaggcgagccgagggggcgggggcgggggcggtgccgagaggggaaggcgggtcccgcgcgcactcttatccggttggcggggaccattgggagtggggggctttagcagaggctagaggtggcctcagcttgggctgaagcaggctgccaagtgtttttctataatagttgcggcacttttttcttattatcttttcatgtcttttgttttaaggggtggctattaaaatctatttccagggttaatgcactgaagtctagtaattattagtaagcaggttacattaaaaaagtgtctccagacctccggggcaaagtttacctcagaagtgttgtttatctaagtctaggcgaagctgcttattagcagtagtattatttcggtgccctgatggctggtttgatttatttttggaaagctgcaagggttggaagctgaaaaaagaaaaaccaacccgtttgtattcagggatggcagggaaccaagttagaatcttttccacagaaagcagaacggtttcccacctgcccggtgtaactgggaaatcgtgagctggtctgcgtggggagctggtgaccacatgtgggaatccctggcaacccagattctcctttctcaaagagccttgcccaaacaaggatccttctggacgcccaccagctgagagacaaccatctgacacccacacagcccacaagtctaaattcaaaatgctctcgatatgccctaagcttcctttcctaacgtatgtatgtcgttaccttccacagagagcctcctatgatctcactgtgaattattgatgttagatgctgaatcatgaagctgtaactataggaagtttttagtcatatgctaaaatttcacctttgagataatggcaacttgtaggtggaaagcagacctttaaaactgcaaatggtagttacacatttttgaaaaacaaactttaatatatagactctcactgagtagttcaaaagtcccttcctttgttttatggtttatgcaataaaagcaaaaacatttcttaaacctactgaagtcatcaaaagtggtgaaaatggctcccacatgcttgcattcaaaacagtgcttgcattattaaggttgctgtacagccaaaggtcacagaagtaatttctgcaaaggtacctggaagttttgcacccttatgtttttatcactctagacaaaatattctccagctctcttgatcttaatttggtggaaaagaaaagtgataggttttctggttcatttatttgagttgtcattttgcactcattttttcactgtgttgtcagccatggacaacatttgagtaaagaaatggtcatggtcagtgcataattcacctaagcatgactatgtatctcatatctatgccttaaatcttaacatttgatgtctttcttaaagaattcctcaacattgaaatttaggtaggttaccgaagcattttcagttttgcagacaaaacctgaattacacaatctagcctgagtcatcatttggcgattgttaatatgttccgtggaactccaaggttctatccactaggcatttcttagaggttcttgggaagaaaatgtgatcacagcaagctgacaaagaattagggaatcatgtgagtttcttgacagcaaggacttcatcagtttggtgtcctcagctcctagtacaatacctgcatttagtagaagcacagtcaaggtttattgagttgaatagaatttgagagttaaataagatatcagaatcctgcagtcctgtgcattgcatgaattctaacatattgcacatttaacgttagttcaaaaacacttttgcctgtcttcttctata

SEQ ID NO: 801 - DNA, 4001 bp, Homo sapiens
atctcctcacctcggccttccaaagtgctggaattacaggcgtgagccaccgtgcccagcctgcacccacctttttgaagagacgctgtagggctccctggtccaaaatgtccatctcctcaaactccacagagcggcctgtcagctcctggacccgccgcaggctctcaggcagggagccccctcctggtagggtacatgtaggccacatcatcacgacatggggtgctgtgttcccagggactagccagacacacattccccgcccggtggtggaggtggaacccagggttttgcttctgccatcccctcaagtagccccagccccactgccccgctcaccacggaaggcattatggaagttatcgatgaccacaggcaagtagccagcctccagcagctccagcaccgtgtggctgccaatgtagccagccccacctgttaccagcaccttctctgccatggcacctggcccaggatacagagtctcagaggtggctgaggctgcctgctcagagcttccttcccactggaatcctgccccctaagctcgctttggaaggaggcggcagtgtgccctaggtaccagactggctcagaagtcagccctggggcaagtctgggtaccatcactttctggccttaggctttggaaattaattagcctcttggcctcagtttctatctctgtaaaacagagctaataattgtataaacttcatgaggcagcgtgagggttcagtgaggtgatcttaagggcccgccacagcagagctggggagacctgacacacaggcaccttattttctagttccacttgccttggagttggaaaagatggaatctgaggatccacacttctttgtccaaggtgactgaggactggagagtcctgggcagaaggaaaatggcagcacgattgggactccagggtcgcaggaaggggttctgtctgctcagacccaggcttgtccaatgcctccgccttcgctaggtgtaaactggctcctgggcgcagtgactaatacctcctgctctaggcggcccccaccccctttccctcaagggtcagctgggaggaagcaggaaatagatcacatggcctcaagggtgaggtcctttgccaggcaggctgaggccagctcaggggcaaccacaccgtggttggtcctggagggggccccaccccaacccccgctcagcctctgcccatgccagggccagcccggtcactcctggctcagagttaggaatcccgcccaacttaggctactctgggtgggccgtgtagacgtggacttggccaggtgcgcacctccaccctgaacaaactctgcgggtagtacggggaggaagccccagacactgaggcctttcattcccagcgaccgggcccgctgccgccttcctccacgctgcctctatccccttctgggctcacgcagctccaacccacttgaccaagagccctctgcgtgccaggctccgtaccaggcacttttgcatgattttcctgaattcccccagcatctcggtgagacaggtgttatcactggcactttacagatacagatactagggccagagaggtgaaacagttgcccttcggtcccacagctggcgacagcgggctggaatctggatcgccaggctcgcagcccggccctctccccaggcggctcgcccttcccccaccgctgcccgctggactctgcccgccgcgccgaagccgcccccgcccccgccccgcgcctggcgcggaccccgaaagtggtcgcagagaggccctgggaagcacgaaagctggtctgaggccggctgcgcccccgacagcggagtgaccttgctcagccgtcgcccactcggttttcccagtctgtctgttggagggaaggggagctaggccgtgggcatacgagggcggctgggtctcaggctgggctttgggctgtagcgcggagcggggccgagctaggagtcctcaggccggcaatgaatgaaccccggccgccccagcccgggcagcggggaactgggacaaagggggcgggcctgccctggagggacgctgccaggaacacgacccgcccctcggaaactccctcgctccccgcggactccccggcccctcgcgagcccacccggcccttcattccgtctcccgaacctgctcgggttcccgcgccccacgcttgctgcagaggcaccgcctcctacgcccgagccgcgggccctttaagtgctgacggcccactccggccccgaccccgcccctccacgcccccaaggaaacatgtcactcgggttacggccactacggggagggcgggaggacaaaaggcctccgcgctgtgacgaagactgcgcagcgcgcgcccgcggaaggcggaagtgggcggtgccaccccgcgagaggcgccgccggcgccaggtcccagtagcgggtgggtccttgccggtgccccgggtccccgcgctagctcgtcccaacccctggaagagggctgcgcttccgagggggcagggggcagagggtagggggcccacgcctccgccccactctgacccgcaggttttcagacttgccggtgtgtgccaaaccatgaattcaaaatcttgaactacccgatcccacgggactaaggcaggagggggtcgcagggggcctggtgctggaagtccagtttgcaaataaaccaaggagctggaggaagctgtcaggccacactagcggttccagcgctcttggctctcagcccccacctgccgggaagggtcggtctgcactctgccttccacgacggcaggttagaaaatgattgtttgtttacaatgaaaagtagtagagctagagaataatatgcacaaaatgtgacatcctgcgtgatgaaaccagagcaaaggagccctaaatgcaggagcgcacaggtgtccgcgcagccgggaatcagccagcgcctgcccgcagagtccagggaaccgacaggtgagcgctcccgggcccgggagcgccagggagaggccgggccaccgaggcccaaagcagcaagtgtgtcctcaggggagcttgtgcaatagccccagtcacagaggcaaagctcagaaacaaccccgtcgggtgttctggccagcaactgccgcaagcagcctcctgagtaagcccaaaaccactgatttccagtcactatggatttggggctcaggtggggaaacagggaggaaatccaaagattaataaactagttcatagtctccattttcctctcagagtgcaacatggtaaagtattttactcccccacgcgcatgtatacacacagctgcacaaccgaatgctggaattatgatgtgccattcaacctttaattacataagctgttttcaaaaatcacattcagcgtggagattttccagagatgctggagttggcagacggccaccacgtagctctccactttccacaaatggcctctgccagcttgggaagaacctccatgacctgtgtcctgagaagtcagagagcaagggccccacggccatggcagggtggagccgtgtagagggtggccaggtggccagctcgcggattccatccagagaggagactcaaggatcatgctaagtagggaacggggttcccacacgtcctcaggcattcaactcctgggccagggtccgtaacaaagggagacttcagccctcaaagcctctcactcctcaggtctgggcaggaggtccttctgccaagcagctcctcctgcccttcgcctgctttctgccaggagagacctctgtgtagagctggctatgaggtacctgcaccatttaacctattctcatttccatgtccccatccatgaatcatctgtgtgtgcccctatttccacatcatccccagggcttcaggtgggcaaggggctcagagtttacaggtagcctgagccactttggagctagtttttctgttcagggcttgacagataaagtttccagcttccagaa

SEQ ID NO: 802 - DNA, 4001 bp, Homo sapiens
ccccgcccggtggtggaggtggaacccagggttttgcttctgccatcccctcaagtagccccagccccactgccccgctcaccacggaaggcattatggaagttatcgatgaccacaggcaagtagccagcctccagcagctccagcaccgtgtggctgccaatgtagccagccccacctgttaccagcaccttctctgccatggcacctggcccaggatacagagtctcagaggtggctgaggctgcctgctcagagcttccttcccactggaatcctgccccctaagctcgctttggaaggaggcggcagtgtgccctaggtaccagactggctcagaagtcagccctggggcaagtctgggtaccatcactttctggccttaggctttggaaattaattagcctcttggcctcagtttctatctctgtaaaacagagctaataattgtataaacttcatgaggcagcgtgagggttcagtgaggtgatcttaagggcccgccacagcagagctggggagacctgacacacaggcaccttattttctagttccacttgccttggagttggaaaagatggaatctgaggatccacacttctttgtccaaggtgactgaggactggagagtcctgggcagaaggaaaatggcagcacgattgggactccagggtcgcaggaaggggttctgtctgctcagacccaggcttgtccaatgcctccgccttcgctaggtgtaaactggctcctgggcgcagtgactaatacctcctgctctaggcggcccccaccccctttccctcaagggtcagctgggaggaagcaggaaatagatcacatggcctcaagggtgaggtcctttgccaggcaggctgaggccagctcaggggcaaccacaccgtggttggtcctggagggggccccaccccaacccccgctcagcctctgcccatgccagggccagcccggtcactcctggctcagagttaggaatcccgcccaacttaggctactctgggtgggccgtgtagacgtggacttggccaggtgcgcacctccaccctgaacaaactctgcgggtagtacggggaggaagccccagacactgaggcctttcattcccagcgaccgggcccgctgccgccttcctccacgctgcctctatccccttctgggctcacgcagctccaacccacttgaccaagagccctctgcgtgccaggctccgtaccaggcacttttgcatgattttcctgaattcccccagcatctcggtgagacaggtgttatcactggcactttacagatacagatactagggccagagaggtgaaacagttgcccttcggtcccacagctggcgacagcgggctggaatctggatcgccaggctcgcagcccggccctctccccaggcggctcgcccttcccccaccgctgcccgctggactctgcccgccgcgccgaagccgcccccgcccccgccccgcgcctggcgcggaccccgaaagtggtcgcagagaggccctgggaagcacgaaagctggtctgaggccggctgcgcccccgacagcggagtgaccttgctcagccgtcgcccactcggttttcccagtctgtctgttggagggaaggggagctaggccgtgggcatacgagggcggctgggtctcaggctgggctttgggctgtagcgcggagcggggccgagctaggagtcctcaggccggcaatgaatgaaccccggccgccccagcccgggcagcggggaactgggacaaagggggcgggcctgccctggagggacgctgccaggaacacgacccgcccctcggaaactccctcgctccccgcggactccccggcccctcgcgagcccacccggcccttcattccgtctcccgaacctgctcgggttcccgcgccccacgcttgctgcagaggcaccgcctcctacgcccgagccgcgggccctttaagtgctgacggcccactccggccccgaccccgcccctccacgcccccaaggaaacatgtcactcgggttacggccactacggggagggcgggaggacaaaaggcctccgcgctgtgacgaagactgcgcagcgcgcgcccgcggaaggcggaagtgggcggtgccaccccgcgagaggcgccgccggcgccaggtcccagtagcgggtgggtccttgccggtgccccgggtccccgcgctagctcgtcccaacccctggaagagggctgcgcttccgagggggcagggggcagagggtagggggcccacgcctccgccccactctgacccgcaggttttcagacttgccggtgtgtgccaaaccatgaattcaaaatcttgaactacccgatcccacgggactaaggcaggagggggtcgcagggggcctggtgctggaagtccagtttgcaaataaaccaaggagctggaggaagctgtcaggccacactagcggttccagcgctcttggctctcagcccccacctgccgggaagggtcggtctgcactctgccttccacgacggcaggttagaaaatgattgtttgtttacaatgaaaagtagtagagctagagaataatatgcacaaaatgtgacatcctgcgtgatgaaaccagagcaaaggagccctaaatgcaggagcgcacaggtgtccgcgcagccgggaatcagccagcgcctgcccgcagagtccagggaaccgacaggtgagcgctcccgggcccgggagcgccagggagaggccgggccaccgaggcccaaagcagcaagtgtgtcctcaggggagcttgtgcaatagccccagtcacagaggcaaagctcagaaacaaccccgtcgggtgttctggccagcaactgccgcaagcagcctcctgagtaagcccaaaaccactgatttccagtcactatggatttggggctcaggtggggaaacagggaggaaatccaaagattaataaactagttcatagtctccattttcctctcagagtgcaacatggtaaagtattttactcccccacgcgcatgtatacacacagctgcacaaccgaatgctggaattatgatgtgccattcaacctttaattacataagctgttttcaaaaatcacattcagcgtggagattttccagagatgctggagttggcagacggccaccacgtagctctccactttccacaaatggcctctgccagcttgggaagaacctccatgacctgtgtcctgagaagtcagagagcaagggccccacggccatggcagggtggagccgtgtagagggtggccaggtggccagctcgcggattccatccagagaggagactcaaggatcatgctaagtagggaacggggttcccacacgtcctcaggcattcaactcctgggccagggtccgtaacaaagggagacttcagccctcaaagcctctcactcctcaggtctgggcaggaggtccttctgccaagcagctcctcctgcccttcgcctgctttctgccaggagagacctctgtgtagagctggctatgaggtacctgcaccatttaacctattctcatttccatgtccccatccatgaatcatctgtgtgtgcccctatttccacatcatccccagggcttcaggtgggcaaggggctcagagtttacaggtagcctgagccactttggagctagtttttctgttcagggcttgacagataaagtttccagcttccagaagcttctggagattcacaccctttgagaaacaagttagaggatgcggtaagtcatggtatgccctcaacaccagggaaaacatcagcatggacagacaactgtgatactgaaaagtaaaggtgaagataaacaggctttttccttgacagcggggcaccagctgcctgtgagctcctgtctgtctggcacctgggttattcctctgactccccctcatgtaagatgcccaatctctgtcatggtttgtagtgccactacca

SEQ ID NO: 803 - DNA, 4001 bp, Homo sapiens
gcaactgcctgagccttagcttcctccttagtgggggtgttcggaatcccacccctgggctcagggtgggccctgaggagtccatcgatcagtggagccagggcactgtcaagggggccctcaccttgtctgcctggcacaggtcccggatcatttcctcgatgaagaacttggacttgccgtaagggttggtacaaccacccgtggggtgggcctcatcaaggggcaggtactgggggttcccgtacacagtggctgagctgctgaacaccaggttcttcaccccgtgggccttcatgatctggccgtggagagatggcatcagtgacctctgcctcacacattactcccaccctgttactcctccacaggagaatggggctgaggtgatgagcactctcatttacagatggggaaactgagactgggaggtaaagacatgagtccaggatgatacagcttgggctctgtgtttggcactgcctgccaggctggggtccagctggacaccctcctagtgtctgtgccctgtcccatgcctctcacctccagaagctggatggtcccggtcaggttaactctgtaataatccagaggcttctgcaccgactcgcccacggccttgagccccgcaaagtggatgaccgccataaagctgtactgcaggggtgacatggccagaggttgctctactggttttagtccttggcaatgccctcagcctgcctgcctgcactcacctttttttttttttttgacagtctcgctctgttgtccaggctggagtacagtggtgccatctcagctcaccgcaacctccacctcccaggctcaagccatcctcccatgccagcctcccgagtagctgggaccacaggtatgggctaccatgcccagctaatttttgtatttttctgtagagatggggtttcactgtgttgagcaggctggtcttgaacacctgggctcaagtgatctcctcacctcggccttccaaagtgctggaattacaggcgtgagccaccgtgcccagcctgcacccacctttttgaagagacgctgtagggctccctggtccaaaatgtccatctcctcaaactccacagagcggcctgtcagctcctggacccgccgcaggctctcaggcagggagccccctcctggtagggtacatgtaggccacatcatcacgacatggggtgctgtgttcccagggactagccagacacacattccccgcccggtggtggaggtggaacccagggttttgcttctgccatcccctcaagtagccccagccccactgccccgctcaccacggaaggcattatggaagttatcgatgaccacaggcaagtagccagcctccagcagctccagcaccgtgtggctgccaatgtagccagccccacctgttaccagcaccttctctgccatggcacctggcccaggatacagagtctcagaggtggctgaggctgcctgctcagagcttccttcccactggaatcctgccccctaagctcgctttggaaggaggcggcagtgtgccctaggtaccagactggctcagaagtcagccctggggcaagtctgggtaccatcactttctggccttaggctttggaaattaattagcctcttggcctcagtttctatctctgtaaaacagagctaataattgtataaacttcatgaggcagcgtgagggttcagtgaggtgatcttaagggcccgccacagcagagctggggagacctgacacacaggcaccttattttctagttccacttgccttggagttggaaaagatggaatctgaggatccacacttctttgtccaaggtgactgaggactggagagtcctgggcagaaggaaaatggcagcacgattgggactccagggtcgcaggaaggggttctgtctgctcagacccaggcttgtccaatgcctccgccttcgctaggtgtaaactggctcctgggcgcagtgactaatacctcctgctctaggcggcccccaccccctttccctcaagggtcagctgggaggaagcaggaaatagatcacatggcctcaagggtgaggtcctttgccaggcaggctgaggccagctcaggggcaaccacaccgtggttggtcctggagggggccccaccccaacccccgctcagcctctgcccatgccagggccagcccggtcactcctggctcagagttaggaatcccgcccaacttaggctactctgggtgggccgtgtagacgtggacttggccaggtgcgcacctccaccctgaacaaactctgcgggtagtacggggaggaagccccagacactgaggcctttcattcccagcgaccgggcccgctgccgccttcctccacgctgcctctatccccttctgggctcacgcagctccaacccacttgaccaagagccctctgcgtgccaggctccgtaccaggcacttttgcatgattttcctgaattcccccagcatctcggtgagacaggtgttatcactggcactttacagatacagatactagggccagagaggtgaaacagttgcccttcggtcccacagctggcgacagcgggctggaatctggatcgccaggctcgcagcccggccctctccccaggcggctcgcccttcccccaccgctgcccgctggactctgcccgccgcgccgaagccgcccccgcccccgccccgcgcctggcgcggaccccgaaagtggtcgcagagaggccctgggaagcacgaaagctggtctgaggccggctgcgcccccgacagcggagtgaccttgctcagccgtcgcccactcggttttcccagtctgtctgttggagggaaggggagctaggccgtgggcatacgagggcggctgggtctcaggctgggctttgggctgtagcgcggagcggggccgagctaggagtcctcaggccggcaatgaatgaaccccggccgccccagcccgggcagcggggaactgggacaaagggggcgggcctgccctggagggacgctgccaggaacacgacccgcccctcggaaactccctcgctccccgcggactccccggcccctcgcgagcccacccggcccttcattccgtctcccgaacctgctcgggttcccgcgccccacgcttgctgcagaggcaccgcctcctacgcccgagccgcgggccctttaagtgctgacggcccactccggccccgaccccgcccctccacgcccccaaggaaacatgtcactcgggttacggccactacggggagggcgggaggacaaaaggcctccgcgctgtgacgaagactgcgcagcgcgcgcccgcggaaggcggaagtgggcggtgccaccccgcgagaggcgccgccggcgccaggtcccagtagcgggtgggtccttgccggtgccccgggtccccgcgctagctcgtcccaacccctggaagagggctgcgcttccgagggggcagggggcagagggtagggggcccacgcctccgccccactctgacccgcaggttttcagacttgccggtgtgtgccaaaccatgaattcaaaatcttgaactacccgatcccacgggactaaggcaggagggggtcgcagggggcctggtgctggaagtccagtttgcaaataaaccaaggagctggaggaagctgtcaggccacactagcggttccagcgctcttggctctcagcccccacctgccgggaagggtcggtctgcactctgccttccacgacggcaggttagaaaatgattgtttgtttacaatgaaaagtagtagagctagagaataatatgcacaaaatgtgacatcctgcgtgatgaaaccagagcaaaggagccctaaatgcaggagcgcacaggtgtccgcgcagccgggaatcagccagcgcctgcccgcagagtccagggaaccgacaggtgagcgctcccgggcccgggagcgccagggagaggccggg

SEQ ID NO: 804 - DNA, 4001 bp, Homo sapiens
caggaactgaagcccaccagagtgaggaatcagcctccgggaggcgaacgagcacgcttgctctttctaatcacgtgtactaatgaaagtggcagactaaggaaagagaaacgccaagggtggcttatgtgtttggttttctttgcatgaaaggcagaaagctttgccaggtctcaccagcacaccaggctatgcagagtggccaaggcacagtttaccgggaagcaaagttttaaaaatcattccagttttacacgattatatctctgaatggactgcacggcttttgctgcctgcatgctctttgctgttcaagaataaaccaagtcttcgcgtacatatactacctataccattttttacaaaaacaacgctaagagtacaatgtcagctcagaagctaggccgattcagcacgtggaaagagggctttatttctgcccttctagataaaacaaatccacgtaatttaccagaaaccacataaggcacccattccacctaacatcttcggctatgaatgaatgaatgaagcaaagaaaaaacctctgaagcagccaaaccccggcgtggacatttaggggtctgacttcagaactgaagtctgttcatctagttagttccctctggcttgtttcaggataccactctcttgttccaacccaaccacccgtagtccatctccattaactcagaattttctgggtttgcggtgacactaaatgtcacagtaacgagggttacaggaattcggaaaagataacgctgctttcaaagccgaggagccagtaaaacactacaaacgtcccctgccggcatgctccagcacacagcccgacgccctgctctcccggccggcgctcggccgcaggaccgcgctgtcccggctcctctcggcgctcaccatcctcccgaatgcccagggcccggccgtccggagcggcggcacgaggacgcggaaccgcagagcggctcacacggtccccacagccagatcactcggcccctggagcatgttaaaaacacagccacagaagagggattctccctgaagcggggagtggggatggaaaatgcaagcgcaggaggccacgtccggctcgcgcgggagggccgggggccgggttgggcagagggtaacgctggggccgcaagggaacggccgggactggcctcgctcggggcgcaggggcgcactggcccctggctcgcacgggccctggggctttacttggcacgggagcggccgcccctgccccccaaaggtaaagggcaaagaaggtggcagaaacacggaacccacgccccgcggagtgacagggggaaagggacgaggatttgcagccgctggtatcaaagggctgaaaagaaacttggactcctctctcctgctgtacatgacgcgttggaaaagcggtcgcctctctctcctctcctccccaccccctttgtgtttcccaacacccccatccctaaacttccaaccgcaggggatggggctcccggcggccggacaagactcgaattacgacgagcagagagaggggcgacgtccacgagagggggcagagaaaggctgcgggggccgccctttcggagcccggcgtgcgcagaggggccgggtgcacccctgccctgggcactcggcgcggaggcccgggacgagggcgggcgacgcgagcggaggtccgggcggaggagcgcaggggcggcgcggagagggcaggggacaggggcgcagggtggggggtgggcgcaggggcccggccgcggcagggcgctccactcaccttcctgccggcgccgccgcccgcgcccccggccagcgcagagccgccccccgagtacatgtagtaggcgatgcccagcacccacaggaaggcgaagcagagcagcatccgcgagcgccgccgcattctcccaactcggccgccggcggggccgccgctgctcgcgagtgctgcctgggccggccgcgggcgcggtgggggccgggggaggagcggaggaaggggaagggcgcggcggcggctcctcctcccgcgcggtgctactgctcggcggcggcgcgcactcggcgcccgagctccgccccgggccggcggcgccgcgcggcaccagagcaggaagcagcggcctcggaggcggcgaggggggtcagggagcaaagggcgaccaatcggcggcggctgcgggggccggggcgcgggccgcgggaggggactgccgcgtctccatggctgcagcacgccgggctccgccgtgagggcctgggcgccgccccgcccccggccgcccgcccctcagcgtgctccccccgccggccgccccctcccccgtgagtgacaggtggctgccccgggacccgactggagcgcgcgcacacgtgggcaaagagccttgctcacgcacacggggcctctcgattacgggggcggtagtggcctcggtgcttcctgcccagactgtcacctcttcagccttggtctttggggccacctcagacccttaacgggcttgctcttattggccaactgacctgagtttttggtgcaaaccgcccgcttgaacccgactttgctgctgcttgctgcagttttctcactaatcttgcagcaaaacattcctgacccgctggtatcgattttatttatctatataggcagatgtggaggttttgagttggtaggaactgagaaggtaattttcaaaagaacatttttctgtgggtgacagagctatcaatggtagagttgttcttttcaataaacacaaaatgaggaagaaggaaagcaataatatattgtttaaaatcttttctttctcattcgttgcgttctttaaaaagcacattaagcatctttaacgatacaagaaaacgatctgtcttgtaacataatctatgtaaccttggtgatgcccttgcaacacgcaaagcttccagtgttcctaagaaagacagaaattttacttagaacttgatatattaaatgttttcaggagcttctcggtcagaggataatggcagctgcctgatataagtccgtacccatatcctcaacgaaacaaaaacaagccttcagcattacttagagagaatgccatgaactgaacattaaattacttaagtagaagaaagaaaagataccaaattccaactgagctccctccactattgccaaggacttaagtgaagtacagggttgtcacctctttataaatagaaagtccaacaccaagaactaaaaactgaacagaggtcaggtgccttattgatcaagggaagagatttgaaagaaaatgggacaagaggtgagaggcttgaaggagccttgtttctgggaaaaagtcagataaatacgaaaagaagataatgtccttcagaggcctgacaatgaagggaaagaaggaagtcagaagggaaaattacaaatcctgcagaaatgaaagagaagacagccagtcccctccccaaacaccaacattatctattaaaaactgcatttcagtacacagataaaagaaaacactcttgaaccgggaaccctgcctcaaaatgcctagtaacagaaaaacatcaaatcaactgcatttaaagattctgcaaaaagaaaacagaaatcacatttctgatgataaaaaataaatcataacattttcgctgatgaaaacccccacaataaaaaccatgaagcataagaaaattgtaataccacatgtcaaactgaacaaagtgtcacgtatttgtatacacatacacacacacacacatatctaggataagaaatttcaagaactgaagacagactagacaaaaattaggaagaaatgcaacaagggttgagcaaattcaagaaggaaattgaaagtaatgacaaaaactatcccagaaacaaagaataattacaaggtgtccaagggaaaatatattcaaatgaaaatatgtaaaaggacactgaagaatggcaagaaaacaatcaagaaattgaaaataatataaag

SEQ ID NO: 805 - DNA, 4001 bp, Homo sapiens
taaaaaaaagtggcaaaatattttaaaatggcgagtctgggtaaaggacataggtgaattctctgcactatttttgcaacttttttggtaagtttgaaatcgttttctttaaaagtggttttacatgcaatatggtgaccctgaagtttcattctgctgattagataaaaggcagaaacctaaaaacattccattgcaacaaccccacagcccaagcgtctaaaagatactacaacttgcttccctagacggctggcatataaacacccgctccttgtctttcttctaccttcatttactttcctaacacatctccacagacactttcaaacacttgtgcatgacttctagtgtttacaggtaaggtaatgagtaggaaactctatatacattgacttgccttttgtcagcccctagtactgttcagcaccgtggctgtcatttatcaatgtaacattttcatgccagaagcccttagggctttttcctgactgtatagtacagtaagaatagctacatatttgtagcagcacataaatacagcttcagcgtttctgctgccaattcactgtaccagttactgttgtcagagttgtcgggagccctgtacaatttaatgatacattgtgactttgcacaatagaacctttcttataatctgattgtccaatttccttttttctaaaatactttaaagggggacaatacccaatcaggagaaaaggagaaacaaaattatgactgcttaaaaggaacaaaatattaaacactgaaattggataatgggaactcgttcgcacgcccctcccaccaaactgaaagcacatttctatggaggttattataaaaagaagatatggaagagcttgcccaggccctgtcatactcccaggacccacaatgggctgtctttaatgagaggggacactttgaagtactacagttctatcctcagtgagcagctcttagtgacactaagctcaaaatccccacaccccggggacagtgttaaccacctgctgctgtcttcccagaaattgcttggcttgaattgtgactgagaaatagtttatcaaatgtgatttaggttaaaggaatcgattgccctgaacatataaacattaatgatgtgcttaccatatgccaggcactgtttgtgtattattttattaaatcttcgcaacagtcctatcaagtaaatgctctcactatttcagttttatagcagggtgctgttaagtgccttgcccaaggcagctcagcgagtagcagagtcagggagactgagtcactaggaggcacttggcacacttgccggtgggggaaaggaatcttcccattaggcaggacagcagctatctggagagggtggggcaggaaagcgaccgagcacagcatcacgggggcttaggggatcctggggacattctgctgaaaggcagtcttcttgttcccaccttccccgctgtgtaaccctctcatctcaggctcccagggaatatgtcgccgtgccgccagccagcactcatagcactacggcctctgctgatgcttcaccagcccaggctgcccctgagtgagcctgagagttgggcctaggaaggaggaggccagtgtcaggagtgctaggaaaggagactcatggttaaagacgcccccatagccccagacttaaggacatacgtgtactttagtgagaagttctacttactctgtcagccataggggctacgggcaccttgccctgtccacattccacatagatgatctccagccagtgcttttcgttcgtgtacactcttgtatcagagccctttcctcccttcgtcctggggaaaggagccagcggaatcctcctagccccggacgacacttacctaaccccagcaatgccccttcccatttcctacccctcctgcctgtggttgctaccttcctttagggtaagcttcttctcaagacgccccgcagctcctccggtagccagttccttgtgtgcctgcccctgcccccaggcagatccgggctcttgggtgaacttatctctggctcaacttagactcctgcaggtagtttacaaagcactttcacatgcacgacctcaaggtctcatgaggtgcatattactctgctcatcttagaggatgacaaactgaggctcagaaaagtcaggcaacttgtccaaaaccatccatgtaattagccaatggcagcaccaaacacagacccagccagtcatctcccttcaagttcacagtctctctccaccgtcccccaccttcagctgcagagtccccaagactggtcccaccgcacatagatgttctgagaaagtctctcgtttatttatagtttatactccactcacttccaaagataattggagacattttacagaaacccacaaacacatatacataagatgtgcagagctgtgtaggcagaccacgtaactcatgagggattttccattcccccctccccctgccagattgcagatcttggagagctttttaaaaataaaatttctcgagattcccatcccagacctactgaatcagaactgccaagagtggagctgactagtgtatagtgtttccatttgccaatgcaagtagacaaaggagagtagaaacagggattttagaaagagacagagcaagcatacattgtggagctgtggggttaaaaactctaacaggtatgtagggctcatggcaaccctcagagtcccaaagcaacatctccctggtcccacttgatgatggacctggtctaccctagaaacagcccattctgggggcctgaacatccctttgtcatcccagaaccagagaatgcaactatcttatgtgaactgtacatcttgactatacctataaatcctaatggatctgtagggaactaggaccacaattccactttggaaagcaaagtcattgtctgatcaaaaggcaagcttttctaatttaagaataaatgaaggggtattagattatattttggagttattattaattttttagctgtgatattgctattgtggttacttagaaaaatgtcctcattcttaggagctgtgtgctggagtatttatgggtaaagttcttgatgtctacaacttaatttcaaatgacctagcaatgaaagtatttatattgtagagagttatacaaatataggcatagatatagcaagagataaaaacaaatgtgggaaaacactcattgttggatccaggtagagagcataatggggttattattctgttctttcaacttgtatctgtaacttaaacttttcaaaatgaaaagctgggagaaaaagaaaaataaaggcacatgaggaaaatctggtgaataattgcattgaaaatcataacaatttttatagaagaaaagaaaaacccagacattgtagccagacagaaacatctggcatgctcagcaggctgtcaatcaatcagttattcaacaattattcaacaggtgtttattacaggtctgtgctgggcctaggacttctacaaacagtgagaaaaaaaaatgaaaatgtacactatgggttcctgtccttgagctgctaatgattaaatttagctccatgaagattttttgtcctggatataattcactaggaggtttttttaaagcaccccaaattatagctccgttagcaagcaggtttctttaccaggcagattatctttgttagaaacttctgaaccaggaagagaaatgatatgggactcttcaggatgtcggaaaagagaggtttttactaagaaaagtccttaaatcagatcccaaatagagcaacataaaatggtgcatttggaagtcctagggaggggacgggagggcagaattaggtcattgttaaggatgaatgcttgacctttgcagaggtaagtgatagaggagagccctggagagaagggggctcaaaagaggggctggatgagtctgtagacatgatgacgatgggccatgagaaaggga

SEQ ID NO: 806 - DNA, 4001 bp, Homo sapiens
aaaaaaagcagcacgatccaacaagtgtgggccttccctcaaaatatactgaactcctccatagcacctccagaagtggcctccttcccaactaagtactgacagaaatactactctaggacaatacttgaaaggctgctccagcaccaaaataagaatccaagttatcagactgcaaggaagagttcaggtcagcataccaaatgaaaagcaataaagttagcactaaactcccaaacaggataatcaccaacaacatataggcaccatgctgctgccagaaaacatcaaagtcatctgtgctaggaggggaaggagactagatggctggaggacagagatgggaaggaagcttacttttcactttgtacaaccacatgcatgcttttctactcaaaatataaatttttagaaaaaatgtcctaaaaactacaaaagcatcagctcttctccaacacagatctgttaaacctgttttaattccatcagctacaaatccaaatccctcttttgcagtctggcctgaaaacactgctcttgccctttgctgaaatatattaagtatccttcgcctctgctgaaatgtattaagtatccccccatctctctctctctcttacacacacacacacgcacacacacacgccccccaaataagcatttatcagaaatgagaaaactggttctcaggaggctacctgattttccaggggacaacagagaaaaggttgctagctagctcagttagcatccacatgccacccaccaccaagcctccatctccacctcactgccagccctatgagctaacatcttgtgtttggaagttgatgctggggaagaatccaaagaggctaccatacctttatgaaacgggaaagctgtaccgggcgcgcgaatggcacctgaacctctgcactcgcatgagtggctcgctcctcaatgtaattgagagcagggaggccaaaagtactctaagtcccggtgtggttagggaagggtaagttccaccgaccctcaggaactgaactggaagacagatccagtgtgtcccacaagcccagtcgctgtagaagctaagtgcccacatagcctgagacaattctcttcccctacgggagggcgagcgaacggtggacgacgaaataaaggggtaaggttatgcgctcctgatccctttccctaaataaagataattatctggtgcttcctttacccttagattccccattcgtcccatccgcccgcaaacacaagactgagcagggagcggcccccgcaccctgagggcaccactgggggtggagagagttaaaaaaaaaaaggggggggcgcgctagagaggaaaggaggggagcatggcgggcatgaggcagggagtgaaagcggggatggcgggggaaacggggcgtgagggaggggagaaagagtacaaggagacgaaatgaagggacacgagctgggggcgcgcgaggccgaagtgaaagaccgggtcgcgcgcgccaaggggggagaggatgaggtgaagaaggagcgcgaggcgggggcgcgccgtgccggggtggggggagggggacgcaaggcgggggcgcgcgggcgggcgtcggctcgcgggcgcttcccctccccccgcccctccacctttcccttcccccacctccgccaccactgcctcctcccagcctccttcccttcctcgctcctcaccgcccccgggcgggcgggcggccaggctggcctaggccaaagctcctcacctggcggtggcggtgtaactcccggctagctcgcctcctcaggcggcggcggaggcgtcgaaaaaggaagaggcgacggcacaggggatccagaccctgctgacgggactagggacgggggtaggggaggggggcgggccggaccggggcgggcgggcggagcagacactgcggtacagacgggggcagcggcggcggcgacggctgcaccggcggcggcggcaccacacaaacaaggacgctgattgggcagctgccaagcgcctcggctccgccttacccacacgccacgacgcccattgggcgacctaagccggccaccccgccctcatcttctcggccatgccagtagaagactagatgccgggacttcaccccacccttgaagaatgagtggccggagaagtgatgattggcgtgcttaaaacccaatcataaacggaggaggggggatggtctagcgggggcgcgttaatgggtacctctgccagtcccagacacatccgggtcttcgacagcccattaagtgtcgggggtcaaaaaatcgcttcaggctgcaactttaccttagagacgttttggtccccaggcagccgccgtaccccagtctctccaaaccgggattcccctttggccatctctcattctttcaattctaaagatggagactggcgaacggcgatggggtctgcggtgggcggtgtttcgtcgcgacagactctaggaaatttcacgatagaactagctttaggcgcttgagccttgccgtctttttggggtgtggcctgtctccgtctgccaaaggctttgagcttcctggtgttcatcgtacctccgcttggtcctgtcgtgactaaaccacgacagcaggaaaaaaaaaaaagcagctagccaagttgctgaggaattacggtgtgcagagccctcgcagctccttctcttgggaactcctggtctggttaggttctcagcgaggaaacagcctcccaccccgcccgattccacctaattaactcaagggccagctccttttgctggcctccctgcttccacggagcagttaggcccgcctaaactcagcgagcgtttctggagcaccttgaggatagggaccaagtaacagagtccgggtgttaaggttatgatagtagttaacgtttttggaaagagactgtgtcaggctctgtgctaagaactttacatgaagtatttattcctcatgactgtgaggtaggtactgttatccctactttacaaatgaggaaaattaggatcaaaaaatttgtccagttacacgttaagtggtagagctgaaatttgaacccaagtagatgaggaaactaaggctcagagaggttaagtaacttgccaaaggtcagaccgctagttagtgactaagcagtggtttaaacccagaaacaactggttccacaggcattttgttattgttgttttctcactgtgtctcccaggctggagtgcagtggtacaatctcagttcctgcaacctccgcctcccaggttcaaacgatcctcctgcctcaacagcctcccgagtagctgggattacaggcgcgcggctaatttttgtgtttttagtagagacggggtttcgccatgttggccaggctggtctcgaactcctgacctcaggtgatcctcctgcctcagcctcccaaagtgctgggattacaggtgtgtgagccaccacgccagcctccacaggtatttgaacatgttttttaaattatttaaaagtcatgctgtgcaatggaaatgaaattataatggaggacatggcaacttaaagccgtaggtagatcctacacaaacacagacgcacccattttttttttcttttttttctttgagacagtctccctctgtcgcccaggctggagtgcagtggcgtgatctcagctgcctgcaatctccaccacccaggctcaagccatctttccacctcagcctcccaagtagctggcattacaggcgcacgtgaccacgcccggctgatttttgtatttttggtaaagacagggtttcactatgtttcccaggctggtctcataaattcctggcctcaagtgatccacccgccttggcgtcccaaagtggtgggattacaggcgtgaacaaccgcgcccaccgcagcccccactttatttattttttaaattagcgatgaggtcttgctatgttacccaggctgctctgaaactcctgggctcaagagatcctccc

SEQ ID NO: 807 - DNA, 4001 bp, Homo sapiens
cagcacttcgggaggccaaggcaggtatatcatttgaggtcaggagtttaagactagcctggtcaacatgatgaaaccctgtctctactaaaaatacaaaaattagccaggtggtagtggcgcacgcctataattccagctactcaggaggctgaggcaggagaatcactatagcctgggaggcagaggttgctgtgaggggagatcacaccactgcactcctgtctcgccgacagaatgggcagagtgagattctgcctcaaaaaaattttaaaaaaagaaaagaaaaacgaaaagtttcaatggctctatgtcatcttgtccccttcctcctcaccttcttcagagaagtacgatttaagtagcaaattttgggcagggggtgacagggcaaggatgttgagagcagcagcatctgtcatggcccctccaaatcccttcactttctggaacttctgttctggctgcagggtcagtagcaggcctgaggacatccacagggaataagggtatcagtacccagcgggaaactccatggtgatcactgacaccatttacctctaggaggacccagcctggcccagggggtgaggggtgtaatggttacctgtgcccgtgtgattagcctggatgggccccatactcagctccatccgtcgcccactgcgtgtactctcatagcggctgaaggtaccaagggcaggaaaggtcggggggtcaaaggagtcacagtatgtggcattgcagacacacaccaccgagctgtagccgaagcttttagggatgcaggggcgggcacctgggagggagggagtacaagcagagtgaggtctgatgaagacatggagaatggacacatctgctaggagagactgaacacggtttcaaaattcctcaccccttggccgggcgcaggggctcacacctgtaatcctagcactttaggaggccgaggtgggcggatcacctgaggtgaggagtttgagacctgccttgccagcatggtgaaaccccgtctctactaaaaatacaaaaattagctgggcgtagtggtggccgcctgtaatcccagctacctgggaagctgaagcaagagaatcgcttgaatctgggaggcagaggttggaatgagccaaaattgcaccactgcactccagcccaggcaacagagtaagactctgtttcaaaagaaaaaaaacaaaatcctcaccccaaagttggtctcagtcactcaaaaggatttattgagcacctactaaaagtctaccaccagcttactggaaggctaccaaaggactatgaggcagaagggaggctctgtgctacctccccactgccttgactcactcacctgatgcccacgacactgcctgaagtagaagcaatcctgtgaggctgccagccatgatgcttaccctactcaaaggcttgggacattcctgaggacagaatgaggaatgactgaaaagcaagcccctctccacccctcaactactctcctgggcagggcttagctgcctttgggtgcccatggcccggtctcccacattcattaggacaaggcccacagaaacctgggtgcagctctccctgcaacccttctgatgacaactctctgcccaccccaaatcaggatgctccccaccactcttcccacccatttcaacttcgacccctccctccatctgtgccttgctcaaagagccatgatggccctggattcaaagagagtctgtcattcattaaattccagtgccaggattccagaagcactgtgacaatgctgattgggagctctctctcttacctctctggaaggacttgaaaactccatcccctcagggtcattagatgaagagaagaccacaggggttccagagtctctgaaggatagaggatccactaaacaaaaacaaggatgcaggtacctgccttagctataggcactaggttagccctgcaagtaattccggcttcccgatgtggatgggtcatgtgatgactaggagcgtcacatgacacaggaagtgaggcaatcacagccatatttctaaagggcaattggcttcctctcatctgttacagattatatgccctataaaactctggagggcatgtatgggtgacaactttaggaagagcctagaacacagatttgcatggagaatggggtagaggctcctaaatcccagaggatgggaaccacagcaggcacacttcttttttgatagaaatgtcaaaaaggtacaaataaagctgatataatttaaaaaaaaaaacttcactgtgcaaaatactgacactaccaagatgtttaagacagtctttgccctatagaggtgtgtgaggcatggaagtcagacacacagatatttacagataaagacagaaacggtaacaggtgtgcatggagagctctctgagatgaggagggaccattcgtgggtggggaattatccaggatggcttcacagaggaaaaagtgaggggggttattagccagtgaagtgcagggcacaagagggtgggacactggcagtgggatgacaggactggagggagggagtggtcagtgcggctcctctgcagcgtcccttgtttcatcatcagatgcagatggtaataactgttcttccttcctcacaagacagggaggtttgtaaagtcgttcaaaaaccaaagtgttgtacaaagccatatcctcagtggacacaaggaggaagctgtccatggtgtggcctcatgaaccacatcaaatgagatttagcgggagtggcacacacagtcatgacctgactaatcccagctctcagcccatttccttgcctggaaaatggaggcaatgccacaacctcaaagggtggttactgcagtcagtgaggtaagtgcagtgcctgaccacttggtaggcacctgggaactacttgtctcttgtttgtattttttgttgttgttgttttttgagacagagtctcactctgttgcccaggctggagtgcagtggcgtgatcttggctcactgcaacctccacctcctgggttcgagtgattctcctgcctcagcctcccaagtagctgggattacaggtgccctccaacatgctcagctaatttttttatttttagtagagatggggtttcactatgttggccaggctggtctgaaactctggacctcaggtgatctgctgccttggtatccgaaagtgctgggattacaggcatgagccactgcgctggaccccagccatcctttttgttctttaaatgatctcagtgaagtctttctagatacactccaagcaaaattgatcatttcttcttctaggttcctccagtaatttttttttttttggttttgagacagagtcttgccctgttgcccaggctggagtgcagtgtgatctcggctcaagcaattgccctgcctcagcctcctgagtagctgggattacaggagcccaccaccatgcccagctaatttttgtatttttagtagagatggggtttcaccatgttggccaggctggtctcgaacccctgacctcaggtgatccaccagcctcagcctcccaaggtgttgggattatagcaatgagccaccacacccggtccctccagtaattaagtacagtctcagtgagacagcaagtttggaatcctggctacaccatttactggctgtttgactttcaataaatcaatcactctaagcctctgtttcatctataaaaggggagtgataactcctacctcacagaattgttgtgaggtttgagtgtgataatgtgtctctagtacactgcttgacactaaacattgcaacatgtcaggcctctgttcctggagttccttgaaggaatgtcttatgcattctaagtatcctcgtagatagcctggcacaggggtagctgtcaagttgtagaattgaactagttgcttcactatgtcagtagccaccccttccagacttctcacttttcaaggaaacattgcacagg

SEQ ID NO: 808 - DNA, 4001 bp, Homo sapiens
gattatagcaatgagccaccacacccggtccctccagtaattaagtacagtctcagtgagacagcaagtttggaatcctggctacaccatttactggctgtttgactttcaataaatcaatcactctaagcctctgtttcatctataaaaggggagtgataactcctacctcacagaattgttgtgaggtttgagtgtgataatgtgtctctagtacactgcttgacactaaacattgcaacatgtcaggcctctgttcctggagttccttgaaggaatgtcttatgcattctaagtatcctcgtagatagcctggcacaggggtagctgtcaagttgtagaattgaactagttgcttcactatgtcagtagccaccccttccagacttctcacttttcaaggaaacattgcacaggatttgttctgggtagggcaggtaatatctagtaccttacttccctcaagttcattcatctcacagatatttcctgagcacattctacatttgcctctcctgctctattgagtttagaagtccaaacatctccttccacttcccctctgcatagtgagcctcttcttttttggccaggtactgagcaattttttgtttgtttgtttgagacagggtctccgtatgttgccctggatggagtgtagtagcttgatttcggctcagtgcaacctctgcctccagaataagcaatcctcccacctcagcctccagaatagctgggactataggcgcacaccaccacacctggctaatttctgtattttttgtagagacggggtcttactgtgttgcgcaggttggtctcaaactcctaaactcaaaggatcctcccgccttggctttgcaaagtgctgggattacagggtgaggcactgcgcccagtccgcttgttttttgttttgtttttttttttgagacggagtatctctgtcacccaggctggagtgcagtggcacgatctcggttcactgcaacctccgcctcctaggttcaagcggagggtagggaccagtccatcctggcacccatctgcagctccagtgcgaatcccaaccccgacgctcgtcgccgggctccgtgaatgtttgtcacatgtctgaagaacgtatgaattacataaccttcttcccactccacccctcaaaaagcaagtggatataaagacttgaagattttataatctcttcttcattagtaaaatctgaccatccttaccgttaaaaataataatgatggttggccgggcgcggtggctcacgcctataatcacagctgtttggcaggccgaggcgggcggatcacgaggtcaggaattggagaccagcctgaccaacatggtgaaaccccgtctctactaaaagatacaaaaaattagccgtgcgtggtggcgggtgcctgtaatcccacgtacttgggaggctgaggtcggagaatcgcctgaacccgggaggcggaggttgcagtgagccaagaaggcgccattacactccagcctgggcgacagggcgagactccctcaaaaaataataataataacaataataataataatggtgaaaaaggttaagtgcgaacgcagggaggggacagctaagatccaaaggtcgaaatattcattacgcctaccgtcggcgaagagaaacagcagccccaaccggaggcaaaacgaaatcccaccgcagcctgcaaaggcgcctgggcgggactggagactggggccccgcgcagtaagactctgaaggcaggatgcagcccgaccacccgcagccgcgagaaaagcagccctggggagtcggggcgggacctggattggaaaagagacggtcactcatgcagaggcgggactcagagcccttcctcaagtctcattggtcaagttgaacgaacaagtgtcgctggcgagccggagagagagagagagcgagagcgagagagcgagcgagagagagcgagagagcgagagagcgagcgagagagagagagagagagagaggagccggcgcgagaactacgcatgcgtgtcggcgttttcccgccagcacactgttggtggatgggggcgattgaattcccacagtgagtccagcccaccgaagctcagaggattcctaaccttcctctttagagagcctcaggttagggaacgtccagtgcgcagaagctgccccgtgggaatcccattgtccatcgcctcctaatgtttcgtcctggccgtgccctatcccttcctgaggctgggttgttatgatgctgaattattcaagaagtcttgcagcctgacgccatctctgggcagtgctcctcccacctccctgtcttccttggagggcaccacgttgcccctacaagcacagggtcctgaagctgtttacagggccccaccctgccactttagtatcttaacgaatgtttgttgaggacctactgagtgttagacccactgcaatgagcaagtttctgatcttgggaccttaacattctatgggacgacacagatatataaacaaaaataataattttagatagtgatacatgctgaaaccatgggtatgtggccaggcgcggtgagtcacacctgtaatcccagcactttgggagaccgaggcaggcggattacttgaggtcaggagtttgagacccgcctggccaacatggtgaaaccctatctcttctaaaaatacaaaatttagctgggcgggcatggggacgggcgcctgtaatcccagctactcgggaggctgaggcaggagaattgcttgaacccaggaggtggaaggttgcagtgagcccaaatcacaccactgcactccagcctgggtaacaaagcaagaccctgtctcaaaaaaagacaaaatgaaacaaacaaacaaaaaaaaacatggctatgtgatagaatgactgcgatggggattgggtgctcactgaaatggtgagaatggagctaaaacctgatattaggtgatagcaccagatataggggccaagggtttcatgcttggaaaacagcaggtgcaaacgtccttgtgctgtgaggaaatttggctggaacagaaggtgggccagattgtagctgaccatagtctctgggagtttggagatgattctaaatacaatgggaagccattaaattgaggcagagccttgatgtgacgtgctttatcatcattttgctgagtggagaatggattgctgggaaaagtgaaagactgattcagaggttgtggagagaggatggctggagctaggtagctggggaggtggtgggatgtggatgaattcaggataggattggttgtgttggatatgggaaaagaagtcaccatggttcctgagcttttggaatgtgcaaatgggtaatggaggtgccattgagatgggaacagtggaaaaataaccggtgctggggtgggaatcaagagttcagttgtggccatgttgaatctgaaatgcccattagacatccaagcagacatgctgagttggatggcgctcatgggaggtcaaggctggagttatggattaacacatagaaagatggtatttaaagccatggactttagtagtagggccacctatagaaagagtggaggtaggaaagagggcttaggtgagggccctggggccctccaatgttaagcagttcagcaggacaaagtagaagagccaatatttcccttttcaaagggacaaattcaagaagatgctgattatgggtattaattgctgcctcgaggtcaagtgagatgcaggcagagaaatggtcactgggtctgacaccactgtggtcactggaaagtttggtcagagcagtggctgtggaaagataggggaaggagtctgatgggggtgggtgaggagagaatggatgtttaacagtggagggaagaaaaagaaaacctattgctgtgaaaaggaggagcagagttacaattagtggttggaaagagtgtcttgaaagtttcttttttcttttttttttttttt

SEQ ID NO: 809 - DNA, 4001 bp, Homo sapiens
ttccagcacttcgggaggccaaggcaggtatatcatttgaggtcaggagtttaagactagcctggtcaacatgatgaaaccctgtctctactaaaaatacaaaaattagccaggtggtagtggcgcacgcctataattccagctactcaggaggctgaggcaggagaatcactatagcctgggaggcagaggttgctgtgaggggagatcacaccactgcactcctgtctcgccgacagaatgggcagagtgagattctgcctcaaaaaaattttaaaaaaagaaaagaaaaacgaaaagtttcaatggctctatgtcatcttgtccccttcctcctcaccttcttcagagaagtacgatttaagtagcaaattttgggcagggggtgacagggcaaggatgttgagagcagcagcatctgtcatggcccctccaaatcccttcactttctggaacttctgttctggctgcagggtcagtagcaggcctgaggacatccacagggaataagggtatcagtacccagcgggaaactccatggtgatcactgacaccatttacctctaggaggacccagcctggcccagggggtgaggggtgtaatggttacctgtgcccgtgtgattagcctggatgggccccatactcagctccatccgtcgcccactgcgtgtactctcatagcggctgaaggtaccaagggcaggaaaggtcggggggtcaaaggagtcacagtatgtggcattgcagacacacaccaccgagctgtagccgaagcttttagggatgcaggggcgggcacctgggagggagggagtacaagcagagtgaggtctgatgaagacatggagaatggacacatctgctaggagagactgaacacggtttcaaaattcctcaccccttggccgggcgcaggggctcacacctgtaatcctagcactttaggaggccgaggtgggcggatcacctgaggtgaggagtttgagacctgccttgccagcatggtgaaaccccgtctctactaaaaatacaaaaattagctgggcgtagtggtggccgcctgtaatcccagctacctgggaagctgaagcaagagaatcgcttgaatctgggaggcagaggttggaatgagccaaaattgcaccactgcactccagcccaggcaacagagtaagactctgtttcaaaagaaaaaaaacaaaatcctcaccccaaagttggtctcagtcactcaaaaggatttattgagcacctactaaaagtctaccaccagcttactggaaggctaccaaaggactatgaggcagaagggaggctctgtgctacctccccactgccttgactcactcacctgatgcccacgacactgcctgaagtagaagcaatcctgtgaggctgccagccatgatgcttaccctactcaaaggcttgggacattcctgaggacagaatgaggaatgactgaaaagcaagcccctctccacccctcaactactctcctgggcagggcttagctgcctttgggtgcccatggcccggtctcccacattcattaggacaaggcccacagaaacctgggtgcagctctccctgcaacccttctgatgacaactctctgcccaccccaaatcaggatgctccccaccactcttcccacccatttcaacttcgacccctccctccatctgtgccttgctcaaagagccatgatggccctggattcaaagagagtctgtcattcattaaattccagtgccaggattccagaagcactgtgacaatgctgattgggagctctctctcttacctctctggaaggacttgaaaactccatcccctcagggtcattagatgaagagaagaccacaggggttccagagtctctgaaggatagaggatccactaaacaaaaacaaggatgcaggtacctgccttagctataggcactaggttagccctgcaagtaattccggcttcccgatgtggatgggtcatgtgatgactaggagcgtcacatgacacaggaagtgaggcaatcacagccatatttctaaagggcaattggcttcctctcatctgttacagattatatgccctataaaactctggagggcatgtatgggtgacaactttaggaagagcctagaacacagatttgcatggagaatggggtagaggctcctaaatcccagaggatgggaaccacagcaggcacacttcttttttgatagaaatgtcaaaaaggtacaaataaagctgatataatttaaaaaaaaaaacttcactgtgcaaaatactgacactaccaagatgtttaagacagtctttgccctatagaggtgtgtgaggcatggaagtcagacacacagatatttacagataaagacagaaacggtaacaggtgtgcatggagagctctctgagatgaggagggaccattcgtgggtggggaattatccaggatggcttcacagaggaaaaagtgaggggggttattagccagtgaagtgcagggcacaagagggtgggacactggcagtgggatgacaggactggagggagggagtggtcagtgcggctcctctgcagcgtcccttgtttcatcatcagatgcagatggtaataactgttcttccttcctcacaagacagggaggtttgtaaagtcgttcaaaaaccaaagtgttgtacaaagccatatcctcagtggacacaaggaggaagctgtccatggtgtggcctcatgaaccacatcaaatgagatttagcgggagtggcacacacagtcatgacctgactaatcccagctctcagcccatttccttgcctggaaaatggaggcaatgccacaacctcaaagggtggttactgcagtcagtgaggtaagtgcagtgcctgaccacttggtaggcacctgggaactacttgtctcttgtttgtattttttgttgttgttgttttttgagacagagtctcactctgttgcccaggctggagtgcagtggcgtgatcttggctcactgcaacctccacctcctgggttcgagtgattctcctgcctcagcctcccaagtagctgggattacaggtgccctccaacatgctcagctaatttttttatttttagtagagatggggtttcactatgttggccaggctggtctgaaactctggacctcaggtgatctgctgccttggtatccgaaagtgctgggattacaggcatgagccactgcgctggaccccagccatcctttttgttctttaaatgatctcagtgaagtctttctagatacactccaagcaaaattgatcatttcttcttctaggttcctccagtaatttttttttttttggttttgagacagagtcttgccctgttgcccaggctggagtgcagtgtgatctcggctcaagcaattgccctgcctcagcctcctgagtagctgggattacaggagcccaccaccatgcccagctaatttttgtatttttagtagagatggggtttcaccatgttggccaggctggtctcgaacccctgacctcaggtgatccaccagcctcagcctcccaaggtgttgggattatagcaatgagccaccacacccggtccctccagtaattaagtacagtctcagtgagacagcaagtttggaatcctggctacaccatttactggctgtttgactttcaataaatcaatcactctaagcctctgtttcatctataaaaggggagtgataactcctacctcacagaattgttgtgaggtttgagtgtgataatgtgtctctagtacactgcttgacactaaacattgcaacatgtcaggcctctgttcctggagttccttgaaggaatgtcttatgcattctaagtatcctcgtagatagcctggcacaggggtagctgtcaagttgtagaattgaactagttgcttcactatgtcagtagccaccccttccagacttctcacttttcaaggaaacattgcac

SEQ ID NO: 810 - DNA, 4001 bp, Homo sapiens
agagatgaggcaaaatctgtatcatttgagaaagttatggaagtattgtcaaagtagctcattatgaaaaatgttagcatgacagtgacttatcaacactcaactactctcacgacccaaatatttcatttagtttattgtggaaaactttctttttggattcttattagatattttcactagtcaattaatggaagatagaataggatttagaggatttatttgcatcctggctgtatgtaaggaattcaatattgattcacttattaattctcacagtgaataaacatccaacacagtgaatcagtattcatagtttgatgtttacccttagaaaaatttccaaagatttttaaatgtgttccttcctccatcttcaaatgattatgcttatttcactgcaatgaggattgacaaagcttctcacattgccattctggaagtggtaacaatgtaacatacttttgcaaattttataaaactatacaaccatgtgaaacacatggctagggaaccttccaagggctcctaagggtcatgtccaagagaagggccctgaaacttaagcttcattagagtcacgataagatagcttctaagtcactgagggtatgaatgcaaaattgcaaatactgaatgtttcctccagataataaggattaaaagatcaagaggcagataaagagagctacctaggaagttgttcaaataaaatatatttccagcgatacagctttaggatttctgttttgttctgttttccatttggtagggtaggagaaagagaaatagaaagaggaggaatagtaggagtggagaggaggataaggggctgggaatgtgtgtgtgtgtgtgtgtgtgtgtgtgtgtgtgtgtgtgtgagagagagagagagagagagagagagagagagaggagctgtcagaccagaggtgatgaatgaggctagtgtcttgacaaggcattcaggggaagactttgcagaaggcaggatcaaagtagtctgagtgcatggagaggttaaagtaagcaaagatattttctgtagagatgcattacaggagaattaaagaggaaacacttttggccctgctctctactaaaagaagacaaaattggaagcacttcagtgaagcagtggggttgaatttcacttctaagggacagggatcagtgggcactaggaaattagtgagtctggactatttctaaagaaagtaatccattctgaaacaaagttcacaagtgtaataaaaagtatactgttttcatgaatcttcatctttcaggctgagtttcagttttttctttgtctttaaccgtgtcagtgggctgcttactctgcttctcatttgctgttctttccttccatgaaaagaacccgtttgtaactcttccatttcttagctgcatagaagcaggattcagtccatcactgacgatggaaatgtaatcatatccctagtcaacatagataatgtcaacaaagagaaagactatcctagtacatttcaaatgctcagtttagcccctgtctactggtgcctaattcaacacaagcactgtagtggcacttaaggccatgctgtccctgataacaccaggatttcatctgacctgcgtcccacttcaggctcatctgcagcctaatttggttctgatgatgtttaagaaaatgaactgacctttataaattccttcccatccctgccacaaccttataggttccatatcactgagctgagatcctttggagctagagagaaagctgcttgatgagaagtagtaaaagttcttacctgttctttttctccttagttcacgagcactggcttctagcacttctgtgtctctcactggatccctggactaatatttcactgttccgaagttgtagggctgggatttcctcattgatgaaatatttagaagctaagcagatttgtaatggatttagagtaatatgaaactgaaagtacttcgttcaaatcactgactccactaccataaatggaattagtggagtgtgccagtgggagggtttaaagatttctcaaccagaagcttcaaattttttttgttgttgttggaaatcttagagaccatttgttgtctaacaaaatgcccattaggttttgaatacaatgatacatgtctcatggattgagtcaatttgagaaacctagaatgaggaggcatcatgttaattttcagctacaatttcctaaaataatagacacactctcaatggagctgcctattctttgagaggtgcagtacataaggaaaggacatgtttaacacactcatgaacacctaacccctggcacttaatgcccagcacacagccaggagggggctccatgtgttgtactcatgttctaggctcagtactgatggctttacatgaatcgcacaactgaaaactcataatatttcctcatggttttatagaaactgagcacagaaagactttattagttgtctaaaatcataacactgtaactaatctgaacccaagcactcatgatcccataccctcttcttgaaccacttcactatgctgcttatttactaagtgaaaaattgtagaaatattttatttataggttttttatttttaaatttattatagtgtgattttatttttatagattgttttctaagagctgtttgtgttttatgtctaattcagtaatgacttctagcatacagaataagtggcattatctctattttacagcaaaagcaaataaaatagtaaaaagcctgagtgaacatttcatttaaaaatatatttatagtgatgtggtttcactttgttgcttaggttggtcttgaactccttccttcaaatgatccccctgcctcggcctcccaaattgctgggattataggcatgagccaccagacccaaccttgtgtgagcatttctttttttttctttttctttttctttttttttttttttttttttgagatggagtttcactcttgttgcccaggctggagtgcagtggcacgatctcggctcactgcaacctccgcctcctgggttcaatcaattctcctgcctcagcctcccaagtagctgggactacaggcatgtaccactatcctggctaattttgtatttttagtagagatggggtttctccatggtggtcaggctggtctcgaactcccgacctcagatgatccacccaccttggcctcccaaagtgctgggattacaagtgtgagccaccaggcctggccaagcatttctcacttacacattaaaattatatattagatgtatataaattgcagatacagtgtcttttctcattcatactttgtaaaataattttatctaaactctttctatcatccttccttaacactgtagctcctttattattaaaactactttaaagtcttttactttttagagcataacattcttacatctgtcaaaattatttgaaccatttaaaatctctgcagattgtcctggaagtgtaggggtgggttgcccctccacacctgtgggtgtttctcgtaaggtggaacgagagacttaggaaagaaaaagacacagagacaaagtagagagaaagaaataaggggagccggggaaccagcgttcagcatatggaggatcccgccagcctctgagttcccttagtatttattgatcattcgtgggtgtttctccgagagggggatgtgtcagggtcacaagacaattgtggggagagggtcagcagacaaacacgtgaacaaaggtctttgcatcatagacaaggtaaaggattaagtgctgtgcttttagatacgcatacacataaacatctcaatgctttacaaagcagtattgctgcccgcatgtcccacctccagccttaaggtggtttttccctatctcagtagatggaacatacaatcgggttttataccgagacattccattgcccagggacgggcaggagacagatgccttcctcttgtctcaactg

SEQ ID NO: 811 - DNA, 4001 bp, Homo sapiens
tttagcaattacaaacaatgctgcaatgaaaacctctgctaaccttgtgagtgtttatttttatattgctataggagtaactttaggatagcatcctataagtgagattgccaggtcaaaaggtaagagcattttattttgttggatattgccaagttcctctccagaaggatgtatcaggttgaattcccaccagatcatcttgtatctcactgttcagaaaatggattttttttctagatatgtcacattttctgacttaattacaaaattttctttggaaacttttcacattcacgtttagatatttggactgagcaaagctgagctcactaagctcatgtacacagtaataggaacttttacctggggaatcttgtgtcatacatatctccatactttgaaacatagataccattctaacccagccttggtcctgatttcttccaagcccctctacggacagggtctggtcagactgtgggactcaggttacccagtggcttcttcctatcactatgcaggaagccctttgagctaccacaggacatcacttgttcttaatatttgctgtgaatcagcattcacctgttattcactcaagcttggtatctcaaatctgacatgtagaaaatctgctgattttttactcaattatgttaccagattttaacctctctgtgttttaagactgattctttatcacctgcatgtatatcagtttgcatattgctttcagttatttcaggtaatgaagccagcatcaggaaacattctctgatgaaccagggcttgtttttttctgacttctgcttcatggagagcagtatatacacaattgtaggcatatcctgtttaaccaggccttgataatttgataattttgtaaatttaaaatgagcaagaagccttcctgtagtaacatcttaatttgtgtttttgccttgaatgtctcaatccctgtaacttaaaatgatcatgatataacatttataacttctttaacaaacaatcatagactgtaagcattacagctttccttcttctataataaagagtgctttgtttataatatggagtcgattacttctgacttgctctgatgaaggcttatatctaattatctgtttcccatcccttcaggggacaatggcaaaaaaactatttttctgtggtcaggacccattttctcttacaacaatggctcacagacacttctggcaagacttctgtttcattttatagcatgatgtaaaccaccttaaaatgggaatcaatcaatgactgactcagaaaagtagctgcacaaagactgtataagctccctaattataataacgtgttccctctctttgcagatcccaagttgcctaccttcatttacctagagctctacaagtggcaataatgaatgtgatggagccctaactttattaagcagatactaataatgataaagttaatttaagatagtgtcaagaaagaaataacaatttagaaacattcccatctctctatgctggagactagttcacagcaggagcagagagcactaaggaacctgcagccacttgatagggccaggatagtatgtggacttgtgtcccacagcaggctcagctgcggcctgttgtgggaatggtcaatttagataaaactgatgaaccctggtaaatattttcccacccctgccccagtcttacccagatcagagatcctttagcactggaaagaaggttgttccaatgtgaaagtcgagtccttttcctcctctcttttcttccgagtttggctgcactgctttctccctcttttttctctcacggtaactgtggacttttactttacccctccaacgtcctggggcttcctccaacgtccaggctctgtcaatgtcagagacctgacgagagacaagaaaaagaggtaacctctgcaaagaaatgcactaatatgaaacaaagtatcaactaaagcagtgactcattcaccataaaaggaattgttgacagctgtgctggtaagagggtttgtcatgatttctcaaccaggaactttccactttatcattggaaaagatcttagagactgcttgctatattaagttttaaaaaccccttcattgggtcatttaaaatagtgctatttatctcatgtttgtgggccagtttgagaagcatgtggatgagaaagcctcatataatattttcttaggtccaattaccttgaatattagcttgagcactgttaagtgccctgagggaatatctatgtcttatatacttttgaattatcagcacctaacccaggtcctgacacttaacatttaataaataataaataatgatgaaggtaactctcatttatggcacacttgatacagacacagtgataacttctttatataaatcataccattgtattcttattttgtatttgtttattttttagagacaagttcttgctctgttgtccaagctggagtgcaatgacaatcatagttcactctaacctcaaacttctgggcttaagttatccttttgcctcagccttctgaataggtgggactacaaatgaggcatcataccagcgtgtgtgtgtgtgtgtgtgtgcgcgcgtatgtgtgagatatgaagtcttactatgttgtgaggctggtctccaactcctggtctcaggcgattgttctgccttgtcctcccaaagtgctgggattacaggtttgaatcactgcacccttcccccttgcattctacagtaatttcaccacaatgttaccaagaaatttaacaacttgttaatattacaaagctaccaagtaaggtttgaacccaagtcttcctctaaaacccatattattgtgtccggaattggtgggttctcggtctcactgacttcaagaatgaagccgcggaccctagcggtgagtgttacagctcttaaggtggcgcgtctggattctgtcccttctgatgtttggatgtgtttggagtttcttccttttggtgggttggtagtattgctggctcaggagtgaagctgcagaccttcgcggtgagtgttacagctcttaaggccgcgcatctggagttgtttgttcctcccagtgggctcgtggtctggctgggctcaggagtgaaactgcagatcttcgtggtgagtgttacagctcataaaagcagcgtggacccagagtgagcagtagcaagatttattgcaaagagcaaaagaacaaagcacccacactgcggaaagggacccgagcgggttgccaatgctggctccagcagcctgcttttattctcttatctagccccacccacatcctgctgattggtagagcccagtggcctgttttgtcagggcactgattggtgcgtttacaatccctgagcttgatacaaaggttctccacctccccatcacattagttagatacagagtttggacacacaggttctccaaggccccaccagagcagctagatacacagtgtcgattggtgcattcacaaaccttgagctaaacacagggtgctgattggtgtgtttacaaaccttgagctacatacagagtgccgattggtgtatttacaatccctgagctagatacagagtgccgattggtgtgtttacaatccctgagctagacataaaggttctccaaggccccaccagagcagctagatacacagtgtccattggtgcactcacaaaccttgagctaaacacagggtgctgattggtgtatttacaatccctgagctagacataaagactctccaggtccccactagactcagaagcccaactggcttcacctagtggatcccgcacaggggctgcaggtggagctacctgccagtcccctgccgtgcgctcgcattcctcagcccttgggtggtccatgggactgggcgccatggagcagggggtggtgcttgtcggggaggctggggccgcacaggagcccatggagtgggtgggaggctcaggcatggc

SEQ ID NO: 812 - DNA, 4001 bp, Homo sapiens
gtgtatcattttaaaaaattatggaagtattatcatcaaattaaatattggtatgacagtaacttatcaacagtcaactactcttgcaacctagaactttcatttaatttattatggaaaagcttcccttggattctcattaaaaaatttacactagacaataaatggaagataaaataggatatagagaattttttttacatcctggctatatgtaagaaattaaatattgatttgtttattcatgaattcttatgatgaataaagacccccatgagtaaatgtttcattgtttgacatatgcccttaggacaatttccagagatttataaatgtgttccttcctccattttcaactggttatgcttatttcactgtaatgaggatccacaaaacttctcacagtgccattctggaagtggaaccaatgtaacatacttttgcaaattctatacaactacataaccatgtgaaacacatggctagggacctttccaagggctttgaaggggcacgtgcaagagaggggccctgaaacttaagcttcattagcgtcatgataaggtagcctctaactcagtgtgggtataaatgcaaaactgccaatactgaatgttgctaagaaacacgcatgcgcgcgcgcgcacacacacacacacacacacacacacacacacaccccaaaaaaaccaaaccaaacaaacaacagcaacaacaaaaaaccccatgaaataaggactgaaagaccaggaagcacataaagagagctacatgggaagatgtgaaaagaaaataaatttccagcaatacagctttaggttttctgttttgttctgtttttccattttgtagagtaggagaaagagaaatgggaagaggagaaatagaagtgaggaggacgaggagaaagggctggaaagatgagagagagagagagagagagagagagagagagagagagagagaaagtgccagcaagggagatgtcagacaaggtgatgagtgaagctagtgttttgccaaggaattcaggggaggagttttcagaaggtgggatctaagtcgtctgagtgcgtgggagaggttaaagtaagcaaagataccggctttagtagtgatgcattacaggaaattctcctgtaaattctccagaggaaaaactaggccaccgccctctctctctctcaaaaaaaaaaaagaagaaaaaaaaggagaggaagctctttagcctggattatttctagagaaacaatctgaaacaaagttcaaatgtgtaataaaaagtatactgttttcatgaatgttcctctttgatgctgggtttcagttttttctttgtctataaccgtgtcagtgggctgctagtactctgcattacctttgctgttctttccttctggtgaaaagaacccatttgtagctctttccatttcttagctgcataggagcaggattcagcaagctccatcactgacaatggaaatgtaatcatgtccctagtcaacacagacaatgtcaacaaagagaaagactatcctagtgcatttcaaactctcagtttagttgctgtctgctggtgcctaattcaacacaagcactgtagtggcacttagagccatggtacttctgataacaccatgattttatctgacctgtgtctcacatcaggctcagctgcagcctaatttggtcctggtcatttttaagaaaatgaactgacttataaattccttcccatccttgccacaacgttataggctccacgtccctgagctgaggtacttcagagctggagaggaagcaataggagttcttacctgtgcttttatcttcagtccaggtaaagttgtttctgtcacttctcttttctttcgctggatcgctggacttttatttcaccccttcagtgttgtgtagctttctggattttcctcagtgatcaaataattagaagttaagcaacctttgtaatggcttcagagcctaatgaaactgaaagtacttctttcaaggaagtgactcagtaaccataaatgcaatttctggattctgctagtaggagggtttaaagtcaagtttcaaagtttttttgttggaagagatcttagagaccatttattgttttaaaaacatgtccattaggtattgaaaaaaatggaatatattttaagattggagatctgtttgagaattgtagaattaggaggcatcacattaattcttagatataatttcctataacaggagacaattcacaatggagctgcctattcttttagaggtgcagtaggtgaggaaagagcatgttttacacactcatgaacacctagtccctggcacttaatgcccagcacacagtcaggagggggctccatgcattgtactcaagttccaggctcagtgctgactgctttacatgaattacactacttaaatctcataacaagtatttccctatgattttatagaaaccaaggcacagaaagactttatcagttgtctaaactcatagcactataactaatctgaacccagggattcctgatcccaaactctcttcttgaaccaccttactgtgctgcctctgtttggtgagtgaataattgtaaaaatatttaatttatagatgtttttcctctttttatttagtatattataatttgatttttcataaattgttttctaagagcgtcatatgttatgtatctatttcattcatgactacttacatgcagaataggtggtattaactctattttacagtaaaaacaaattgtaaaaaacccttgtgagcatttatttgttaatttagttacacacacataaaaaattatacattatgtatatatgaaatgaaatatattgttctatcttactcatattttataaaatagttttattcaaactcttcctattcttcctgaacactgtagcttcatcattattaaaactactttagagtattttttttttttttttgagacggagtctcactctgtcccctaggctgaaggctggagtgcagtgttgcaatcttggctcactgcagcctctgcctccagggttccagtgattctcctgcctcagcctcccaggtagcggggattacaggcacatgccaccaggcctggctagtttttgtgttttttagtagagatggggttttatcatgttggccaggctggtgtcacactcctgacctcaagtgatccacccacctcagcctccgaaagtgttgggattacaggcatgggccactacgcctggtcaaaatcttttaacctattttttcagagtatatcattgttacttttgtcataatcatttgaaccatttaaaatctctgcaaattgttgtaaaaacatatatcaaacaacaaaacatctattcaagaagacccctacaattatggtagcaatagcaagagtcgatggtacttgttccacaacctgcttcttccccatcttcaattcagattgtcaaacgttccactacagctgggtatggccaagaagcctgttttccctcttctttcatcttccagtcagggataaaatatcccattaggaggggcagtctatgagcatttctcattccgtccaacaccaagttgtagaaactaaattcctggtgagtgtgaccagaagtcaagggctttcaacctcccctgccccattcatacagtggaaggtctaacccaggcttgtcagcctaagaacacgggatctcttcactgtggttcatgtgtagagtggagtttccatgctgagagagacaagcaaagaagaccagaggctcccacccctgtccagtggaaggggccatggctcagaggttttgcccaggaaaagaggccatccataaaatcaaagggcttgaaagctattccccaaaataccgactttggttgaaacaacatgtggaaaaattcaagcatagaaacttgaagaaaattattgctagctgatctactctatgagcaatactaaaagctgatttca

SEQ ID NO: 813 - DNA, 4001 bp, Homo sapiens
gtgatatatatttgagattgtaaatttagtggtgagaattagaagttttcttcattgggagaagtcatgcccttctttaggatgaccctagagggggtgtgatcagctgtgttatcactggttccaagtaaatggctcctgtcctaggaccacactcaccattgcgctttcctgcaagacgattcatgagataggattttcctgtgcggtatagccctacaatggccaccaccaccacgggctgagaaatcttgtcaagaatctctaatgcctttgaattcactgtcagctgctcttcctggttttccactagacaaatgggggccatcatgatggattcagattctggataacctgtaacccagaaaaaaatactcagtagaatacaagatcttgaagtcatccctaagggctacctaaggcacatacatattagctttttgcttgtggaatggtatataaaatttctacattttaatggtatataaatatatttctacgtttaatggtatataaaatttctatgtatataaaatttgtacatttcaaatggaaaaatatttagtttagcatgtcaaagactagtacagatctgttatgtacattatttatgattcttacaagaacgctaaaaatgccttgtcaaggtgatgcataaaataaacagaattagaaaatcaaggcactgatggcagaataattccactcctggaataaataggggcaggatgttacaaaaaggagatgaggagtggttagaaaaggctccaggcattccagaagaatttgctctctcattaatttaataaagagtattgcgtacctaccatgtgctaattaacaccgttctagattctcagcaacaagcaaggaacataattgatacaaacttctgcctcttggagctctatttgttgtaacccagcgagttacagagaaacgccacactctgagacgaattcaggagtcctttattagccggcgaccgagagacggctagtgctcaaaattctctcggcccgaagaaggggctagattttcttctatactttggtttagaaaggagaggttggggggaggggtctagttaaaacaatcctacagaagtaaagtaggcaaaaagttaaaaggataaatggttacaggaaagtaaacagtactaggtgcaggggctttaattctatcacaaggtgatagaagcggggctttgggctttatcaaccagacacaaacgcggggggctctgggtgctgttaaccgggcgaattcctgggaactgcgggtatggcttgccacagtaccttatcagttaattgcattcttggatgtgctgggagtcagcttgcacaagttaagtccctgaggaagcgggtgggtaaggggctgcaagtgaaggagccgagatgcagactgtctggctctttcagctaagggagagtcaactcaggttaaaacaaggtagggtatcacatattctagtgggggacagaaaattaataaaacaaacaagcaaaaaatgtgtatatgtatactagatgatggtatttcgcaggagaaaatgccacagctctgggaggaagcccgaggaggagcagcgcatcctggagacaccggtgcgcctctggtcgccgcctgtggaccgtctagagacgctgggccacacggagcaaagcactcaggggttcaagcagcatcagacttccccgcgaggttcctccactgcctttgtcacccgccagtgtgaagtctccaaccctccccgtgtgcagtctgcgcttgggaatttgttgttgtttgttataacccaaatatacttgaaaggtaaagcttaagagcaaacttacctggtgtgggcactgcagcgtgaagagttctctcacccattgctctgtcctcctgcgcctggatcctcgagaaacggactgttcttagaagctgaaagtccagccggatttacagacatccaagtaagagtctgtgagaaccgaaattgaaaggacatgcactttgtggggagttgactgttggggattttcctgtttatcaagacaggaaactaaaggagcttgaaagtgctggttcctccacaccagactcctgaaactcaggtttgtttgtccctcttccacccttagcttaggtatctttcgcctccaaaatgaatatagagcagcagacatgaatgttgtttcatctacctgtctctcaggggtaattttgtcagggaagaaatttgagtttttgtttgcttttatttttttttacatgcttatatgtttctgtttctcatctcttttctttattttttcattaaccataaaatatgtgtgtgtttgtgtgtgtgtctatggatatctatgtatcctctaacgttgttgcccagaggtgcggtggtggcaagtaaatacttctctttcaaaacacaaacatctcattgaaactggatcttttggaggacaggaggatgattggaccataaaaagcataatttataattaggagtcttacccaggctaccagaaaaatggactcagttcctaaaatgactagccagtttgttaacagagtttgggaaatctatctgaaataaatgggtaatgattccccatttgtgcctatcccttagatcttcctatttgtttagtaatgtctgattaaacatttgcaaattaataagtacaaaattttaggcacttaatcaggtaaaattactggtgccgattttgattcaaaacttaacatttatttcctataagcaatattgaaagtgaaaataaagctaagtcaagttttaaataggaccagtaataagaaatcaggtgcttttttctcttaccattttttaatgtcaggaagtccctctctcttaaaaaaaaaaaaaaagaagaagaagaaaaagtacagggatgactgaatccaggtaaatgtgtttgaaacacctgaatttcaccagtggcacccctttccagataatccaatgttactgacttcagataatcatggaaatgttaatcaagaagaaatttaggctgggtgtggtggctcactcctgcaatccaaccattttgggaggccaaggtgggcagatcacttgagtccaggaattggaaaccagcctgggcaatatggggaaaccccatctctacaaataataataataataaattagctgggcataatggcatgtgcctgttataatagtcctagttacctgggagtctgaggtgggaggatgacctgagcccaggaggtcaaggctgcaatgagccatggtggtcccactgcactccaacctgggcaacagagtgagatactgtctcaaaaaaaattgttaattcacagttgtatgtataatgattgcacatagcaatatgtctatgcacatagaaaatatacatagcaatatgtctgtgttacacagataaaagtctataagtgttcccccaaccactacctccttaaaattagtacttctagctcaggtgatttttttaaaatgtctttctgaattatatgaatttttaaagactttttttataatcacagatatgcacacacatactcataaaaaggaaataacttttattttgataaaaagactctgaacattttttgaatatttttccatatcagattttgagcttcttatttatacattttttgaatatttaaagtgcaatgtctatatgtttttgtattttgtggttaacttgtaattcatttacaagatgtatcaaataaaacagttttttgaaatgagggtgttttactggctcactgattttggaaggaaactggaggaaatgagttgcagatgtttttaatctcactgagcaaggcaaggagacagaaagttatgacgttagtagatcatacagggcaagtgataatgttatctgtgtgtacttactttaatatagttcagaatagtcactgtcgtgtgtgtgtctgtgtttttacaaattgacattctggaggtagtgataagcatatgaatggcc

SEQ ID NO: 814 - DNA, 4001 bp, Homo sapiens
gctagaaaaacaaaagatacataagccaaatctataagcagatattgagagcttacaagatcttatgatttgggatgatgtcactaaggaagagggaatgaatgtgtctgagtgttcagactctcttatgaatgacaatagcattgtatatctacattaataatagtatttgacatgttgtccccaatgtcatctggatagcatctttaatgcttttagtaaagccaaatttctaaaacattattgcagatttaatgtgttcaagccacaaacataactgttgctctgttattcataacttagtgttctgggatgcattctccctaactgcttgagccctataacctttgcaaataaaaacaatgcaagaatggttcaaaatacacacacaaaatgcacattttgcccttgccttaaattagacttgatttccaaccccagccctacaactggctatctgtatctctctggcatttcactcaattctttcagcttgttttctaaaaaagcaaaagtaaataaacaactatttattaacatcagtataactgctggcttatgaaagagagtgagcgagctgcaggagattttaaaaagtgcaaagaaggaaaatgcccaaaaaaaaatactaagagaaaatgctcagaagtggtagtggaaggatttctgaaagaaaacatctgttttcagccatatgattctagtttgggttttgcgcctgcatttgtatatgtagttgttattgcttgcttttgcttattttgcatagtttctggtttgaatttcaaggaaaaggaaaaggctcttattaaggatataaatggaaatcaaactagtacaaaatgcttgaagtatgtgtcatggtaagaaattcaaaggagagaatttcaacgagtgaacagttgccagacagtattgagggatccagttgggcaactgttaaattaggtgattcataatagtaaaggcaatagagtagtagaagcagaacccaacacaaaaggggttagttaagtgagtagatgccaagaaaccaacatgaattaagtcagggctattgctaaaggaagaaatctactttcaaacaaagtacaagactatgactaaaaatacatcactgttttcatgaaacttctctctgggcaacatttttttcttgtccttaatgtttgcaagctacttacattgcatcatattcattgttctttctcatgaaaataatagctatcatagtttttgaaactttcatgctgaagttcgagtcagtttaatcagattttatgaaggacgaaggtaacttaagtggaaattatgatcctgaataagtcataaaattgcaaaggaagaaaaataatttgaaggcatttcaaactcttagtttagtcaccacacacattgatgtctaattcagcaagaggcagacacagctggtacttgatgaattctgctgcctgtctgataagaatacaatttattctttactgaggtctgatataccacatcaggataagctgcatcctatcctttgtagaatgtttctaaaaccaaatgaatcttgcaaatctcttccacctcttgccccagtcttaccgtgtccggaattggtgggttcttggtctcactgacttcaagaatgaagccgcggaccctagcgttgagtgtcacggttcttaaaggtggcgtgtcaggagtttgctccttctgatgttcggatgtgtttggagtttcttccttctggtgggttcgtggtctggctggctcaggagtgaagctgcagaccttcgcggtgagtgttacagctcttaaggctgcgcgtctggagttgtttgttcctcctggtgggttcgtggtctcgctggcttcaggagtgaagctgcagacattcccagtgagtgttacagctcataaaggcagtgtggacccaaagagtgagcagcagcaagatttattgcaaagagtgaaagaacaaaggttccacagcctggagggtgacctcagtgggttgccactgctggctacttctcttatctggccccacccacatcctgctgatgggtccattttacagagagccgattggtccattttacagagagctgattggtctgttttgacagggtgctgattggtgtgtttacaatccctgagctggacacaaaagttcttcatgtccccactagattagctagatacagagtgtggattggcctatttacaaaccttgagctagatacagagtgctgattggtgcatttacaaaccttgaggtagatacagagtgctgattggtgcatttacaatcccttagctagacataaagattctccaagtccccaccagattaaatagatacagagtgctgattggtgtatttacaatcccttagctagacataaagattctccaagttcccactagactcaagagcccagctggcttcacccagtggatcttgcaccgggcggcaggtggagctgcctgccagtcctgctccatgcactggcactcctcggtccttgggccatggatgggacagggtgctgtggagcaggggtcagcacaggttggggaggctcaggcagcacaggaacccatggcggggtgaggtggggagcgggagaggggaggaggctcaggcatggcaggctgcaggtccccagccctgccccaccgggaggcagctaaggccctgcaagaagtggagcacagcagctgctggcccaggtgctaagcccctcactgcctggggccgctccgagtgcaggtccctcagagcccaagcccacccagaactcgcgctggccctcaagcaccgggcgcagccccagttcccacccctgcctctccctccacacctcccagcaagctgagggagccagctccggcctcggccagcccaggaaggggctcccacagtgcagcggagggctgaagggctcctcaagtgccgccagagtgggtgcccaggcagaggaggcaccgagagcgagggagggctgcaagggctgccagcacgccgtcacctctcattaccttgattataaaatcgggagaagaggtattttagagctagtaagaaaactgcttccatgagggactgggcacggtggctcacgcctgtaatcccagcatgttgggtggccgaggcgggtggatgacgaggtcaggagatctagaccatcctggctaacacgatgaaaccccgtctctactaaaaatatacaaaaaattacctgggcatggtggcgggcgcctgtggtcccagctactcgggaggctgaggcaggagaatggcttgaacctgggaggcggagcttgcagtgagccgagactgcaccactgcacttcagcctgggtgacagagcgagactctgtctcaaaaaaaaaaaaaaaaagaaaagaaaagaaaaaagaaagctgcttcgatgagaacttgctgagttcgaactctcgtcttttactttcactgtggtgatttctcatttattttcttcactcagtcctggggtttttgttcttcccaccccattttccctgctcgaaaaaggagacaatttgaatacaaaatatggaataacagaaagggggatttttgaaagttctctgtaggaaatagaaaccaaaaaggaaattcagtgactaagccagatgacaaagggaattgcccaactgttacctagtgtagataggctggatgtatttgacctgacttctttgaaactgcatgtttcctagaaactgcagagaatcctttcagtgccagccatactcctccctgcttccattgttgttgttactagaagagaaatttgagatctttcacagttgttcaaagtatgtggtatttcaaacctagcttgaaatacgttgacattcatctccagtttgggagtaggccaggggaagagctcatatgatttttgaggtctattgttgtgaaatgttagagctgctcacacaggactaagtttattactttcgcagtaggttcagtagctgag

SEQ ID NO: 815 - DNA, 4001 bp, Homo sapiens
tcaagatgcatctaatgccaccaaaaataccagctctatcattcactacttatgtggccttgaccaaggaggtcaagctagctgagcctgttaattataggggtctgtgagttaaatcatacatccaacctggagggtgttttgataataaaacgagacattataagtttatatctttgcatagcatgcaccacacaataggatttcagtaaatgttgaattaaatggaggttactacaataattacaataacaattggtccattagattatatatttcaacaaaatatacaaactataagttactaagaaacaaaaactacaaataaatttttcacggaagcaaaactgtaaagttcaagcacgctgttgctgtacaacctgctcttgtctgattcttcactgaggggagtaaggaaaatggagatcaaacacgaggtcctgatttccacagtgaaatgcattgtaatgtgatgtgtaacgtgttcatcacattacagtgactgcaactgtacagtcccttctttaaagtgaacaataaaggcagctctaggaagatgtggctgctcctgcaaacaactttatataaaccaggtctctggtttcttagctgtgtgggaaccacagaccttttaacttctactaaatgaaatacagctgttcaatcctattcaggactggttttcacactctgatgtacataagaatcacctgatcactctgatgatagtttcttttgctgtgcagaagctctttaattagatcccattctcagcaaactaacacaggaacagaaaaccaaaaactgcgtgttctaactggtaagtgggagttgaacaatgagaacatgtggacacgggcggcggggggttggcgctgggggtgggggtgggaaactcacacactggggcctgtcagtgggtggagggcaaggggagggagagcattaggacaaatacctaatgcatgcggggcttaaaacctagatgacggattgataggtgcagcaaaccaccatgggacatggtggtttttaaaaaaatcttttttattttaaacatagtgtctattcttcatcttttttttttttaaagaatcaactgagaggattgttcaaacccagattcccaggcctaagtatccatctgtttagcaagagctacaagagactctgatgttcctatgggaaactaacacccccctcctcccccaccccctccccacacacacatacacacacacacacacacacgcacacacagagtttggactatataattatttttaagtaataaagaccagtgatgtggggcctaagtttatttctacatagagatttatagagctcttattctgaagctttcctaagtgtgaccactagaaagatagacaagaaactctcccttccggtataattgcctggaagctccttgttctctgcattctggggcttgccgcaggacctgagagagatagccaggcaggcgcccaccagggctcattccaggccactcactgctgtcctgagttgatgatcagggaacagcacatccagggggacgcggcgtgcccggctgtcactggttcaagtggagaagctgagcttccccagaactaaagccagccacagactcctgcaggccaggcagcaggcaccctgcccttcctgcccattcctcagttaccactctgaatcagaaaccaagtcttgagttaggaactaagttgcatttaaaagaaagtgaacatacctgctctatagcaccgcaggtccaagaacagttttcagttgcctcactcacctcttgttttctttcctccttttacttttctgttctttcctttataaaaggaaaaaaaagctgagtaagctagttgtttccacaaatgggatggtgcagtaaaaataaacttggaagtaaaattaatccatgcttttaataaagtgttagcagagccatgcctgaatcatccgatgtgagtttgaggatgggtgttgggtgcaggggtgggaggaggtcagaaaaagccacagatactgcacagtcacaccttagcaagcacaatcctgccagctttcttttgtctttcccatcttagaaggcttcacaggctttcttcttgataccgttcccaggtggctttagtttcctaggcacacaagaaaaacaggaaatctacagtagtcacataagcaaagccttagaaaccaagaatattttaagcatttttctcttagtgggaattcttgagttctggggtcttttgttagtgaagaacttttgatattttaaatgtgttcacacatgcacacacacacacagaagagagagagagaaagagagagagctaaagatattactggtttaaaaaaagaatgaaccatgtcttttacagcaacatggatggaactggagttcattatcttaggtgaaacaactcagaaaccgaaagtcaaataccacattcttactcataagtggaagctaaaaaatctgcatacatggacatagaaggtggaatgtgcagtgcataacagtgtacaagctcctatgagaatctaatgctgctgctgatctgacaggaggcaggtctcaggccttagtgctctctccctactcacctcctgtgtggcccagtttctaacagaccatgctctgggggtttgggacccttgatgtggactatttatccaacaacccacagtttccattggttgagtcttatccccagggactttaactattttgaattcacaagctgcccttgggcaaaatagacaccctttcacagcttggagaaacatctgagtgagaaaaggagaaagactctctacagaggacatagcagcatgctgggactgtctaccatggctgcactgctaaatggatttgagaacagaagcaagtggcagaatgagcagacatgagttttggcaataacttaggctgaggatttggggagtgtggtagactaatctgaatactctattcagacaaagacttgtgttaaaaatgtaaaattctgggccaggtgcggtggctcactcctgtaatcccagcactttgggaggccgaggcgggcggatcacgaggtcaggagatcaagaccatcctggctaacagggggaaaccctgtctctctctactagaaatacaaaaaaattagccgggtgtggtggcgggcacctgtagtcccagctcctcaggagactgaggcaggagaatggtgtgaacctgggaggcagagcttgcagtgagccgagattgtgccactgcactccagcctgggcgacagagcgagactccatctcaaaaaaaaaggaaaattctggattcaaaaatgtttaatattttcaaaagcaatattaaaaattgactaatttgtcatgaatgatcttaaagaccaaattccaagggaaggtgaacgcccaaagagttaagtggagtattgaagctgttttttttctaatagcatttgccaaccaagggaatgtgaccttcagtttggaaggcatttatgaagaggccaaaagtcaaagaccagagcttgtctaaagtaaagagtctagtaggaggcctcctttagatgttataagactaaaccagtgattcttaatacttgctgcacataaacatcaattgaggttctccttaaaaacttgagctctgatccatcaccagagactctgatttagtaagtctagagttgagggtgagtgtgagtgtttttttaaagcctcgccccacctccaggtggttccaattgcagtcaaggaggcaaagaactggagtaaatgtcgagagcaactgtgaactagaactagcagggcaagcaggtttaggactggctagctggaataatttcagtgggctctggggcagagggattgttcttacttttgatatttggcctttcggtgagtagggcagatggatagtggcccagagaatgagagccaacagagaaagtggcggggtgtgggctccaggttggttggtt

SEQ ID NO: 816 - DNA, 4001 bp, Homo sapiens
ttggaaatccctccacatctgttcatagaaagcttttaaaatccttttaacatgtatctactcctttatgtggattataccccagtttattcaatcactcttcaatgtatgggcatttagattgtttcaaatattttgcaattacaaacaatgctgcaatgaataactctgctaacgttatgcatgtgtatttttatattgttacaggagtaatttcaggatagagtcctaccaacgggattgcttggtcaaaagatgagagtatataattttgtagatattgccaagttcctctccagaaagttgtacaaggttgcattcccaccagctcatcttgtatgtcattttctagaaaatggaatttttcctaggtgccccgcttgctcttctgaattaattacaaaatttcctttggaagcttttcacgttcacatttagatctttggactgagcaaagctgagctcgctgagctcatgtatatagtagtagtaatcttcacctgggaaacattgtgttatacatatctctatactttgaaacatagataccattctaacccattcttggtcctgatttcttgcaagcccctctgtgggcagggtctggtcagactgtgggactcaggttacccaatggcttcctcctctcactgtgcatcagcattcacacgttattcatgcaagcctgatagctcgcacctgacacttactctgttgatttttgacttgattatgttaacagattttgaattctctgcatttgaagattgattctttattacctccatgtatatcagtctgcatattgtttttaattatttcatgtaatgaagtcacagcatgaaacattctttgaaaaaccatggcttgttttttgtctgatctctgctgtatagagagtagcatatgcacaattgtaatcatgctatctttatccagggcttgataaattaaatattttgataattttgtaaagttaaaaggagtgaaaagccttcttgtagtgatgctttaattttgtgtttttaagttgaatgtctcaatccttgtaacttatgtgatcatgatacaaaatatataatctctttaagatacaagcaaatatagatgatagatactgcagttttcttttttatcctataataaagagtggtttgtttccactatagagttggttacttctgacttgttcctctggaggtttatattaaattatctggcttcccatcacttcagcagaagatggaaaaaaagccgtttatttttctgtgatcatgacccatttcctcttatagcaatggcctacaggatctgctggcaagcaagaagggcaaaccagaaactaaaaagattgggtatctatggaagatgagtgaaaacagagtatgcgtctgtccaattctgtagcatatactatgctaccataacataggaatcaatcagtcaccggctcagaaaggtggtggcacaaagatgttataaggtcctggattataataatgtgttgcctctttttgcagatcccaagttgcctaccttcatttacctagagctataaatgttgggcccaataaagaaagtgacagagcctattaggcagatatttaaagataacagtaatttaagatggtgtcagaaaagaaataacaatcttagaacactggcttctctgaatatctgttccacctctgctgaagcctaatctgacacagcaggaattagagcacactaaggtacacacagccacctaagaggccaggatttcatctggacttgtatcctgtagctggctcagctgcagcctatcttggggatggtcaacttagagaaaactaatggatccttataaatcatgaaatccttataagtcatagtcttacccagagtagagatcctctggacttggtaagaaggcagcttcaatgagaaagttatgagtctttattctcttctctttagttctgaatttggctgcactgatttctcccactttttttcttgctggaactttggacttttaccttacctctccaatgtcatggggctttccagactttctagagacctgtatttatacatgtaaaaaacaatgcaacctctgcaaataaatagagtaatatgacagtccatgatttagcaacaataaaagaaattgctgacagctgtgctagtgagaggatttgacataatttctcaaacagaatcttccaattttattattggaagagatcttagagacagcttgcgattattaaaaaaacttcaatgaatcgtttaaaataatgacattcatctcatgtttgtgggccacattgagaagtacaggaataagaaagcttaatataatattatttaggttcaattggcttgaatattagactcttaaaatggaactcattatttgtgtttaataatgaggactctaaatgccctgaaggaatgtccacgtcttatacatgtttgaattattagcacctaactcaggtcttggcacttaacatttaataaataataatgaagatagtacccgttttgtttacatagattatcccattgtattcttatcacaaatacttttaccacaatgttaaaagagggatttaataatttattacaattacagagctactaaataagatttgggcccaagaagtcttgctgtcagtcacttcattaaaatacctctgtgtttgctgagtgtacaataacaatgttttctccttatcagttccattctaggccatattctttacacataccattttaaatatcaaaatacctcaagataaaggttgtttattatccccattgtccaagggggaaaaataatcagaaaacgggtaattaatatgtctaactaaagccattgagctacacaccaaggtagcaagtaattgagcgagattcaaacttgaaaatccatttggttaaaaccacattgattctctactgcacattgtctctaaaagagaggaaggtgggaagcggggaagagagagagagaaatggagagcagagagtaagacttctctgtgtgtgtgtgaatattgatgagatttaaagtgaaagtaaggcagggttatttcaaaacagaactattgctaggaaatcacctgcttctaagtaataaaatctattgtttatatcatgcaaacaaaaaatagccccaggcaaaattgaatctttgtgaatcatgtataatttaagggtacataaatttataagaaaaaaagatcccactttcccaacttgtgttttttttttttgagacagagtttctctcttgttgcccaggctggagtgcaatggtacaatcttcgctcactgcaacctccacctcctgggttcaagcgattctcctgtctcagcctcctgagtagctaggattacaggcatgagccaccaagcccggctaattttgtatttttagtagagatggagtttctctatgttggtcaggctgatgtcgaactcccaatctcaggtgatccacccgcctcagcctcccaaggtgttggaattacaggtgtgagccaccatgccagaccccagcttgtttttagagtgtttctttagagacaagtgggccagagtcctttctttaaccttttgaatacaaatagagctttctaggggctaaatatcagtgccagctttacaacccagagatgtcttcaagagtctgggctccatgccttttgaaatggaaatatccagaaagacagagacccaggcttcctgacactttgggagcttaagcccggtgcctatcctgtctatagccatttcttccaagggagataaattttaatattcttttagataagcaaatggctaccacatttccaaggtgagcataggatgaagaatacaaggaaggtatagcaaatttgaggatgtaccagcaaattgtgttgtcaattctctaatgggaaaacaggatggcattgatcctagggaaacatgttatatataaaccagctaaaaatagtgcagtgtaa

SEQ ID NO: 817 - DNA, 4001 bp, Homo sapiens
ttcagatatactgattatacaactattaactggattgcaaagtaaaatgtacttcttactgtgtttgcagtcagaaactcttttgagtcactactttagagtatgctattgtgagataggtaaaatttcacccaataatatcaatatacgtgcaaaattctgtattgaactaccaccaacagtactggaagaaattaagagtctatgtaccgaatacagaaatatttatctgtgggagaaacagccaaagtaggtggtttaaataaaacaaaacatacacactgagctggaacgtgaacacagaatatggtacagactcagattcctactaaagttacaagcaagagttctcatctcttgatgggcactgaccccaacaacaggcctgggcacaggtccagcacttaactcagagggatgccgtgtgctgctgcatggtctgttaccaacatctcatagaagagagcagaaaccacttaggaacacagctgatttaggaaggtttttctaaacacacatagtttaggaaggtttttctcttaattaagatttatctttctgatggaaccagatgacagggagatagatgcctgcatggtgagcgttttcatatattacctcttaattctcacaacaacctgatgaggaaggtgttattatccaactttaaagtaattttccaaagtcatatagctcctaaatctaaagattttgttattttttaaatactaaaattgtcccataccaccaatatgcacaatgtgcagtggatgactatccgctcagaaatggccaacaaataggtaacaagtttgtaattccagattaatctctgtcacctccaactagtgactagtctttttattttccagtttttacaaaactttaatttttgaattgatagattatatttgtacatatttatggggcacatgtgatattctgttacatgcatagaatgtacaatgatattgttacatgcatagaatgtgtactgataaagcatacatagacgcacagataagtgcataaaatgtgtaatgactaaagtcagggtatttagggtattccaaagccaaaattgagtgcttactcatttgcctcactgcaatagagagtctaatgtcaacattctaaaagttaggtgtactatgaatactacttcatctgaatgcaccaaaggataatctccgaaaatattcctttacctggacagggtgggggaaggaagcgagagatgtggagagagacggagcgacgtcctggccctctgtgacctccgtgccaggaagagggacccaggatgtttgagagttttgctaccagccttaagcaccgagagaggtgtcactcagtgcgcagctgcaccggctaagttttttagacgcgttgccctcggcagcgggtttggacccaaggtcgcgtcgacactggcctcagcatctgaccgcgggcggagcccaggtgcgcgcgaggccctgccaccctccctcgcccgcgggcgcttctcccttgccggaaccgcccggccccgcccgaggcctgccccgggagccccgcggcgagtgtcgccacgctcacctcctcgctgtgcgtggacgggcacttcttccgcaggcggccccagttcagcaggttccccgtctgcaggtgcagggtgcgggcccgcgccaggagcgccttggccgcgcggctgtcggtgcccatggcagcggccgcccaggggccgcgcagcgaaggggctgcgggcgggcgggcaggcaggcggccgccccacaggacgcggtgcccgaggcccgagagagacccgagagggagcgcgaggctgccggcgccgcgcggctggagcctggtctgcgctcgggcccgagggaggccggacggcggctgggcggcggcgggaaaggaaggcaccggtggctgcggctccggctccggctactgcggccgcagcgggagagctgattccaaactgagggagctgtttcctggaagacaatgactaagcagaaatcgtagccgagaaagtgcttcgtaaccgttactcatcccgcggcggggcaggggcggggcgcgaatgggctgcgggacgccggcccgcaagtgactggcccttggcctgcggcgggcgtggcgacgggtggtgcgcggcgggcgcgcgggtcgagagagcgtggcggcgcggcccggagcgcagcgcgcggcagggctccccctggcggtcagaggacagcgcgaggcagacaccgcctccgcctggtgaggtagacaccgcctccgcctggtgaggtctcccggcgttcaggtcgcggctccgcccacggccgccccagggtgggcttcctacacgtctctttaaagggcagcctgagcggccaccgggactcggaaatgctacgtagttttcgttctcagaagcagctgtttatgcgcaagcgcccccttcttcttttcgctttgctaccttcaaggaccttctcccaaactgctaatttttcttcatccgttaaaggtctattgattcacattatttgctggcagtgtgtgaagtcaacgaacaagactgagtctttgcccttgagacgcgtacactctacccagagacaagttctaagcacaggaaacaagtaattttataagaacatcatagggcagttattctccagatgaattcagattaaagaggacacttgagccggtgagatcacagaaagcttttatcacccacccctttagaggtggtcgagattatttacccctattaaatttcacgtgtggtggtggactcggtataaacatcaaattgaacatgtattgagctttcctcaacaatctttcacattcgttgaggtgaatcagattattaaaggcaaaatgagattctcattataagcggggacaatatagctattgaaaagagagatgaaccagttggtaaaatggtaagaattaggggagggatgggaaaaaagatctttctaggaagttagaaattgagcctgatgttgagtaaatatttgttggctgaatgaatgatggtaagagttcattgaacgagcttgcgctgctttttttttttttttttggatattgattttttattatagtgaaagagctacccacaagcaccaccactacttaaacacattttgatgcactgtaacatacaattaacatttgttgtaaataattccaacatatacaaaaatagcaagaatactataatgaaacccgatataactatcttctgaactcaagattgaataagatttgtctatactttttgttttataatactttaagttctagggtacatgtgcacaatgtgcaggtttgttacatatgtatacaagtgccatgttggtttgctgcacccattaattcgttatttacattaggtatttctcctaatgctatccctccgccaaccccccaccccatgacaggccccagtgtgtgatgtttcccaccctgtgtccaagtgttctcatggttcaattcccacctatgagtgagaacatgcagcgtttggttttctgtccttgcgacaatttgctcagaatgatggtttccagcttcatccattccctacaaaggacatgaactcatcctttttgatggctgcatagtattccatggtgtgtatgtgccacattttcttaatccagtctatcattgatggacatttgggttggttccaagtctttgctattgtgaatagtgccaaaataaacatacctgtgcatgtgtctttatagtagcatgatttataatcctttgggtatatacccagtaatgagatcgctaggtcaaatggtatttctagttctaggcccttgaggagtcaccacactgtcttccacaatgttgaactagtttacactaccactgacagtgtaaaagtgttcctagttctccacatcctctccagcacctgttgtttcctgactttttaatgattgccattctaactggtgtgagatggtatctcattatggttt

SEQ ID NO: 818 - DNA, 4001 bp, Homo sapiens
aggctggagactctgagaaaagttgatgttacagctgtagcttgaaagcagatgtaagaactcctccttccttgtaggacctgagtctgttttctcttaaggccttcaactgaattggatcaggcccatccacatcatggagggtaatctactttactcaaagtctaccaatctaaatgttaatgtcatctgaaaaaaatactttcacagcaacactcagactggtgtttaaccaaatatctgggtactacagcctagtcacgttgacacaaaactagccattacaggaactaagtagttcatggaaatagatgtaatttcatttatttttacagtaatcagagaagcgcacctttttttagtgtaaattttaaaggaaaatatgaagtaaaaactatgacttgccactaaatcttaaaatattcctacttcagaaatgtcaaaaggtgaaaatgcatgagttgaaaaaagtttcatttttatcataattagcatgattaacataatcactgtcaacatatcatcatcatttatcctggcaaactctcccatgctaagcagctgtgatttccttgctctacaaactctttgagtccatatcttcccatacacgaccctatgtttccttaaagtgatattcctagattttcctctagtacagacatatgggttgcttggaagcttgttccaacagaaactctctaaagcagtgactttcaaacttttatatcggtgtaagaaacacatttcacacacacatatacacaactgactcactaccatgcatagtcctctgtgaaattttctaatccattttatgctaacctagaataacgaatgtttgccgcacttaaattgatgttgtaagtgacatataacctgaaatgtaaaggaaacactgctcttaggcagatacatgttacctgcttagggcctgagggggcaggtaacagcctgaggaagtaacagtgtcatctgcacaggggtctggaaaattcagaacaaaaaggcctgtgggaacaagtgtaccccagaaaacactcaccacagacacacacgtgcgtttctgccatgctgtctccttactcttgtatctgatctaatgacattaccgctcagtggaatcagagtcacaaatgagctgcaaagcagtcattatctgcctgtaaaaccccactaaggaaagaagtagcagcatctatctttccaccagcacatcatctcttgcaatgaactcttttgcaattaactttgaaggacatggggcagtcagtccacctgcaagcaaagatacaaagtctgagacccctgaaagagagaacgccttgctccattcacattcacatccctgccgctttttgtttgtttgtttgtttgtttttgtttttgttttgagactgagtcttgctctgtcgtccaggctggagtgcagtggcacaatctcggcgcttttttctttttttagagatagggttttgctcagttgcccaggctggagtgcagtggtgtgattagagctcactgaagcctcaaactcctggtctcaagcgatcctcccgcttcagcctcccaagtaactaggactaaaggcaggcgccactagcccggctaattttttacatttctggtagcgatgggttctcgctgtattgcccaggctggtctggaactgttgagctcaagcgatctgcccgccttggcctgccaaagcgctgggactgcaggcgagcgccgcggcccccgttccccatcgtattattaatggatgccattgtgcagtgttgtcctgaagagaaaaagcttcgcggaccacacgaaatcgcggggtgagtgttcccgcctacctccatgtcctcccgcgtccagcggctgcgggctttcccgagagccttccccagggcgcctttctcgtcctctcagcgtggggatgagggaattcagcggcggttgcaggcagttgaagcgggtgcggcgctagtgcagacggcgtcaccgtggaaagggcggcagccgcgcgggaaggccgggcgctgagaccgcatgcgcagcagtgcactgcccccgaggggccgaggccaagtcgcgcgagaggcgccagggcggctggggtggccggggaaagccaggcgttccaccctgccggcgtccacgcggaaatgcggtgatggccggcgtcccacacacgaactggcagaggcagcggtgactgcaccgccccaggtacgtgtacgcggcgacgtcagggcggaatggcagctcccggagccggcgcggccaggccagaccaggagccagaggcctcagagggccgcaccgcacacccacgcgggccatggatttgcctgagcccccgcggttaactagcacttgggagaagctgcgagtgctgtggcaggaggtggagaagggcccggtcgctgaggaagtgggagtgtgcagtgggagggagaggaggacgttggtgcagttgccagtcacggccagaaagtaaaaggccgtgctgaccacaaacgggaccgtctccagctttggcctctccagaaccccagcagaatggcgtcaccccgcgagctctcattgaccctccatcgcccttggcctcatttgcctatttagagaggttcacaggctgcagtgattagaaaatggcacgtgttgttctgtcctctcagtgcggaggatccattccaccacccacagtttttagcgagtctcacttgcctgctggttatctagcactgaagggcaagacgttaagtaaagatatttgtgaagagaagaaagctaaaacttttttctcagtagcactctgatctagtcaagcgagttaactgggtagacttttaaaaataaaaattttttaaacaagctttttgttattttcagaaataagtaaataatattaaaaaaaatattttgtcagaatctactaaccatgaaccaatttctctgctactggatacaatctcctaaaatttgtggaacaatagcttcaattaatacgatcagctctcacatttccacattttacatttttttgttccagtgatttaaaatccactgcataaagagtacagtctcacactctgtgccgaccttgcactgtgaactgcaggtttagataggaaagagacaagacacctagtaataagttactcacaatacctgtacattttggggaaaatagcctgggggccctagagaacaggggagccctgaattcattttactctgaattgttaaagatttggtccaatctcttgactcaatgattagtctgacattatccaaaagaccaaaagcagctttgattgtgcaaaggtgaaaggattttcttccttgccatgtccactcacaaagagcagaaaagcaaggaatgttcttttgtgcctttccagtcaatattattcagtgcccagagatcagttaagcagaataatcaggatcattgtagagagttattttggtagtaagtatgtcttatgacctgcactccttcgtgaaagcaaactaaatattcacattattaaatagacacccatcaagtatctgcgctgggaacatagatctcgcctataattaagaaattaactgaaaaaaaagtattttctgtatgtcaacaattaaatgttggctgtacgaatataattttctactatcactccttttggcttgacaaggactcagctgctgaagaagttaggttgtagtgtaaacagagggttacaaatgcatccctcttgttttccatagctctgctgtccacgtacaggatgtgtccatttgaggtctaatctgaaaggattgtagaccctaaactcagaaaagggttactgtctgatcaccagccatatataaagtgcagttagatctggagtttaaaaaaaaaaaaaaaaaaacagtcaacatgaaagttgtagacaaaccagtttaagggacactttagaaactgaatctattatgagcatgttgtatctgcagatctcatcatgagaatacac

SEQ ID NO: 819 - DNA, 4001 bp, Homo sapiens
cataattttatagcaaaggcaaccttgacaagttttaattctctctcaattttaattatctgagccacgtaatgtctatttttttaaagctgagtcagagtgattaagtacgatgttctctgaaggggcctatccatttttaaaatttgcttccatatccattttccttccatgtttaattttttcttgcgaccaagaccattgtcttacctaggctttccataaatattgcttaactttaaaagaagggaaacattttttctttagggtaaataattgaatttacctctcagcacaattgtgtcatttgtcctccatctactgcccagactcatgctcatcctgaactttgatggcccttctccatccatgaacccttaagcatttttttttgtttgtttgtttatttgagacagagtcttgctctgtcgcccaggctggagtgcagtggcgggatctcggctcactgcaagctccgcctcccgggttcacgccattctcctgccccagcctgccgagtagctgggattacaggtgcccaccaccacgcccggctaattgtttgtatttttagtagagacggagtttcaccgtgttagccagaatggtctcgatctcctgacctcgtgatccacccgcctcggcctcccaaagtgctgggattacagacatgagccaccgtgcccagccacccttaagctctttaacaaatagcaatttactgaaagactaaatgaagacatcaagggacagctgaactatttaacctggtgaaaggagacggtatgaaccatcaggtgtggggaagccaatctgctgcctcataaagacagcttctctgacctactttgtttgactgtaggtcataagcccccattccagagagtcctctgccccatacccgtaagtaaggaacgctgcacagagaggtcaagaagaatctaaacagacagaacaagacttgctgggattttccactccgtctattagcgttaggtcataccctttttgtccagtcatatttctacatggtacccactggagcacaggagcgatatgatgagagttttgccttgggtctatcaatgtagtcacgtcatatgcaagattgtctggaaggggactgggagagcggacagaggagtgggatgctgtagagcccatcatttaagattaagcaagatgtaagaacaataatgcctgttatctgtacacattctataaattatgaagtattggaagagtgtaaggctaaacattaccaaaaaaggtgtgactaaagtcaaaggcattcaaatgcatatcccgcatccataatttgcaaggacctaactgttcattctcataccaacccacgaagctgatggatggaaagttaagctctacacccacatgaagaaaaagagaagcaggaaaattcaagtgacaattgtgtagggttgccagatgaaatacaagatgcactgctaaatttgaatttcagataaacaatgaataactttttagtaaagtacaacccatgttataatgcccaaaatattatatgaggcacattcatactaaaaaaaaaaatgtttttctggaatttgaatgtgacttagcatccagtatttttgttttctacatctggcaacctatcattgttccagagtaaggcaagagaaggagccaactgggcgtcactgtgtgctcctagaggatgctgtcttcaggcttaaccttctagaagcacaatgtacctcaccattacaaatgcgttatgtccagcctccttatctctgttctctttctcccaagaaaggcggcaccaagagtcaagactcacctgagttttcgcaggagataatttcccatcttttcacagtgactcggtttctcagctcctgagtttcactccacttggggaagttctgaccaaagcaccaagaggaaaatgcatgaggcaggacgttgcatctgaccacgggttcgtgctcttgccaaccacgagctgccaggggcctgcgcatgatagagaaggcaggaagagctcgaaaggggaggcagaaaggaaaatgtgagtgtgcgtgtgtgtgcctgcacgcacacacacacactcatacacacacgcgtgggcatacagtgggaaaaaatcaggctgaaacatgaaagtgaatctatcactccaggttcactttgctttcaaggaaattctagtattgcaagacgaaacaaggtaaggacttccctattcctccgaagtgagcataataataagattacacaatgcaataagagagttgcatttttgctggaataaaagtgattaatctggattcatgatttcttaggcaaactgctcattacagagatctgagatctcaagattccaaatatgttgtcctcttccaaacatacaaagagaaagcctcttcttggggaaaagaaaaaaacaacgttagaaataaaatttctctttgtggctctagcaacgataatcagatcaaatgtcaatagcctttcctcagaggtctgatactttcaaagacaagatgggaaagaaaaaggaaaaaaaaggatgagaatagaaggttatcaaaattatttggggtaggttaagaagccattgttctggttgtcagctcaaagactaacatgacaatggggaaaatgcagggcctggaagacctgttgccagcatctggtcccccacttcctcccctaggctgcccaccagagccacaaagcacaagctggttctagtgataatttcgaggccacaatatcagcggcaggagatcagctaacagctgactctgagccgtggctgtcaggagactgaaatcgcttattcatgatgtctcctgccgaaggatttataccacaggtggttgattttcttcagcttccaaccaacacaaaatctatttgctgaaatcagaaactatatgctcacctattccaactctttttttctcccaatgaggaaatcaggactgaggaagtttaattgactgttaaccagcagcagaactcaggagtctggagtgctttatcattatttataagttttgtattgtttatttatcgattataaacatgagaaaaatatattacaagcaggaatgtcacacaccccatttcagatttatgatttatctaattcgtatgtgacaacctatgtaccaaagtgctgcttcccaaactttctcatgtaagcaaatcacccgaggatcctgttaaaatgcagattctgactctttcaaactgggatcaatattttgcctttctaacaagttcccaggtgatgccactccagccaatccatggagcggtaaaggcactaagaagcgtgttccgccattgctgtccttgaccagaaacaccggcatctctgagaacttattagaaatgcaaactctcaagatccacctaaaacctgctgaatcagaaactctcaggggtggattcctcctgttccctactaaaatttgagagctactgaaataaatctttgtttctcttatctgattactcacaaataagctcattaatcctcaaatgctcaagtaagtagctccatgttagtttttagtcaccgaatgacagaaatgtggtaacacgaaaggtttccatcttttcagcacctctaactcccattctgtcccatcctagcataaattggtctggtaaacaaatctcctggaactcacgttctccatctgcagaatggataggagctacgtgaaagggagtctcagtaagccgtaggtatcctgccattattatggccatggctgctgtttgagaacaaagacatgcacaatattcaacttgatttaagttctcaatgccatgtagaaaattaagtacaaataagaaaaaataaaatatttaaataacccagaatcctactaccctcaactaccttcttgtgcttttttgtttgtttgtttttgtctttgagacagggtcttgttctgttgcccaggctggagtacaatggcatgatcagggctcag

SEQ ID NO: 820 - DNA, 4001 bp, Homo sapiens
ttaaactacaactgacattcttcacataattagaagaaactattttaaaattcagatggaaccaaaaaaagagcccaaatcgccaagatgtttctaagcaaaaagaacaaagctggaggtatcacactacccaacttcaaactatattataaggttacagtaaccaaaatagcatgataccggtaccaaaacagacacatagaccaatggaacagaatcagaaataagaccatacacataccaccatctgttctttgacaaacctgacaaaaacaagcaatggggaaagaattccttcttaataaatggtgctgggaaaactggctagccacatgcagaaaactgaaatggacaccttccttacactttaaacaaaaattaactcaagatggattaaagacttaaacataagacctaaaaccataaaaaccttagaagaagatccaggcggtaccattcaggacataggcatgggcaaagacttcatgactaaaacactaaaagcaatggccaaaaaaagccaaaattgacaaatgggatctaattaaacttaagagtttctgcacagcaaaagaaactatcatcagagtgaacaggcaacctacagaatggcagaaaatttttgcaatccatctgacaaaggtctaatatccagaatctacaaagaacttaaacaaatttacaagaaaaaaacagaaacccatcaaaaagtaggcaaaggatataaatagacacttctcaaaaagaagacatttatgtggccatcaaacatatgaaaaaaagctcatcatcactggtcattagagaaatgcaaatcaaaaccacaatgagataccatctcatgccacttagaatggcaatcattaaaaagtcaggaaacaacagatgctggagaggatgtggagaaataggaatgcttttacactgttggtgggagtgtaaattagttcaaccattgtggaagacagtgtggcaattcctcaaggatctagaaccagaaataccatttgacccagcaatcccattactggatatatacccaaaggattataaatcatgctactataaagacacatgcacacgtatgtttattgcagcagtgttcacaatagcaaagacttggaaccaacccaaatgcccatcagtgatagactggataaagaaaatgtgacacatatacaccatgggatactatgcagcaataaaaaagatgagttcatgtcctttgcagggacatggatgaagctggaaaccatcattatcagcaaactaacacaagaacagaaaaccaaacaccacatgttttcactcataagtgaacgttgagaacacatggacacaaggaggggaacatcacacaccagggaccttcagggagtagggggctaggagagggatagcattaggagaaatacctaatgtagatggtgggttaataggtgcagcaaaccaccatggcacgtgtatacatgcttaacaaacctgcactttctgcacgtgtatcccagaacttacagtataataaaagcaaataaaattttacataaatgcataaagtctggtatagctaatatattataatgaaatgtcaagtataattccagctcaaagaaaatgccacaaaattatgaaggcctttccacaaatctctaaatttatgtcctcataacattacatttctatttcttcttgaataatttcctgattttagctatgactcagtgatagtaagatggtaattatgaggagaaaatcctgcctcatttcaccacacacctaagtcttaagcagtcacttctaacacagctgaataatagatactcacccagctgaatctacgaattgaatccatgtatgtaagataaggcccccaaggagtggtaataagctgggaatgccatcagctcatcttccttcaggctcatatttgtcattgtctcttgtagaaacaggacagtgttggcattgggattgttacaaacagagggtatcaaagggaaaacaacttccctaatttttggaaaacagcagattggaagcagatgggctccaatgttttccatgtgtgaggtcattgtcccaggtagccttgctcaggtgggtggtctggcctcgtttcttgttcagcaaaacggaagtcaaacaatatttctattccaagagaagagaacataatgtcagattttctcatggattcccactagttcaaggaagtttcatggccttcatttatttcttctccagtggtctcagggtcacctagaaatataagatacttcgttggaatttggaagatacctcctgctccaaaactacttcaaagatgtgctctttttccctgggaacagaaccccaagtcaaggcatctggcgtgggaagcataatgtaggctccttttcacctctcacatagtaggcctggtgtatttatcttgggcagaaataaacacctccattgcaggcagcactgatgactgagatgcacactgtcctcctttataaaccttattttaatataaatttccaggaacttgtgtttgccatcccatccctttttcttctctactgtgcctgtcattgggatgttttatttcacaaactagaacacccacttcttggcaacaaactttttgctttgtgacatccaccaaccaaacctgaaatataactttaactttaaccttaaccctgactagaactgccacatttgtgattcttttaatttaaaaaaaaaaaaaaacttgatgttataatggtagcttttcttcccgtaaacctatatacctttgcacagagcaccagcttagcctgtttgggtttggcatggtgtgttcccgtgcgttgtctttgattctataataaaataaagtcttccaaattggcctcatttaggacaccttcaccctcagacttctactctctgcaaatacagttctgcctgaactctctgcctggatccattctatcattagctgccataactacaacctcaataccccatcttgttgtttcttagctcttaatttgttcatttaattgccttacttgaagtttctctatttcttctttttaaactttctttagctggtgttcacagaaaaaaaaactgtcaactaagaatcctacacctagcaaagctatgtatcaaaaattgaggattgcttgagttcaggagttcaagacaagcctgggcaacataatgagacctcatctctgctaaaaataaaaaaatatatattagccaggtgtggtggtgtgcacctgtagtccctcagctacttcggaggcagaggtgagagaattgcttgatctcaggagatctaggctgcagtgagctgtgattgtgccactgaactccagcctgagtggcagagtgaggtcctgtctaaaacaaacaaaacaacaacaacacagaaccttaggaaatctcacaaaaatgtagttttggtcaatttttgctattttaaattcctgatttttccttacattctaaagcaaaggacaatgaaagcactaatgagacctaggctggaggagcctgccttagacttaacgtatgttacctctgggcgacccctgcaaaatctccagagacgtctggggtgaggaataagccaataccagcatttccaaaaagattttcactttaggccttcctgaagcaagagcctaagagagttgggatccagcaggagcacattgtgctctcttaagcatttcccaccaagcatttcccacctggatacagggctgtctctaggatgtgagtgctgggttaccagaattataagttctgttggggtctgtcaccaaggaagtaagatcactttttcaaagtttcatcctctgggctccttgcttccataagacctaccccaaggccctgctgggccactgactgctcactatccctgcatgtcaactctttacctgtgcacaattatgcaaacacagccctcctcagttccctggaaagacctgaatacagccagggcttcaggt

SEQ ID NO: 821 - DNA, 4001 bp, Homo sapiens
attttttaaaaaagattttcagattggaagactaactgaagtagtcaaatatgtcaacaataaatacagtataacaagaacattcctaagcttgtcaatggcttgggtcaaatttaacatcataattcaaaagcacccaaagaacatatcctaacagtaaattagtagtaccccttcatattaaatgaactgcactatgttttaattgtaaatattgatatattaggcattttgaaacttaaataaggaagtagagttacatccttgaaacattgtataaggaattttgtaagatgcattaccttaccactcacagttgctctgataccaactcttattaaaatcatttttttccatctgtggttgtcccatcccataatatttaataatattaagatagttttttaagaaaaggtaaaatcatgactcattcaaatataaaaccaaacccgtgttcaagattttatttaactcaaaatggaaccaggcagagaagataaagaaaatcccagaattagacaccttagagcaggaatattgaaataaatgtgcaaaaggaggcaaaacttccactgaatctctgagagaattcgcatgtcttgacaataattatttagcattgatgtcacttacctagtttacgtaactgaaaaatagcttttttagaattagttattccaaggggtgttaagatagaatctaaactatgtagttttccattgaagcacacacttctccccataataatataatgcacagcacctgtcagggatattaaccatacatacccactcaaatgctccctttcccaccaagcttattaaaataatagtttgtggccacaatttcttcccttctcatttatccaatacacagcaatcttgtttcaaaactcctatgctgctacagctgtccacagtctcatcatacgcattctttgctattgcaattttcttgaatatggaagattagctgaacatgcattaagctcaggaaactctaaagaaaatcagataatgtagacaaaagtctaatttctaggctggctgcagataccttgttcaagaagcgccggcaggatcttcttttgtacagctatgttagctttaattttgcacagctctagacatcagaactcatttctaaacacttctatgcagctcaagaataaaagtagcagaaatgcaagagagaaaagctaattcccacttggtgaaagagcacttaagtctcagtgagcaaacaaggaggagtcagccttggtcacttccccctcaagcggccagagagcggaaacacaaagccaggccagtgtcactccagggattgcgggaacctagacaacgcaccatcctgggctcagcgtctacccacccctcacccgaggtgctctcggttccgtagaatgtccagtccacaggaacggcaacacggacttgtctttgggactacaaccagcaagagctcccgcctgccccatttcacctgcaccctagggcgcccgcctccttggctacagcaccactgttcctagtgcccgccgactgcccaccctttcacttctcgtagagacggcgtccccgacaacgcctcgggaaagaacctaaccaacatgcgaggaagtggcgccaggctcgttcttcaagagaagtgacagaactaaccctcagcctgcaatcctgaccagggccgagtcccgagcgcctcggaccgcgcccccggccctctccgccccgccttccctcccggcctcagtccctcctctcacagcactctggtggtcccatccgggcggcgggcggcacggatcaggctcctggtagaaggcggccgagcgacatctccggcgaccctcagcaggagcgcgccgagtacggcgagtcaaagtcccaggagactggagtgaccagctgcaaatgctctgggctgcgaaacaccggcttccgctcctggccagagctcaccaatcagcgcccggctttctccgtcatttcctcctagaaggcaaagggaacctctggcggaagaggcttccggaacggacccggaaggggcaggtcttgtgggcgggtccaatcggctgggagcctcgtggaggctgaggtgagtcctggaggtgcgtggttggggcggagagcattatctgcggctccgattttgcagattctggctgaggcgttcgtgatgtcagcagcagccgagacgggcgtgttaaaggccggttgctagggctgggggaactcaggtaactacgggcgtccccacagcagtacttggaagcccctcagctactcggcgcggttgcgggtgctgagcagagctgcctgaccgtgcgtgtgcacgggctggcctgaggatgatatgaccgtgtgttcggtgtgtggaaccctccgtcaccctcccctgaccgaagactcgtttaggaatgtgtggcaggtctgttgccacggtccaggccttcagtgcatcttggaaacatcgttttgggggctgtaggttaggaagcggagatcatggggtctcggaagaaggtttggtcgtgaactgtcagaaaggaggcgaaagctgtgcacgtggaacaaagtgaacagtgcaagttgtatgggaggtagtttaaatatcgaggcgatgaaaaaaggctgctagaattgggcttactcgaaaggaagtgggcctcagaagataatattagttaaaagaagtagaggagaacatggatgttattctaagtaaaacgaataatatgaagaatacaaggtcgcgggacgaggaaggaaactagccagcctgacaggaaggtttattcgagaaatacgggggttagataggatgagtttttggaaactggcaaacgatttagccttttcaaggctttaggatagggaaagctcatttgaaaagattagtcggtagtattatgacgtttaaatgaaaagagtgaaaaacatggaggcggaggtgctaggtggaaaatcagtgcagtaatccagtgataaagagctggaactgaaagtgctggagagaaagggatcctgtttcagagtaacagtcaggtggaattgactaaagagaaagaggcaaagagaagcagtttagcatagtggttaaaagcagaaattttggagttagactggctggattgggatctggctttggcaattagctgctaaatgactttgagttagcaatttgccatctctgggtctgagttccttgtctgtaaaatagagataggaagagtgacttcccttgtggtgttattgtggagaatttgtttatttatttttagagacagagtctcactgtcacccaggctggagtgcagtggcgtgatcatagctcactgcaacctcgaacttctggactcaagtgatctttctgcctcagcctccccgagtgcgtcaccatgcctggttaattttttaaaaaatgttttgtagagataggttcttgctgtgttgcctatgttggtctgaaactcttgactcctaggccttggcctcccaaagtgctggcattacaggcatgagccaccataccaggtccttatggataatttttttatgctcatatttacaatgtgctagaggcttttctaagtgctttgcatatgttagctcggtttcattaattgctgtatgtaattaaacaattgcataatgttatcagttactatagcgtaagcactctctaaatcttggctgctataataatatttttttattaataattcaaaggttattaaatggttttgagcctgaagagctgggaaaattgtgtcttagtgtcagaagaaaagagaggggtaccagaagtaaggtaggcttggttatagacatgttaaatgtgaaactataaggtattcaagtggagatgttcagtaaatattggaaactctataattagtattcatgtaggtggaaaggactggaaatagacagatgggagtccctggacctaggcatgctatatgaattctccaaggaaaacactgtagaagg

SEQ ID NO: 822 - DNA, 4001 bp, Homo sapiens
acctccaagagccagctaccaactggagtgaaaggaccggggggaggggggaacagaacacaagataaaactgtggggcggcgggaggacagcagcagagggattggggacagcagaggccagagaaaggaggtgggagagcaaagggacaggaaagtgaggggaacaacagacgaccaacccccgccccaggagaaactcgcatctgggtgatcccactcgcccctcactagtgccccacgtaggagaaactttgcccttggactcccggctgcggcgggcaccggtcgaggctgcggcgagccatcccagaccatggagacctaacctcgggaatcaggtcccgggaaaaaagcactttccgttctgctcaccaaaaaatcttgtcctagggaggtggagcccgatccacgaacgttgactgggaaatgctaggtgtcccgagtcggtagtgcaccgacaatttagcagacaaaaaagacaggacgccagagcgcgcaggctgcattagcagagagcgggggtcgggcccgggcccgggagggaactagctgcccggggcgtcgctctcattaacccccaatcagttcacctaataccaggtcgaaatctgagcgcagcgggagggcgtggctgcgcctgccgctaggctccagccggctccgggggcggtaccccacagtcgaggtggtctggagtaaacgaatctgccttcctcccggggtgaaggcgatggtgaccgggttcacacgtgagctgcagtacagcagttctccgtggcctcggctggttcagaaacgagggtgctgggaactctgggccggggcaggacctgcagtcctccggcttcgcgctgtttccactgccggactaggagcccctcggcttcctaggcaagatgcaggccacacagtctacgtctgtccgttggcgctctcagctcaaacgagtcctacaggccttggtccctgtagggtgcaggccccctgctccagatccccagccccattgtgtccccttctccggaggaatgggaatagacctgggagaaaagacgcctgggacgtgtcgcggggctcccgcgaagtttcccgctacccaagcgccagaatgcccctaggggtgagagtgccatccgcctccctccggggtggctcctagggctagagctttgtcgcttcctgcacttctcgtccgtacaattagacgccacaaaccccaaacccaattctttaaacagccacgaaactcggaagaaaagaaaaacggagtggcgttgtcccgagggtcccgctgcagcttggacccacgttggctgggagcgggacagatgggggcggggtaactgtcagcgccggagctgggtctgggctggcgccaccagagaccaggcggacgcggaggccgcctccccacccgggctgtaagcccacgcctctctcgcaccccggcccgctttgctggttcctgtggggagcgacagagtttggaggagataggggccccggggcctgggccgagcgcgtgggaaggcaaccccgcgctgcagctggcgcgggaggtggggcggcccctccgcgcgctcaggcctctcctcaccgtccgggcccaggaaggagggagccgagggcgctaagggggcgtcctcccgagcgcagctgccgccgcctccccaccagatgtttccttccctggtggatttggctcccctgccgaaccaccagaccgcctgctgcgcgcccccagctccagatttccagtcacactgcgcgggtcgcgccctaacccagctgccggagctctctgggctcccgcacggcggtccgcagcaggtgggaaaccgcccgcgccctctgatcgcccccgcagtgccagtgctctgcgagtccccgcggccgcccccaccagggcaggaggcgcagaacaggctcggcggacctacctgcggagtcacggcgcgggcaccgcgctaggagagttttcaaacggaatcttgctttcgggagagaccgctctatctctctgacttaaaaaaaaaaaaaattctccttccgagctcagcccccaaaaccacaagcttcacttcctgagcgttactgagtcgctcgcatagccctcccagacctgctcccaacccccgtcgggcggccgggcgcgctcctttgcgcaagtggccaggcggtggggggcctggcctttccagcccgtcccgcgcgccccttagtagtcctcccagttctctccctgtgggtcggcaggggatgggggaaattggaggtccggacacttaggcactagaaatgacttgaaagaaaatgaactattcttggctccagggagacttccgcagcgagagaagccacagattgaggacacagattgactggcgagagaggggtggggggcgccccgctccgaggaccctccccgcccctcaggcctcggtcacccgccccccccacccccgaccccgccgcctcctagggctgcaccacccccgggtcgggaccgtgaatcaccggcccgcggtgccgccggcctggagcccggcgagtggccacggcgtccgcagagcgaaacctgccccgcaggccccgaaatagcttgttgtggaaacacttggggataaatacgcccaacgaggctgaaaataccttgacacccaatccgagaggtttgctcatttcccttcggatttaggtaatggttaaatttggaagaggtgggcgagcgccgagcccccggcggagagggccctggcggcgcgtcccgcgggcgcccggcgggaccggtgggcgcaccctccctgcgcggagctcgccggctctcgaccgggtccgctcagccttcgactaatttccggtggtcggagctgcaaaattaaaggccgcgcgggggcagcgccggcggctgctaggctgactccgccctgccggggcaagccagggagagcgggacctcgcacgcgggctctgccaccgcctgaggtcatacccaggcactgggtgttggcgggagcagtaaagcgccataaaagcaccacttggatgactattgcaaagtaagccttcttcgctcggattctatgtttcatgagggtaggcactggatcttcatctttatgtcctaggcgggctcttaacaaaaggctgtggactgagtaaatgaatgagtggggttaattaactaattaattatattaatagaacagggggaaaaaacttaaaacctaactcatagatacatgaacaaatgcagcaacctccaacgctagactgtatgccatgacccatagtgtgtggcctgctgtgtatactcaaagcctacaccctttgctcattggagtggatggatgttgtagtcatgttacttttcaaaatgaattgacttggattttgatcacaacttcgtgcacaataggcctccaatgtcagacatgcacaaggagaagagagtggtgctccccagttcttgcaaaataactaccatgttctaggttaatcttaaattgttatggggggggaagcccttaaagctctttttctagaaacagtttttaaattattcttattttgcactgtaaatttaaaattttgcagggaatatttggttagtatagcagtgcttcgagcatgtattaataaattatacgttttgttaagcaatgacctgtgcccctattgtatgccaggcgctgggcaaatcttgtctgcctagctgtcctccttcatttgctcaacacatcccttctttatatataaatgcagaggcaagcaattttggtcagaaaggaaaattaaggacattttgttaatattttatttcttgtgtgctttgtcctggcctaaggtataaaaatctcacagtagtgcaaaaacaaatctttcccttattcccttctctcctactcgatagcagaaaaaaacaaatttttagaataaaattataaatgggacaaaataaaatttcttatcaaccaagttctagagaaatggttggac

SEQ ID NO: 823 - DNA, 4001 bp, Homo sapiens
gctgggaactctgggccggggcaggacctgcagtcctccggcttcgcgctgtttccactgccggactaggagcccctcggcttcctaggcaagatgcaggccacacagtctacgtctgtccgttggcgctctcagctcaaacgagtcctacaggccttggtccctgtagggtgcaggccccctgctccagatccccagccccattgtgtccccttctccggaggaatgggaatagacctgggagaaaagacgcctgggacgtgtcgcggggctcccgcgaagtttcccgctacccaagcgccagaatgcccctaggggtgagagtgccatccgcctccctccggggtggctcctagggctagagctttgtcgcttcctgcacttctcgtccgtacaattagacgccacaaaccccaaacccaattctttaaacagccacgaaactcggaagaaaagaaaaacggagtggcgttgtcccgagggtcccgctgcagcttggacccacgttggctgggagcgggacagatgggggcggggtaactgtcagcgccggagctgggtctgggctggcgccaccagagaccaggcggacgcggaggccgcctccccacccgggctgtaagcccacgcctctctcgcaccccggcccgctttgctggttcctgtggggagcgacagagtttggaggagataggggccccggggcctgggccgagcgcgtgggaaggcaaccccgcgctgcagctggcgcgggaggtggggcggcccctccgcgcgctcaggcctctcctcaccgtccgggcccaggaaggagggagccgagggcgctaagggggcgtcctcccgagcgcagctgccgccgcctccccaccagatgtttccttccctggtggatttggctcccctgccgaaccaccagaccgcctgctgcgcgcccccagctccagatttccagtcacactgcgcgggtcgcgccctaacccagctgccggagctctctgggctcccgcacggcggtccgcagcaggtgggaaaccgcccgcgccctctgatcgcccccgcagtgccagtgctctgcgagtccccgcggccgcccccaccagggcaggaggcgcagaacaggctcggcggacctacctgcggagtcacggcgcgggcaccgcgctaggagagttttcaaacggaatcttgctttcgggagagaccgctctatctctctgacttaaaaaaaaaaaaaattctccttccgagctcagcccccaaaaccacaagcttcacttcctgagcgttactgagtcgctcgcatagccctcccagacctgctcccaacccccgtcgggcggccgggcgcgctcctttgcgcaagtggccaggcggtggggggcctggcctttccagcccgtcccgcgcgccccttagtagtcctcccagttctctccctgtgggtcggcaggggatgggggaaattggaggtccggacacttaggcactagaaatgacttgaaagaaaatgaactattcttggctccagggagacttccgcagcgagagaagccacagattgaggacacagattgactggcgagagaggggtggggggcgccccgctccgaggaccctccccgcccctcaggcctcggtcacccgccccccccacccccgaccccgccgcctcctagggctgcaccacccccgggtcgggaccgtgaatcaccggcccgcggtgccgccggcctggagcccggcgagtggccacggcgtccgcagagcgaaacctgccccgcaggccccgaaatagcttgttgtggaaacacttggggataaatacgcccaacgaggctgaaaataccttgacacccaatccgagaggtttgctcatttcccttcggatttaggtaatggttaaatttggaagaggtgggcgagcgccgagcccccggcggagagggccctggcggcgcgtcccgcgggcgcccggcgggaccggtgggcgcaccctccctgcgcggagctcgccggctctcgaccgggtccgctcagccttcgactaatttccggtggtcggagctgcaaaattaaaggccgcgcgggggcagcgccggcggctgctaggctgactccgccctgccggggcaagccagggagagcgggacctcgcacgcgggctctgccaccgcctgaggtcatacccaggcactgggtgttggcgggagcagtaaagcgccataaaagcaccacttggatgactattgcaaagtaagccttcttcgctcggattctatgtttcatgagggtaggcactggatcttcatctttatgtcctaggcgggctcttaacaaaaggctgtggactgagtaaatgaatgagtggggttaattaactaattaattatattaatagaacagggggaaaaaacttaaaacctaactcatagatacatgaacaaatgcagcaacctccaacgctagactgtatgccatgacccatagtgtgtggcctgctgtgtatactcaaagcctacaccctttgctcattggagtggatggatgttgtagtcatgttacttttcaaaatgaattgacttggattttgatcacaacttcgtgcacaataggcctccaatgtcagacatgcacaaggagaagagagtggtgctccccagttcttgcaaaataactaccatgttctaggttaatcttaaattgttatggggggggaagcccttaaagctctttttctagaaacagtttttaaattattcttattttgcactgtaaatttaaaattttgcagggaatatttggttagtatagcagtgcttcgagcatgtattaataaattatacgttttgttaagcaatgacctgtgcccctattgtatgccaggcgctgggcaaatcttgtctgcctagctgtcctccttcatttgctcaacacatcccttctttatatataaatgcagaggcaagcaattttggtcagaaaggaaaattaaggacattttgttaatattttatttcttgtgtgctttgtcctggcctaaggtataaaaatctcacagtagtgcaaaaacaaatctttcccttattcccttctctcctactcgatagcagaaaaaaacaaatttttagaataaaattataaatgggacaaaataaaatttcttatcaaccaagttctagagaaatggttggactatttcctttgcatattagcaagttcaaagtcaaaatttctcgaaaaggtgctgtgactattttatagtttagttgagtgttgctgtttgaagtctcagaaaacttgagggagcccatgaagggggcagataagcaccttgagcagtgagcagtatcaccttagaataaatccctttcattcagatttagtctagtcattttgcttttcatttgcccttcacagactcttgggatttctgagtttgaaaaagaaaactgagaactggaacagggacacgcagaaaggagcaggtgggagggagatggcactgaatttccctttatgtcttttacatgttgaaccatgtgtatgtagtactaactcaaataaataaatacacatttaaaaagtatttaacaagtattcaacacgtttaaaaagtatttaacaatactttttaacaacacaacactcccgggtgtatagtgttgaagtgtgactcccacacttggggaagaataggagaaaggtaagaagaggggaacccagagaggttaagaaccttgccaaggacagtgaagagctaggactagaaataacgatacaatgaacccatctctgacttcctgctactccaaactacctcttgcttctattaaactaagggcaaagagaataagccacccctccatgaacatttttagaagctacaaatactccctctccctccatatattcctttggaattgaaatagatctaatggtaagcaaaatgtatacctgaggcacaattttctataaatagggtctttccaaaggaataa

SEQ ID NO: 824 - DNA, 4001 bp, Homo sapiens
taactataactcataaggtttagccaccacctgcaaggagacagctctgaattctcggcctgctacgcccccacccacgtgaattttgctaaaactagtgaccccaacgcatgtgagtgcatacggcatttacaaatgtgtgtgtgtgtgtgtgcgcacaacactccagttcaggctggccacttcagtgagaggctgtacccggagtttcgttcggaggggttcggggcgcgcccaatccttgtctggccacttgacgccctggcaggaagaatcctcccgccgccggctcccagacacacttgctggagctatggttttcgccaagtcaactcactgattgtgggacgggtggtggtatcttctaaaactagcaaacatattctggatataaccggcccttgacagaatccggctggtctgctcattccttcccccggccgggactcgagacgcccccacccaacgtgtggtcacttagtttgcctgaagctggattgctcgctggaaatgaaacccagagagcaggcccctgaggctaggttaacccggcaaaacgaaaaatgaaacaggcccccaatctgcgcctgtgaagaccaagccgcgggctgagattttcgtcctgccccctccctgccgcccagcgcctagctcctctgcctggcccgttctgccctgttctctgtttgaggtttgggggtctagattgcaggatcctagcactttataaaacagtcaggtctggtcagaaaatgaaaggtcagcgttgccgccagtcgaaacgactggtttgttttccgtcactggccagctccgcgcaaacgaatctaagcgacaagcagctagggtcctgccgcctgggatggaggcagcagccccagcgggcaagctgtccaagtcccagagaagccggatgcctccttcccctacgaatcagctcccttctcccggaaagactctccaactccccgttagcatttctacgcccaaggtcgcgccaattcccccccagcactgccgggtccctgcagctcccgcccaagaggttcccagtgggttcctacctggagacgcggagggtgacgggggcctccagaagtcctcaaactccgagctccgttcgcagacgctgccttcgcagctgtctggggatgcggaggctctgtctggggcttcggtcagctgcgattcgggggacaaacggtcccggggctccgccttcgccccgcctgcatttgaagtgctgtctgcaaagaggaggcaggtgaggggctcaggctgggaccggttgagtctgagggtgctgaaggctcccccaatcccccgaccagggcagccgagcgtcttcccctctccacccagaccccggccgggaaccctctcggatccgagggcaggcgcagagaggccatggcacctaggagacaaacccggaggaaccaggacagtaggaaacaaaaacagcagcaaaagggacgttggggcagcccctcccagctccggactaatggtgtgccgaggtgcagtaggcatccgggggagcagccccgcctggcccgcgcgcgcctcgcacctgctcggctaggcgccggtacattctctaaacggagggaatagtctggtcctggggagcgcggctggtggtagctgtgagccttcttgcttttgacgagaaatgagcgcggcatggtggtccggcactttccccactgcgccccaagagtccctggagccgctgtcacccacggtcactccgagggcttgctcagccccagcccggaggagacctgagagggaaagaaaaccaggtggagacgtgggtcagtactctccggtgcggcggactgggcacccaggcggagggagagcgcgggccagggaggcgcgcagagggcccacgggaggaggggcttgaccctgctgcgccgcgcttaccaggtggcacttggacaggtggcgcgaacccgccgtcgttgccgccgccgccactgacacagctcagcggtaaaacctgtcccggggccctgtctcaggcccctttcctcctccctgcccacgccccccagctcctcccctttcctagcgaagctcgctccggcaatcaaactccctggagagctgtagttcccatcgggtgggttaccccaactcagctactcatcgcctgcctggctgtgctttacggctggcgagggagggcggggacacgcggatcggtttaggggccggggatgcccagtggtcgaggacccggaaggggcaaggagccaagacctccaagagccagctaccaactggagtgaaaggaccggggggaggggggaacagaacacaagataaaactgtggggcggcgggaggacagcagcagagggattggggacagcagaggccagagaaaggaggtgggagagcaaagggacaggaaagtgaggggaacaacagacgaccaacccccgccccaggagaaactcgcatctgggtgatcccactcgcccctcactagtgccccacgtaggagaaactttgcccttggactcccggctgcggcgggcaccggtcgaggctgcggcgagccatcccagaccatggagacctaacctcgggaatcaggtcccgggaaaaaagcactttccgttctgctcaccaaaaaatcttgtcctagggaggtggagcccgatccacgaacgttgactgggaaatgctaggtgtcccgagtcggtagtgcaccgacaatttagcagacaaaaaagacaggacgccagagcgcgcaggctgcattagcagagagcgggggtcgggcccgggcccgggagggaactagctgcccggggcgtcgctctcattaacccccaatcagttcacctaataccaggtcgaaatctgagcgcagcgggagggcgtggctgcgcctgccgctaggctccagccggctccgggggcggtaccccacagtcgaggtggtctggagtaaacgaatctgccttcctcccggggtgaaggcgatggtgaccgggttcacacgtgagctgcagtacagcagttctccgtggcctcggctggttcagaaacgagggtgctgggaactctgggccggggcaggacctgcagtcctccggcttcgcgctgtttccactgccggactaggagcccctcggcttcctaggcaagatgcaggccacacagtctacgtctgtccgttggcgctctcagctcaaacgagtcctacaggccttggtccctgtagggtgcaggccccctgctccagatccccagccccattgtgtccccttctccggaggaatgggaatagacctgggagaaaagacgcctgggacgtgtcgcggggctcccgcgaagtttcccgctacccaagcgccagaatgcccctaggggtgagagtgccatccgcctccctccggggtggctcctagggctagagctttgtcgcttcctgcacttctcgtccgtacaattagacgccacaaaccccaaacccaattctttaaacagccacgaaactcggaagaaaagaaaaacggagtggcgttgtcccgagggtcccgctgcagcttggacccacgttggctgggagcgggacagatgggggcggggtaactgtcagcgccggagctgggtctgggctggcgccaccagagaccaggcggacgcggaggccgcctccccacccgggctgtaagcccacgcctctctcgcaccccggcccgctttgctggttcctgtggggagcgacagagtttggaggagataggggccccggggcctgggccgagcgcgtgggaaggcaaccccgcgctgcagctggcgcgggaggtggggcggcccctccgcgcgctcaggcctctcctcaccgtccgggcccaggaaggagggagccgagggcgctaagggggcgtcctcccgagcgcagctgccgccgcctccccaccagatgtttccttccctggtggatttggctcccctgccgaaccaccagaccgc

SEQ ID NO: 825 - DNA, 4001 bp, Homo sapiens
atctcgtctcactgcaaactccgcctcccgggttcacgccattctcctgcctcagcctcccgagtagctgggactacaggcgcccgccaccttgcccggctaatttttttgtatttttagtagagacgggctttcaccgtgttagccaggatggtctcgatctcctgacctcgtgatccgcccgcctcggcctcccaaagtgctgggattacaagcgtgagccaccacgcccagccgccttgtgtcttcttaagagtctaaaggattctacacaccgtggcatatactctcaccctcacccgcctttgtttttcttttaaatcaaaggatttcccaatttatcacagctggaaatttcagctatcacatactaaagttaaatgtaaagaggcattagtgtgtgttacatgaactctactagtttccttttagagtgaaaaaactacagaatacctcagtgagagtctgaaacttctcactttcaaaactaaaaagctgccagaaatttgttcaaagagtgaatccataatcattaatacaaacgctccattcttttcaccatgtgaactactacggcaatagcctcctcgtcgggttccctgcatttgcctctttaactcttctttttttcgcttcctctactcttcagccagggatgacattccaatcggagccatctctcccttttgattgagattccttggaagatatcccattgctattaggagaaaaccaaaactcctttacaaagcctaaaaggttcgacactccccctcatcccatctctccaggctcagttcttcatattggaaaagctcccttccgccacagggctttctgacaagttagtctttttgtctggaatgtcttttccttttctctttccttagttaactcctgctagcccttcagctctcagctcgatcctcacttgctcagaaacccttcctttccctccctaaagaagccaaattccctcattctcctatcaccgtggaactctcctctggggcactgccactgcggtaatttcacatcgttttgttcagcatctgtccgtctcaccaggcgcaggtctacgaaggcagaggccaccccagtggtcggcgctcaacacccatgaagaaatgaaagcgccttctaacgcgttagacgatgaaaccagggcacacaaccttgcgtctaagaagtgaacatcccatgcaaaagacttttcaaagggaagggcctggtttgagaatggccagagacatacaaatgtgaagcgcatactgaatccttccattcatactccgggagaaagacgatggatctgaaagaagccgcctgatataaacagggaatttcaatcacttcgaggccgattttccacagcggctgggcagagaactgcaaacgtatacagtgctagcacagagtccggaggggaagaaacggtgaggtttctgcttcctcctcgctcagatgctcccttccgccccacttggccaacccttcctctccctcctcgcttaaagctaggggatggaaaattcatacacaatccggttcagcatccgggtcctcactctcctttctttctttcctctgccccgcctcccagcctcccccgcccttcttcccatccgggttccccccagccgccgccactgccgctcacagttcaacgatgatatcacgactttcacgccgccggtccgggagtaactgtaccccgcatcaacttcctattttataatgtggacttaggctcttcccgatgcctacatgaatccttcccactatttcaccacagaactctccgccctcctcagccgccagcgacaccgcattagttggtgcaagaaaatgcgccatcccggtcacactgcgcaggcgtcgttgccgcctccctactgctttgttgccccgcccctttcacctcccccccgcccccgcaccggtccacgcaggcgcagggcattgcgggccttgcagttctcgcggacgaggatttgcgcgttggccccagagtatggactttatttcccagaaagccttgaggcgtaactttctgtttccatagaactggtgggaaaatggcgtcgttgtttgtatccagggaccaataggaacagtgtataggcgggttctaaagaactttaaccaatccaaggtcgtctaagaggccatccgggaaagaggtaggggagggggggaaaaaaaatctaggggaggggagaaagggggggaacctagagtcggtgggggggaagcgatgtttgcccgtcagtcgagtccggagtgaggagctcggtcgccgaagcggagggagactcttgagcttcatcttgccgccgccacggccaccgcctggacctttgcccggagggagctgcagagggtccatcgccgccgtcctctggagggcagcgcgattgggggcccggacctccagtccgggggggatttttcgtcgtccccctccccccaaccagggagcccgagcggccgccaaacaaaggtaccagtcgccgccgcgggaggaggaggagccggagcctctgcctcagcagccgctggacccgccgcccttcttccccatctctcccccgggcctgctggttttgggggggagaaggagagaggggactctggacgtgccagggtcagatctcgcctccgaggaaggtagggatattttctggggctttcgtggtctcctaagggggttcttttgggagtcgctgggcccggccaaggagcagaggaagatcgcggtggtggtccctgcggcgcccgaattcggggcctcggcctcccgggaacccccaccccccgcagccgctgtgtccgagccgccccctggctgggcggccgcacactcagcggtttagcggccgcggtcgggggcccgggcagggtgggggccgttccgcctccggggccctcggccctcacgttgtccccgcggcggggccagatgttgatctcgctcccacttgtcgggtctgagcccggaacgggacgtgggcaggggctctgtggcgggccggtcctgcccgcggcccacaggccctcctggcccctcggtggcccccggccggcctctcgctcggacgcggcgcgtgggggcgcggattcgctcggccgggcgccgaggccctaggggagagcggccggccctgcgccggacgccgggcttgttgtgagtttcttctctgacagaaatggcgtcattgtcgtagacgggaaactccgtcgggtctcgacaatggggacgggaagctgccgagctgtgtaggtggttgggtttgcggggatggcggggccggagggagccccgagtcggcgtgtgatggttcgggggctggcgcctggttgcggctctttcttcggggttcggacgtcgctcgcttctttccctccgcctccgccagtgcagaggggctcctgtggtgttgactgggtgtcttttgtttcccctccaggtgcagctgaacctggtgttttagaggataccttggtcccagagtcatcatgaaggtaagattgcctgcggaaaacgaatctctggggttatcgaattcaggaagtaggaggtttcgacgaggtcgtcgtgtggggcttccgagttttgcagaggaaggtgtgtttggtgacttggtgaccgagcccttccccagagagaccggggtcagctggcgggctttgctgtggagttggaggcagttataggatgtctcaactgaagatgattctcccatattgaacatctctttttgtagggaatgagaggaataacggcatgaattaaagtgttttaaaaggtaaaataaaaagcaagtcaggtaatctgaccctagaaactgaactgtattgtggttctatcagttacactgatgaaagagaatcttatttattgtgtgaacagtactgtaaaattttagcagaaaactctttgactcgtcacaaaaataatttaattgaaagatttaaaaagagaatttttgtgatttttt

SEQ ID NO: 826 - DNA, 4001 bp, Homo sapiens
ccaagtttaaattacagtcaagtttttttttgctaggtatgtgaccttggctaagggccaatcactttgtacttcagtccttcatttaactgttaggtattaatcatattagttaccatgtattaagccctaaccataaactatgcaatctgatacgtttacatacggactccactcttcacaatactcttcaagacaaatattctaatctctattttacagatggcgaaaactgagagaagttaaactcattcaagtccacacagctagtaaagggtagaacctggctccatgtccaagttatcgtatttaacctgccacctgcctcccctagagatcaaaggaaagtgtcctgtgaaagtgttttttgaaaaaaaaaaaatcctatataaatgtgaagtattattagtatcctatatcaatacaaataattcacagatgggtttgcgatttgccccttagtgcctgggaacttcgaaagaacaaagggttacactttaagctctctttcgtctcctcttggaattttgccttgacctcaatttcccttgaacagacctgataaacaactaattaaagaactccaggtgccgctgtaggcctcaaagacagctctctgcactcctctgagtccagggcaacaaaattatatgcttttcctagaaatgtggacaaaatattttgttgagctaacttttcacacctacctttgcagttcacttgggttagcacaaataaagtggtcacataaacgttcacataaactagtgctttaggtcatgcctgtgtcaaacttagttccaggcccccatgaaatctaattaaagcaaatttcagtccctttttaaggatacgatgtaaaagagctgatcttcctcatgaaaattttgttaactagtcccacgtgattaagtatgaatctctaggttatccactcttggaataacagcccagctttttaaacttcttggaaataccaccaaagggtttctggtgctgatgttagaaatgacagattgggggaaagtgggcctccgtttggtattacctggaaggctcttcaatgttttcccccccacttaatctgggtatcacctgcaaggcacttctattttttttttcccccgttaatctagggagatgacctgcgtgactctcacgcctgcggaggaaacaggagagtaaagtccagatgaagtggagggtattaatctgccccgccagatctcgagtctgggaaggtgctcacgccttgaacggccggcggaatccgggacatctggagcaaacacatttgcaagcggaagaaaggttgcctccctcaacccgcttcccaaaggccagatctcggagcaagggggactgtgactttctgcggtcctgccaagttaaattttcccttccagggaaggcacactcactttcccccgggacgcccccggcggactcaacacggcatcggatttcgcgctccgggaaacgccgctcaaccctcctgggcccacagaaatacgcgcggcgcggcgcggcgcggcggagaggcgggagagcctgagcacctggcgccttacctccgacggcgagatttcaaacgcgcccgcgatctgggcgtagagctcctggatgctggagaagccctccactcggcccgtggcactaccgtgcgccagctgcgcgtggaagaccagcctgcgtgcgggagcccgggacgctgagaggctcccgccgcccgcgcccgtcggctcgccctccaccagcccggcggtctccttggacttggccttcttcttcccccgcagcttcaggggcatcttgcagggccgagagcgcgggcccacctgcgctgccgtccgccgcctcctccccccggcgcctcggactttgcgccccgggccccgcgcaggtaaaagcagcctccaatggcagccgcgcttccgcctggctgcgtcgggtcagggccccgacctccacccctggaccggagcagccgcccgcccgcccagcctcccccgggatggatctggagagaaagaaagttacgtagtccctcatcctatcaccaggtttatccctactccttgtaaaaaatggctctatttacgtgaacgcctgaggatgccgacgctacagaacaatacgccttagaaggcaaacacgctggcccttctctgcttttcataaatctgtagtaggcacccacgcatgatttggccacaggccttcgggtccgtacgtctggactttcggggatagggatttaagtagaagtcaaccttcgtctgcattttctgcgtcttacgctctgcagggcagaattggaagagaaagtcacataaccttgagcttggtgctacgttgtattcataaaccccctcagccgggtccttggcacctctgagtttcccttttgcctatttcctgggctgcttcctctcccaacattcagcacgcctccaaagccatttgccccagctctgcccttcttagtctctacagaggaccttgcctcatatagtacaaagaaaattgaggccattcggtgtgaagtgtgagttccctcaattccctacctcgcgtttattgcattgttttcaagtccagtcccctccaactacgctttttacaacaaagcaaaacagtcttgaattattagctacgaaatttcctcacttctctgctcttagaagcactgtgatcagactttgcccccacactactgaaatttcacttactatgcaatttcagtggagtgaaatcactatcatatcttaattaccaaatacaagtaattcttttaggtttttatcttacttggtctgcgttgcccatttcattcttcttaaattttgtcctcttttggcttccttacctctcctctccccgtccccaccctgctccttgctaactgctagtctccaggagttgcattcaccgacagtttttcctcgacaaacttcccttcttacttagctttgcatgttcttcctgtatggtcacatcaacattctcggtttcacagacgttgttgtctaccaaatgtctccaactccagcttattctaccagaaagggaatgtactgtaggaaacccaaattgagactgaacaaaactgacctcatcatttctcctgcatctatcttttcttttttttactcctgatttcagttaataggatcaccaagcactcccagaccagacattgtggagtcgtcgtatcaggatttttcctcttccctcacctctcacatcaattcagtcccgaaaatccatatttctcaacttaaggttagcagatgtactgggggaggagagtcttaagaattctttaggaggccggcgcggtggctcacgcctgtaatcccagcactttgggaggtggaggcgggcggatcacctgaggtcaggagttcgagattagcctggccaacatggtgaaaccccgtctctactgaaaatacaaaaattacccgggcgtggtggcgcatgccggtagttccagctactcgggaggctgaggcaggagaatcgcttgaacccgggaggcggaggttgcagtgagccaagattgtgccactgcactccagcctgggcaacagagcgagatgaaaaaaaaaaaaaaactttaggataactttaacatttttgttttatgtttctgtgacttagaaaagtaatacagggacacctgcactcagccagtgctgctgctgttgcttcccaggagagccagggcaactttccacttggccctcatccagcttcaagtttcttcatcaaatcagataacaacactcgagcttgtagccttgtccgggagacagcaacgcaaggagccaaaatggtttctttgttggaatgctttaattctccatatggcacaaaatattttcctgaatatgcagcgaaaattcctggtaaatccacacagaagctttctgaagtagcaaaggaatacaacctcactagaggttccatccctgaagaggatgctgggaaattag

SEQ ID NO: 827 - DNA, 4001 bp, Homo sapiens
tggtccgtgtaagggtctgaggaggtgccctgggtcgggggtgcgtcttggccttgccgtgccctcatcccccggctgaggcagcgacacagcaggtgcaccaactccagcaggttaagcaccagggagatgagtccaaccaccaacatgaagatgatgaagatggtcttctccgtggggcgagagacaaagcagtccacgaggtaggggcagggtgctcgctggcacacaaacacgggctccatggtccagccgtacaggcgccactggccatagaggaagcctgcctctagcacactcttgcagagcacactggcgacataggtgcccatcagtgctccgcggatgcgcaggcgaccatcttctgccaccgagatcttggccatctgacgctctacggccgccagcgcccgctccacctgtgggtccttggccggcagtgcccgcagctccccctccttctgccgcagccgctcttctcgccgagacaggtaaatgacatggcccaggtagaccagggtgggtgtgctgacgaagaggaactgcagcacccagtagcggatgtgggagatggggaaggcctggtcatagcagacgttggtgcagcctggctgggccgtgttacactcgaaatctgattgctcgtcaccccacactgactcgccggccaggcccaggatgaggatgcggaagatgaagagcaccgtcagccagatcttacccaccacggtcgagtgctcctggacctggtccagcaacttctccaggaagccccagtcacccatggctcccgggcctccgtctgcaaggagacagagcacgtcagtgtgtcagcatggcatccttctcgttcgcccagcaacaagcctgcagggaggtctgccacgcccgttctacctacaaagaaacccaggctcaggaaggggaaggactggcctggaggctcccactcagcagtgcaggcaggacccaacccagatttttggatgatggctgcccacctctttgtatggtctcattctgctttggctaaggtccctgcctaatcagacatctatgtccctcttgtccccgagccactgccccaggatggacacaggccaaggaaatctgggtggagttgaggctcctttgcctatgggaacagaatttgaggaacttatccaaagttgtgcagctgggctaagcccttcctcccttttgcccaaggctggctacccccagacagtgggagctagtgatgatggtagaggtgttatcttctgcttcttagggggctcaaagcctcaggtccctgctccccgcctcatatcttacccagctggcttcactctaatctttgagcctgcaggggctgggtagtggaaggggttttaggagctgaaggcagcatcatcctttagctccaccggtcagcaataatgaccacctgccacttgaggagggacatttggtcctgtcttcttcctccacctccactcccacccccttccacctccaaagctgatgctggcaaattctagactcttgaaaggaattgtcattgcagggtgaggcacaggccacaaagttcccaagggggaggtgcctcttcccaagtgcaaagctgtttagagccaggctctggaagcggccctgggttcaaatcttgccttttagtaactgcggccccttggataaggaacaacctctgggcccctcagtctcctccacgatagagtggaaacaatagtattcctcccgcctcgggttgttacaaggattccatggaaagagggtgggagcctggccaaggccacctgggtgagcgcggctctgtcgcggcgggcgttccgcagcaacccccgtcccggcatcggaggacccaagactcctcccggcctcccgcgagcaggtggcgcccctggtcccttcctagcccccgactcaccgcctgcctgccgggcggcccaggtggaggtggggacgatggccggagtgacgcccgcgggagccctgctggaccgcacgagcggcgggggcgccttaaatagcgcagaggggcggggtgggggcaggaaacgcgacggggagggcggcgggcgctggagagagggcgggggcggggactgggaggtgcagactccctaaacccactccggggaggtgggcctgtgtgatttgcggtggggaggggcaagaggggctgacctacccttcctctcctctgttctctctccaccaggtattccagacagtaaactctcctgtcgtttctttggccagggaaggagagttctcccaggccaggatctctcagggtggctggatttgaaggggttgcagtaagggctgtggatctgggcaactggcctgcggggctgtgaggggtgggcggatggggatggagtgtggggaccactcatttgctaggtggctggccctagtgtgccaggatgaggcgatcaaggctaattacggcgcgggaagctccaatgggggacaggggttgtaatccacacctccagcatacatggtggagcaggcgtctctatccacgcccagcccacgttcttccagaattctcaaacatccccatgtctgggcaggctacacaatcagaggccattaagcaattcccatggactccttgagactgggggtgggggaaccacctgacctttagcttggaccccgttcttatgcctctaaatggtggctgggtggtgtgggggacatccataggaatgaaagggctatgcggagcctgccttcatgcattcaggcatcacaggtggatgagcatcagtgagcatctgctgtgctgcagacgctgcttggggacctggggataccctgaggaaccagccaaacttggtctctggcctcctccctcactggctggtgcagggattgagcatatcagcccttggataacggtaagataataaatgtggaaagttctcctgagaggtactgggtgattcccaggggacttggttaggaacatttcctggaggagaggaaatgcttttccccctccattagccaagtggaagggaagagcattctaggtagaggggcggcatgagtgtggctcgagggcctggagctgtggggttctgagactgtggccactgccctcggagtgctgagacgttgttggtggctgagcccaggagctgagactttgctgttgactcctgtacccttaggcaagttactcaaatccctgtgcctcaatttcttcctctacagaatgagaatagtgatagtatctactttgtggggttgatggcatacagtgtgatcaaagcacatagtgtaatagtggtacataaagtttttcaagtgagtggtggctaaaaacattgtgatactgtaacaaaaagggtctgtgggttgttcttagagggtggtaggggctggcgcagctgaggaaagggaaggtggcagggggctgttgaggcctggggctggtggcacagaagtccctgttcctccacagcaagatttagtccttggattccctgggccccagggccgggtccctgagggttctgtcttcaggaccagcaggaggacatctttggggacacgcagacctgagaacttcagggctagctgccctgagggatccggctgggctggcttcccctctaggcctctccctcagggccaggctgaactgagtctcctggatttctgaagctaacaactgccccacttaattctgacccttgagggcatgagaaccgaggcccctggaggctggttctcaccacgcccccactgcagcctctgctcactaccgagttttcctctcttggggctgggcccagctctcccaaagcctttctgattcagtatactgggaaagagggaagagccagtggagggctggggagtgacgtcaaggctgccctcaccctgctctgactccttcctcaagggctttggaggtttgaataactcggcctcctccccagaggatgaagaagctgggatcaactaagacaaca

SEQ ID NO: 828 - DNA, 4001 bp, Homo sapiens
ataaagacaatgaagacattcttctctgtgggccgggatacgtaacagttgaccgggtggggacagggactcctgcggcagacatgcagggtggtcaggaagattccgtagatgaagtactggcccacaatgaagcccacctccatggtggtgcggatcaggatgctgcacacataggtgttgagcagagtgccctggagggcaatccttccattcccttcctcccagcaggacagttctgccttctctgccaccgggtactcgtaagagccagagccccggacctctttggccctctcggcctcccgtagcttgcgcttctcctgcatgcgcacagtgtgcatggcgtggcccatgtacaccagagagggcgtggagacgaagatgatctgcagcacccagtagcgaatgtgggagatggggaaagcctggtcgtagcagacattctggcagccaggctgaatcgtatcacaccggaaatcagcctgctcatccccccaggaagactcagcagctgtgcccagcacgagcatacggaatatgaagaggacagtgagccagaccttgcctaccacggtcgagtgcttgtgtacttcctccaggaaatttcccaggaagctccaatcgcccatcttggcacagccagggaacagatgccaaaacttctgcaaatgggagagagagaaagagagaaaagaagaaggatgttctgtgaaggtctggaatgtctatcatgttctgggattccactgatccatccatccaatgggttctttaagaaaatgcaacttagaagtcaaagcaaccaacgaaaagctcgctctcctttcccagcaaaaataaaaagaaagagaagattcaaagtagccatattagcaaaattagagcatggctcccacactttaacggatctagaaatcgtggtgtgtgttacaatatggattctgctcttgccccagtaattctacttcaggaggtctgggatggcccccaggaatctggatttacaacaagcagcccaagtaattctgatgcaggcggtgagggaccgcacctggagaaacacgagtattaaaaagaacacaagactggggtctgcaaatgtgactctgggcatttacctcactgagtctgtttcttcatttatcgaatggggatgggaatagctacaccagagaattctgaggattaaatgatatgaggtgtgtgatattctgaaaatcattccacaactgttccaaatgtttaaatggctgttggatggaaaaggaatttttttatggctccagagggcagaactaggtggaggaggaaagagtgaggatgggattggcaaatttggcccctcaggaagcactctgcaaaaatcagaaccatccagcatggaccagctgtgttgggaggtggcaaacaaaaagtgtgctttggtcacaccagctaacagtatcacagatgagtgctcacttcccctggctggtaaggcaatgttgatctcccatgcctcggtgcaacacagccattccagccacacagctcagctcgccctgctgctaagtttctgtgtctcatttaaataaggttcccacacacagatctgcccacccttatgtccagaataaatgtcccaaaactttatgtcccttacaaaatcctccctcatctggcctttgtctgcttttccagcctgttcctgcctgtccacatgagttccttttgtccagccatgccaagtcttcccaaatgccctccttctgtacccctacatgtcccctcacccctagctgaatcccatttacctttcaaaacttaacccagtcattgcctcctccagccctccctcctccctcaagctgagcctcttcagctcctgtgatggcccccgggacacttactcgtctcccagtgcttgctgccttgtgttgtaatcctctgcctgtctgtgttctcccaggagggactgtttgaaaatggagactgtcttttcttctgtatcaccagagcctggcccagagtaggtgtttaatatatcttagttgagtgaatgaaggaggggctgacaggcactgttgtttcctacccaatagaaaaccaattccctgtttcttgcctgcctcccattggcagggtgaaaaagccaggtatcactttcttaatctcctctgcagttagttctggtaggtgaggtatggggagaatctaaagtagagggaatgctccagaaaaggtttttctaccccccagtaaatggagagagcctcactcacagtgctcccatccccctgtgaacaagagggaacctcactcacagtgctcccatcccctggtgaacaggagggagactactcacagtgctcccatcccccggtgaataggagtgagcctcacttagccccaccgcttcctgcctgtggacagagttgtatgaaccaagatgtctaaagctgtccagagaatctcagaaatgtcaaccagtgccctgaggcctctgaagcaactcttgaggctccctacctccagaattcttacttagtgaataacgaatgttcttacagtttaagcctctaaccattcctaaccaacaggatgacaaacgtctcggagggaatggagcataaatattcctttcttagaatcataaacctcagatttgggtgggtccttagaggtttgtcaaattcaaactttgaccgtcatatctttgctgccaacgtgctcctggtttctgtctgaacattcttcatgcttatggggaaagatggggtcagggtggtgcatttcatagtccaggcttcctcagctcttgagttgattgttgccttgacagggaccaacctcctggccctgtattctctcagaccccaggtccccaaacttgagagtatacagtgtccctgggaatgagggagttcctgagtgagcggaaagcatcttatctctgctcctctctatatcaaagacccatgcaggtcttgaggcctttcctgtcatttgtgatcagacatctgccccatttccttaggtggcgaagcgccccctctttcagcctccaaatgtggaaaattgtggagcatgtgctcaaaaggaaaatggctgattagataagagtttgaattgtctgtcctctcttctgggcacatgtacagtgttcagcaccttcagggtcagccacacacgtgcagtgactgaactatggtaaatgtctgagaaaaagagggagggagagaaggggaggaataaaaagaagagaagaaaagggaaggacaagggagagttggaaatggagaaaaagaccatgtagggttaagaaaagacagatgcaggagttagcttactgaggtttgacaaatttctattaccatctgctgggcttagataaatgattcaatctgtgttccactttcctcacctgcaaaatggacatactattaactcatagagtgctatgagatgatgcgtgcaaagcacttaacacagtgttcagcaaataagaactgaataaaaggtagccattactagcaacaagagcagtggggaaggatgagagtagaagaaggagggaaaaagagaaagcagaaagtagagaaaggtgcattacaaaggagaaaagaaatgggagcaagagtagaaggggaggaaatgagaggaaaatggaaatagaaaaaaaaagaaacaaatgtcatattcttccaggatttggggcaagttttccacactcagtccctgaagacttctcccttgatcttctcactctgtcactcattccttgcaagtccccaaggaagtataaaaatagttccaggcaaagaatgtgaccctttggtctagtctgccaagaggcttgactgctgactccttcactgctgtccaaggaattccacctggaagaggtaaagcacagatacaagaaaggaacaccttggaaaaccagaaaggcagtattaggaaggatatcttattgggagggaaaaagagaaactatctgaggaggtataggggtgagg

SEQ ID NO: 829 - DNA, 4001 bp, Homo sapiens
cctcggtatgagtgagcagggcagggtgctctcccaactcaatcagccctgactcactgtgtcgtctcctacgagtcatgcccttctctagtccttgttctccttatttgccaaagaaggaggctggtaatggaagagacctctttcagttctaatgttctcagaccttaggcagtactaggagaggggacaggagtgaggcagttaagatgtaagaacagtgaccagcttcaggagcccagcaagcacacctctggggttccaaggcagagacaaagcagggcagcctgattctgtgactgctgtggctctgtgaacgtcacatgtgtgggtgaaggatgctcagagagtgttgggttggaagccacagaatcccctcctggtactctctgctctgcagactgtggtcattgggactcctcactggcaggtgctgagtgaggaaaaggcttggagggacagccaggggagcaggctccaaacagctctgccgccgggcaacttggcaggaaggtggaaagttcagagctgtccctagagagcagtgaatcaaggactgggctgggcttggctgtgactctggggacagtgggtggaggggatggaggctgcttggcctgctgatgtaaaagtcaggttagaaggcctctaaataccagctggtgtccccagccatgagccacagcaccaggcagtcagaggcgctgcacctccacacgctccccttggtctcttctctccttcagttttgctggttccaggtcttctgactccctgttcggtgctctttgcactgccctgcctccccacgcagccagctggacctctttgcaccagagcctttttccagaaacagcagccccagtgatttgctggggagtgagaacaaggaatccctctattataatggaatactgcgagggagaataaggaaaaaactgagcaacagagcaggatgagaaattcttgtgttgcgcctccctttttcagtggttctgagttgcctttgagcctatggaatcacagccttacacaccgttactgctgaatggaaccagagggaaccttctacttcaaattccccattttatagatgaggaaaccgaggcccagcatggggatgtgtctgctacaaggcctcccagcccctgagtttgggctctttcactgcatgctcagaagaaaggtccaggaagaaactaacagaatctttctaccccatggcctcctacttcacaccacaagtggaaaggagaccttcagtgggtgctttcctggccttcctcgctggtttcacatgcctctttcctccggctgcaagtggcagcctggatctctcacatgtggccactgcacagcggggacatgatactctgcaggaaactaagcagggaatatttttaaaccatccaacatgccttagggagaaaaaaaaaaaaaaaagcaaaacactcccctagatgctgctaaaggcattttgaaaaagattccatgcctagcagaagcatcgtaaaacagtgttggttttatttttaaagggccaattccctctaagaaaagttcttgggaatggactggtgacccacttctaagatgcccccagaggactgaactccacaaaagtaggctggaaccccaagggccctccactcgcaattcttcatctccctctaaatcaaggaagtaatttatctgctgcttcgctaaaccttcctttttaatatatccatacctcactatcacaggaaatagcgggaggggtaaggaataaactcacaggtagaaagaaagagctttgtttttatccagcctagaatccaagctcccttcctctggctacttcatatccacttgtagctttagctgttcaaattcaagtctactcttacctgcttcttttcctcctccctggactttccttccgtgggcttcttcacactctggctgcttcttctccaactgcccacgctttttgctcttgagcctgtcagttgttcctcttccaccctctttttaatcgtatctgtcgccttccctcctcccacttcttcctactctttctctctccaccccttttcccctctgaatccctccctcccctctctctcttttgtgctcttagagtctttgctctaaaagtcttcttccctccacctcctcgtagcctcagctcactgtgctccccttctctggcccccaaggaggcagagccccctcctccctgcagccctccccctgtctgtctgcctgttgtccttgtcctcacagcagtcctccacattgcctctcccccgggccgctggtgcaccacctccctaagtctcttcctgcccacccctctgctgcgtcgcctcagacttcccaggccatggctttcctggagcatcagcaggaaaattggcactgcccaagagatccctcttcccatccttttcccgtcatcagaaaaaagagggtgttcactcacataacaagccttttttgggatttccactatgcccacaccaatgaactaagcataagccagcacaggaaaacacggtctcacaagtcacaaccatccagcgcccagaataggcaccaggactaacctgaaaggaaagaaatgctaacctcccagctccaaaagtgtagggcattcctcactcccagaatcatactctctccccttctcctctaaagagaggcgagcaccttctacgcatcaggcactgggctagagacttcatatatatatatatattgcctatttttatcttaatcattctattttccaattctataaggtagaccttttctgcattttacatttgaggaaattgaggttcacagaaattaagtaacatgattatggcgacccagtttgtaaagtaagtggtagaatcaggattagaagttttcaccaatgccaacatttatcttattgctccttccgtgaaagcaaacaggtctcccaactggaattgaactgatgaaagtaaggttggctcttgttagatcacatgccacaggtgaccaaattcagaaactgtgggggtatctcttccctcaaaccctcccattctccaacttctcccccagactcctcaacttaaacacttagccgtggacccagttggaatgaggtaagtgtcaacaacagaggttactatgagtggactgaaatcagacaaaacaatgactaagagcccacagattatgagaactaaagaaaatttcagtgatcatctggaacagccagggaaactgaggcccagagaaaaggccacttgtcaatgtcatatacagtagtatgtggcagaggcagggcaggaagccggaatggtccctttgctccacatcatcacctgaaacatgcctttcccgcaaagcaccggtcacaagcattccaagattctgcaaagatgtttccttaatgggctatatttttcatgggtgaatgagcttaggatcagcaagagggaaaagagcaaggggctgaatttccagtttcaagggaggcaacagccctggtgaaaggaaatgcaggattcttgattccttggccagagtttaccccacttttatgcagcatcagagcagattctggggccagcctgactgggtttgaatcccggctccgccacttactagctgtgtgacattgggcaagttaacctctatgcatctcagtttcctcaactctaaattgggaatattatctacttcacagggctgtcatgaggactaacgagtatgtgaaaagcacatagaatggttgggaacatggaggtactgtagatgtggctgcaaaataataatacaatatacaatacaatgcaatgcaatacaatacaatacaatgcaatgcaatgcaatgcaatgcaatgcaatgcaatgcaatgcaatgcaatgcaatgcaatgcaatgcaatacaatacacaacctcctccctgcctgtacttgccatggctgtaccaaagtcctgtgatggaatttagcatgtgaaaccaatagcaagc

SEQ ID NO: 830 - DNA, 4001 bp, Homo sapiens
ggagagaaactgtaatttaggacacaatctttccaaccccatgatgttgaaacaggcctactgtgctgttaaggagagacactttagagctgcgaagggaaatgtattggtttcctgacttctaacagtgaaaatttaaaggaagtcagatcagagaagcaaagcgttctgtgggagcagggagaaatctgaaccaaaggaagactatttctcttctctttctcagagataattctctgttttattttgcttgtgaaaatttagtgaacagacctattacagatggaaaataaatggatagagttcaagcctccaaccccagggtgtccatatatggccaggaacatcccaccagaaaatgatggctagaggtaatgattaaaataacaccttatgtttgggtatccttgatctaagtgatacattttcacgtatcttatttcagtcctcataacaagctgtgaactaggccagtggttctcagacttagatttcacagactagtataataataacaaactagtgtgaccaacataaggataccaactccttattttgccaaacaaggacataaaaataagagttattggctgggcgtggtgactcatgcctgtaatcccagcactatgggaggccgaggtgggaggatcacttgaggtcaggagttcaagatcagcctggccaacagggtgaaaccctatctctactaaaaatacaaaaattagctgggcacggtggtggggcacctgtaatcccagctacttgggaggctggggcaggagaattgcttgagcccaggaggtggaggctgcagtgagctgagatcacaccactgcactccagcctgggcaacacagcgagactctgtctcaaaaaaaaaaaaaaagagttattaaattactaactacaactacagtctattttcatcatcatttcataaaaggggattttaacaccacaaaactggagaggacataacttcagaataaaagacaagcctttaaattgaacacacttaacttggtgaaacatttactacattgttaactttatcattgtcacattttggtcacaggttgtggaaaccttcatcttgagctagaactgacagatccccagatggatgtctgagaaccagtgaacttggcattatcaatccccattaccagacaaaaagacaggctgggaggtgaaatgagtctccaagatgggggcttagctagtgagggcagagctaggctgtgagccctggtcttctagatctaagcccattacagcatagccctcctctggttttgaagaggcagaataacacatatacatccattaataagttatccaaagcgttcaatggccacttaccactctggttggtaaccaggtggaaagtgcctcttttctagtttctagaacagccactagccagcagttctcatagatagacaacagaacctgctcctaggaggaattttatggtccttagccagatcccttcctgtgctccattaaatgctccaacatggaaaatgctgagcacgaagcctccgctacccccacagcattcagtaattatgactattatttctattgtagaatttgagtgaaaagggcacaaaactttttcataaatatcaaatacttggtttaggtccctgtggattcctgtagacatgaaaagagcttaagaagtcaaattgtagtttgagtttggacatctctgtttccccatcctgctgattattccagcattcctctcccttccaaacctctgccagttcttaggtcaacttgaagagggttttcagagttggagtgtaagtctagccatcccagcccaagactgaatcttattggcaacctttttccttttggagaagcctatatatggcccttagattaggctgagaaagaacaattggggggaaggttacaaactaatatcacccaaggaaaacttgccaatacaaggagtgtcccacggagaaatatgtgctctttctctcttggcgctcagcagcaaaatggcaactttcgtctctttcctttgctgcctaaaagcccacctcccacttctctaccccgcccctactgtgctgcacgactgagcagatatgactggattggccctgatgggtaggttttactgtccagcaatattttaagctcccagccagacagcttttatgaagggagggatgtttgggaaacaatgggagtgagagaatgggagagctgtgttgggcactgaggggaggaggatggggaaagctgatgtgtgaaagcttagctggggcttctgtgcctcccaaagtttcttttagcagcagactgggcctgtacatcagtaaacctttggcgtctctccagagcgcatgagcctaggggcattttcccaaggccttatcatcagctgggagaatcttaatgatgtagggacagtaagtggtcagttgtgtgaatccctctgccctgagtcacaccaagagtggttggtcctttccaaaggaccatatttcattttttattggtggtttgctcttgtctctcaaagccttcagcagaattgtggatattagaggctgggaagtgtagtggcggaaggaaggatggggagcatgttgctaatagatacaaaagcacagctagatagggggaatgggttctggtggtctgcagtgctgtagggtgaatatggttaacattaattaattaattattttaatttttatatttttgtgtgtgtgtgagacagagtctcgctctgccacccaggctggagtgcaatgtcacgatcttagctcactgcaacctctgcctctcaggttcaagttattctcctgcctcagcctcctgagtagctgggataacagacacccacaaccacgcccagctaatttttttttttctatttttagtagagacggggtttcaccatgttggccaggctggcctcagactcctgacctcaggcgatctgcccgccttggcctccccaaatgctgggattacaagcatgagcgaccatgcctggccgttaactattttattgtatagtctcaaaaagctagaggagaggattttgattgttcccaacagaaagaaatgataaatgtttgagatgctgaatatgctaattatcctgatttgatcattacacattgtatacatgtattgaaatatcactgtgtatcacaaatacgtacaattattatgtgtcaactaaacataaaaggaaagagctttctaaaaagatcaaaacaataaaaaagaaacacaaacaaaccttcagcagggtggtctccctctttgaaaggagccttaacactccaaagaattctggtgccatttgtcaaagtaatagcctttctcaccacgtttcacttataattacatatacttttgagtagcggaagttcaatcaatgtcagctaacatttttagactttagtgccttcatctgttaaatggggatatgatggttttgctcaccaggaggctcttggattaaattctaatgtggcttaatgaggaatgatgcttggagggcatggacatatgctctctgaggcccactcccgtcccatcatctgggactgactattggtagtataaaaaatggttattttgactacatttccaaaccaaaaataggggcattttatcctacaagtttattcgtgaaaacaatggagcaaaaatagttgaaacttagattgttttatgaaatctgcaatgtatgattactaaattgaagacaacttggagggcaaactagacaaaaaaaatctaagcactggcttcaccaccccacccccccttcctgtcctttctggtgtcatggacatattgcattttgatgggggcagtttgaaggaggatggtaccaatgttgtgtgagtccccaattccattttaaataaaatggtcactagcccaaaaccttgtttactttagatgtctgatttcttttgaactcccaagtttgagggcccacactgact

SEQ ID NO: 831 - DNA, 4001 bp, Homo sapiens
atcatttaaatttaggaatgtaaaatagtgatagctttggctttttaaataactagttctagagtctttagttcctttcttcagcctttgttctgttttttttgttcgtttgttttctgagacggagtctcgccctgtcgcccaggctggggtgcagtggcgcgatctcggctcactgcaagctccgcctcccgggttcacgccattctcctgcctcagcctctccgggtagctgggactacaggcgcctgccaccacgcccggctaatttttttgttatttttagtagagacggggtttcaccgtgatctcgatctcctgacctcgtgatcctcccgcctcggcctcccaaagtgctgggattacaagcgtgagccaccgcgcccggctctgttaatacgatttgcaaaagcatcaaccttctaaaatatagttgtattcctgaaatagagaaactttccattgactttattatgttaataatagcatactctggccgggcacggtggctcacgcctgtaatcccaatactttaggaggccgaggccagcggatcacttgaggtcaggagtttgagaccagcctggccaacatggttgaaacccttgctctactaaaaatacaaaaattagtcgggcgtggtggcgggcgcctgtagtcccagctactcgggaggctgaggcagaagaatcacttgaacccagaggcagaggttgcagtgagccgagatcacaccattgcactccagcctgggcgacagagcaagactctgtctcaaaaaaaaataaataataataataataataataataataataataataatagcatactctgacccaacaacccaaagcactttaaaatgtaagcaagttggccaggcgcggtggctcacgcctgtaatcccagcactttgggaggcacaggcgggcggattacgaggtcaggagttcgagaccagcctgagcaacatggttgaaccccatctctactaaaaatacaaaaattagccgggcatggtggcacatgcctgtaatcccagctactcaggagactgaggcaggagaatcgcttgaacctgggaggtgaaggttgcagtgagccgagatctggccactgcattccagcctgggcaatagagtgagactctgtctcaaaaaataaaaaaaaagtaagcaagttaagtctcatttatggttcataaataataataatgtaagcaaagatgtaattcatgttgtttataatagtcataagctaaaaacataaaataataatacaagaaaaactggttaaataatcgactacatccacggtgtgatactatgcaaccagtagaaatgataaacatacataaaatggcatttgatatttcatttcagtgaaattgatgttataaaatagaataatatggccccattattataagtttagttacatttacagatgtatacaaaaaagtctagaaggatattcatgaaaatattaacggtgattagctctggatgttgggattacaaattatatacttaatatattgtaattacatgtattttaattttttactataagcattttacttttataatcataaaaagaaagaaaatatttttttcataaaggacaacacatagtatttcctgaaagaaggagcagtagtatttagctacaaattaaagctttcatagcaaatgacataaaaactggtatacatatatacagtaccatagaattcaaaagaaaaagataaaaacatttcaaacaactctttcttaataagctaaaacagagagattaacacaaacctttcttagtttaggtaaatctgagaagcaaaccatgtttagaagttacagcatggccatcttcaatttattttctgaatttgtccctttgctggtatagagcagattcagttcagttgaatgtagtgagtgagtcatccatcaactaaaatccatgtccctttctgcttatccttgcttttaaaacagcaccatccaatagaactttctgcaacaatggaaatattctatctgtgctagccaataaggcagccagtagccaaatgtagctattgaacacttgcattatggtttgtgtgtcagagcaattgaatttttaattttaaataattttaataaaaatgtaaagagctgcatctacctaatggctgcttttttggacagcacagataaagaatgcttataatagtcctgataacacactgcaatctagaagactaaagtcatgagccccaaattaagctgagtgaatgattcctccataattcagagatgtcaaatttaaaatgacaggaggtatttgtgtgctgtttgtatgcaacttttgccactgggggaacctaataaaatgtcattgttttttgtgcaataaaccatgtttctagaaccaaaaaagtctttcttactagataataacttcttggtcatctgccttaataaatgggtcatgtccgatttcatagatagatcctgattctgtctcccatgttctgttattaacaattacattgtattttaggtcattaaaggtcccttcagagctagtgatctggcaggttgagcataacagataaatacttcttccctgggcttttttgccaacaatagctacttctcagattaaatacaaacatttcaccagggacaaatatatatatatatatatatatatatatatatatatatatatatatatatatttacatatatatttttatatatatattatttatatatatatatatttgtataggcacacatacatgcacaatatattcatgtttctatattatgtgttatctgaattacatatgtgtaactcataaattattaataaactcgaaacttcctcaacctcggtagtcagagaatacatatttaagtgaaatattattttttaactatcaaaatgcaaaattttaaagatttataataccttcttttggcaaagtagggagacactgttactctcatatcctgtaggtaagaatataaatggatacagctatttaaaaggcagtttaaacctatcaatattagtatagcatttctgcttttggatacttgaaatattcattcagcatagacattcagagacacactgcacatgctaggatgttcacatagcactgttggtaattatacaaaagcagcaataatttaaatgtctgacagaggaatggttatctatggtacatctatatcattcagcaattcagagaataaagatttctatgaactaatagagaaaggtccctaggtcatgttgtaaagcaagttatagaacaatacatgtatcacatttatcctgttaaaacctacatttcataaaaatatctaattagaggctgggctcatgtctataatcctagcactttgggaggaggctgagacaggcggatcacctgaagtcaggagttcaagaccagcctggccaatgtggtgaaacccagtctctattaaaaataccaaaaattagccaggcatggtggcacatgcctataatcccagctacccgggaggctgaggcaggagaattgcttgaacccaggaggcagaggttgcagtgagccgagatggcgccactgcactccagcctgggcgacacagcaagaccctgtctcaagaaaaaaaaaaatatatatatacacacacacacacacacacacacacacacacacacacacacatatatatttagctaaaatcgattaacaaaaacttttcctagttgagatcaatctgagaagcaaatgatgcttaggaggagttataccatggacacctctaatttgttcttcagatttgtccctttgagggtgtagagcagattcagtgaagttcaatacagtggatgagttggacattaacttaaatccattttcctttctgctcatcctacatagaaaaatgtctgcaaggatacagaccatactgttgtgaccactgatgatggtcagcactagggaaaaacag

SEQ ID NO: 832 - DNA, 4001 bp, Homo sapiens
atgctggctactcattactgtgaaatttagagaggtcaagtcactcacttaaaacaagaggtggattcaaggccaggctgttgggtaccagagcctgtgctctccaccacctcctcttcccttctccgctggactcctgccctagaccagattcttgaaacgtttactttgtggatgcctcactactatactgtgaagttgcagttatgagtcccattctacagcagggaaactgaggctcagagaggagaaataaccagctcaaggtctcacagctgctgggtggtgaagaggggagaccagttcaggtggggggtgcatggagccttatgatctgactcctgggaggacactagatccagggaatatctagagaaaactccctgctccctgtgctgggcctggggaagcccagccacccccagccacactagttgccagggccttgtggtggaaagatgtgctttgttcaggccttaactcacacatcttcctcccagtcctggagtgactcagagggtgtggacgggtgggtctgcctgagtgtgccttgtttctgtgctgctgtgggtgtgagagcacccgcctgcctgtccacgtgtgtgtgtgggcctatgtgcatgtgagtccccctggagctgacttgcacctctgagcatgcgtgatgcctgcgaggccaccaccctgccccaaaccactattattctggcctgtattatggcctctttactggcttttcaccttccccctgtgcccctagagtccattaaatcagttcatgccactcccttgtttaagactctactagcttctcgctaggcttagcaaaaccccagattcgacattttcaccctgccaccctggaataagggccttgggggctttttactgattccttctgcctggaatgctcttcctccagaacctcacatgggtggatccttctcatcacagaggcctctgctcaaacctcatctctttagaggcctctccagattaccctgggtctgaaagagcccctgcttctgtcactctgttcctgtcccctttcttttttttttttgagccaaggccttgctgtgtcgcccaggctggagtgcagtggtgcgaccttggctcactgcaacctctgcttcccaggctcaagggagcctcctacctcagcctcccacgtagctgggaccacaggtgcacaccactatgcccacctaatttttccagccccctctgttttctttatagcacttagtcactatctgaaattaaagaatttgtcctttttttttggtcttattaattatctggctccccctctagaatgtcaacttggtcttgctcactgctttatatttagtgcccagtgcttggcacatagtaggcactcagcgctgaatgggtaaacaaatgaatgctgagttttcagcaaggcagcttggagggaggggacaggagggtgggcaggatcctggtcagggggcagcctggtcagggggattgggggaaagacttccctacactggagagagggagagagcacagttccttctcagcacctggctctcctggctgcgtttcctctgggaatcacagtctgggcaggatggggtgattgggaagacctcattcttggaaaccctcctcttctcccctactctgctccttctaagccctcgtggtgggggaagggagtgggatagcatggaacacggagttccacctggattcaaacctcagcttggccacttagtagctgggcgacttccaagaattccctaatctcattgaccctatttactaatctctaaagggaaataattcctactttctggtagaatcctgagactcttccctcccaggctgctactcacctggtgggagttcacaagaactgaagtgaaggttggagccctgtctgtccggacagagagcagagagggaccctgacggctgcttccacctgacacactcccatggctgcccaccagggtgcagctccctcctgggcccccatcttctacccttgggtgctgtctgcccagtccctcctgacacaccccagggaggagcttcactggcaaagaatttccttcccaagtctaggctggggactggtggagccggttctggttcccccagctgccctccaaagccagctcccagcgcaaccgttttttccctgacccccagactgtactgtgcccagccctacctcccgccccacaatgtccctgaaggataaagctccctttccttcccagtttccctccatcctaggcagcttgggagcttgcggacttggggagggggtgtctcggaaccttcccgcagccgggacccctaatgggcccagaattgagaggcgagagggaggattgagaggtacggggtggcgggctccccgcacccccgcttcgcgccccatcccagcgcactggcaggctcaagccccagccctgccgcagggggtcgccaggagcgcttggcgcccctgagggtcccgcccagcctcgccccgccccgtccagcacttacctgcagcggcctggccaacgcggtggcctgaccccgcgtccccggggcccacagcagaggcgagggcgccggagctgggctcagcagtggtgcacacagacggcgggcacaccccgggcggcgcggaggagggagcaggagggagccggctcctagacccgacgctgccaggcgctcccgggccagcctccggaggggctggtggcccgtctgagcctccgcttcctcaggcgtgaaatgggggcatcggtggccatgggctgggctgtccgaaggctccaatgagatcaggggcgggaagcactctgcaaactgttaagtgccgcggcggcaggtccgactgcaatcaggactcgcccacgctagtttgccgcgagtaccgtgcccgcttccggcccagcccggtccccgcttggcgcgggaccttgaccgtgcgtggggcacccctgggagccccccctcccggtgcgacgggccgtcgacctcggcctccagggaggccggtgggctttggagagctggggtggggggcagaccttgtacccacagcgggaaggggcacagtgagtcctgtgccaggaaagaagttcaggaatgagggcgggttgggggaggtcaccgcctggagtgactcagaggggcagactgcaaccggagctgcctacctgaacaccagggtccctagtttcttgttttccttcctgaatcgtctgttcatattcaactatatagtcttaacctgtggaagtatgctatctacactcttctgcacgttgctttttttcacttagcaaaatacgacatttctcccatcagtcgatatagagctgccttgctctctcattttaaaaacagctgaatagtatatgtactgtaatatattttatcagtcctactctgataaaaattaaggctgtttctagttttttatttcattctattacaaataccattgcagtaaatagcctctgccaaagcaggtgggtctgcggctggggtggggctgggctgtgccctggggataaggacacattgtcttatttactagtgtgtcctgactaggaactaataaaagcctgcagtgccccagcctcttttggaaaaccccagggtttccagcctcccttgggagtccctggatcttagggtggggcccgagtcctgtctccacagagatgatattgctggcactatggtggctccacatggtgtttgcccaggactgtactggtttatgtttgcagtgctggcatcattaacaatgcccccttttactttcaaaaatgccccaaagttaggagcatcaattatggtcaccctcctcctattcattttggtagagaatgagcactgagttgggagcccagcggcatctttgcacccgacactgtcccacatgctttatttcatcatggcagcatccagatgaggaaggtccaatccctcctacttttatgaatgagaaagct

SEQ ID NO: 833 - DNA, 4001 bp, Homo sapiens
tgcaacctctgcttcccaggctcaagggagcctcctacctcagcctcccacgtagctgggaccacaggtgcacaccactatgcccacctaatttttccagccccctctgttttctttatagcacttagtcactatctgaaattaaagaatttgtcctttttttttggtcttattaattatctggctccccctctagaatgtcaacttggtcttgctcactgctttatatttagtgcccagtgcttggcacatagtaggcactcagcgctgaatgggtaaacaaatgaatgctgagttttcagcaaggcagcttggagggaggggacaggagggtgggcaggatcctggtcagggggcagcctggtcagggggattgggggaaagacttccctacactggagagagggagagagcacagttccttctcagcacctggctctcctggctgcgtttcctctgggaatcacagtctgggcaggatggggtgattgggaagacctcattcttggaaaccctcctcttctcccctactctgctccttctaagccctcgtggtgggggaagggagtgggatagcatggaacacggagttccacctggattcaaacctcagcttggccacttagtagctgggcgacttccaagaattccctaatctcattgaccctatttactaatctctaaagggaaataattcctactttctggtagaatcctgagactcttccctcccaggctgctactcacctggtgggagttcacaagaactgaagtgaaggttggagccctgtctgtccggacagagagcagagagggaccctgacggctgcttccacctgacacactcccatggctgcccaccagggtgcagctccctcctgggcccccatcttctacccttgggtgctgtctgcccagtccctcctgacacaccccagggaggagcttcactggcaaagaatttccttcccaagtctaggctggggactggtggagccggttctggttcccccagctgccctccaaagccagctcccagcgcaaccgttttttccctgacccccagactgtactgtgcccagccctacctcccgccccacaatgtccctgaaggataaagctccctttccttcccagtttccctccatcctaggcagcttgggagcttgcggacttggggagggggtgtctcggaaccttcccgcagccgggacccctaatgggcccagaattgagaggcgagagggaggattgagaggtacggggtggcgggctccccgcacccccgcttcgcgccccatcccagcgcactggcaggctcaagccccagccctgccgcagggggtcgccaggagcgcttggcgcccctgagggtcccgcccagcctcgccccgccccgtccagcacttacctgcagcggcctggccaacgcggtggcctgaccccgcgtccccggggcccacagcagaggcgagggcgccggagctgggctcagcagtggtgcacacagacggcgggcacaccccgggcggcgcggaggagggagcaggagggagccggctcctagacccgacgctgccaggcgctcccgggccagcctccggaggggctggtggcccgtctgagcctccgcttcctcaggcgtgaaatgggggcatcggtggccatgggctgggctgtccgaaggctccaatgagatcaggggcgggaagcactctgcaaactgttaagtgccgcggcggcaggtccgactgcaatcaggactcgcccacgctagtttgccgcgagtaccgtgcccgcttccggcccagcccggtccccgcttggcgcgggaccttgaccgtgcgtggggcacccctgggagccccccctcccggtgcgacgggccgtcgacctcggcctccagggaggccggtgggctttggagagctggggtggggggcagaccttgtacccacagcgggaaggggcacagtgagtcctgtgccaggaaagaagttcaggaatgagggcgggttgggggaggtcaccgcctggagtgactcagaggggcagactgcaaccggagctgcctacctgaacaccagggtccctagtttcttgttttccttcctgaatcgtctgttcatattcaactatatagtcttaacctgtggaagtatgctatctacactcttctgcacgttgctttttttcacttagcaaaatacgacatttctcccatcagtcgatatagagctgccttgctctctcattttaaaaacagctgaatagtatatgtactgtaatatattttatcagtcctactctgataaaaattaaggctgtttctagttttttatttcattctattacaaataccattgcagtaaatagcctctgccaaagcaggtgggtctgcggctggggtggggctgggctgtgccctggggataaggacacattgtcttatttactagtgtgtcctgactaggaactaataaaagcctgcagtgccccagcctcttttggaaaaccccagggtttccagcctcccttgggagtccctggatcttagggtggggcccgagtcctgtctccacagagatgatattgctggcactatggtggctccacatggtgtttgcccaggactgtactggtttatgtttgcagtgctggcatcattaacaatgcccccttttactttcaaaaatgccccaaagttaggagcatcaattatggtcaccctcctcctattcattttggtagagaatgagcactgagttgggagcccagcggcatctttgcacccgacactgtcccacatgctttatttcatcatggcagcatccagatgaggaaggtccaatccctcctacttttatgaatgagaaagctgaggcacacaggggtgaggtgacttgctcagggtcacacagataataagcagcagacccagctctggaggcctcagcagtgttgtttccagatacagaaaagccgcagggcagaggctcccttgtactcactggggtcgtggcccttgaaaatctttgctgagattgaggagtgccaggtggctcaggtgcatgtgctatgctctgtgcatgggcagcggggaagtgagcatgagggtgtggggccctggactctgccgcctgctgctctgctccctgtcagagcaagacttgctccccgctacctcccctcctagtcattttttgacacatttgaacaatgttcctgtccctaccatgtcactaaaaacggcttatcagagtctccgtggatctccataatgctaaatccagcaatcacagctctgtccccatgacccttgaccttcagaagcacctgggacaatggggcactccttccttctagaaacactttcttccccgtgcttccttgacaccacaggcctcacatcctggcctctaaggtgggcatgtcccagggcccagtctcttccttcccaggtgagctcacccagtcctggggctctagataccatccactcactgatgattcacacatttccaacaccggacgtgacttctccctgaacaccagactgtaaccggagctgcctacctgaacaccagggtccctagtttcttgttcttactcccaaatcacctgttcatattcaactatatattctttttacatttaacctatggaagtgtgctatgctatctgcactcttttgcactttgctttcttcatttaacaaaatatgagacattccccccatcagtggatatggagctgccttgctctctcattttaaaaacagctgaatagtatatgtactctatttaatcagtcctattctgatgaaaaggctgtttccacttttttatttcattctattacaaataccattgcgtgactatccttggataatcattattgaacacatttgaaaattgtgtctacaggacatattcctacatgtgaaatgtttgctttaaagttgtatgtgtatttaaaattttgatacatattgcccaatc

SEQ ID NO: 834 - DNA, 4001 bp, Homo sapiens
ccaccacgcggggcatgtcataatccttgtagaggcggtggaagatatagaggaagccagcatccacggcggccttgaagatgaggctcagcaagtacgtccaccacagtccgccccgcttcttgctcaggttgtcgtacagggacggggcattgggcccgtgtttcaggtggtgcttgcgctcgcgttcctcgcggtaggccacgtgcatgaccacgagcagtgaggggcacgtgaccaggatgagctgtagggcccagaggcgcacgtgggacacggggaagaactcgtcatagcagacgttggggcagccgggctgcttggtgttgcagacaaagtccttctgctcatcgtcccacacctcctccgctgccaccacgtacaccagcacacgaaagatgaacaccacagacagccagatgcggctcagcactgtggagtacttgttcacgccactcagcaggccctgcagaaatgcccagttcatgctggctgtgtcctgggtgctgcacgtggaaggtctatacctgggtgctacctgcccactcaggccttgggagccttgaggcctgggggaacctggagatgggcacccttaatgctggtgcgattgacaaaatcttttcacaatcaccgtgtcatcatgtcttcactcccaatgacttggtagggtagggattgcccctgtcctcatttcacaaagagtaagtgaaggcccagagatacctgcccaatggtccacagatggaagtagcagagctaatcttgcactttggtcttcaggttccaaaatcagggtctaccttattctacaaggtaatagatacatgtgaagacaatcatcctgcatggatatgccagccaacctctattaccccaagtttcagcccatgtcttctaaagagaccgtaggaaggcttgaattggacgatctgctctcccatcagctgccagggctgggccagggcaggaggggtgggaacgtatccttatcagttgtcagatccatcccacttttactgaacaccaacaagagcctggccccgtgttggggacgttcacatcagccccttggtaaatcccagaacaatctgcatccttactccttgcctctggctccaggaaggttctcagccctggcattccctcccaaactaaacagaggtgctttggaatcacggggacttgatatcatccctgccaacccgtgtactggtgctggggcctgagggctgactgtcttgaccacagtgggttcctctggaattccaaccattccagctttaggaaggactgaggatggattctggcatggtctggaccccccatttactttctctgggggcaccccctcctctgtccatttagtggctgtttgctagccgcatttccattatttcctctcaggcccctctcctgtggactctgacctccacacccccttgtctggagtccccatcaggccccatgtccaaccctcccctcctcctaccctcctccttccccatccccaatccctgactctgctctcagcctcttcagacatcgtgtgcctgggacactttcagagcaagaggcatcgcctgtacccaaatggtctatttacctgtcttatttttttgccaggctgtcagctgctagagggcaggctcttcacctctgtctccctagcacctagcactggcctggcccagtgaacacacaatagatgtttgttaaactgaactgaaacccatttcttcctgataccccctcttccccaatcttctgtcgtcccttaggtcagccaggacattccttctcctccttggcacttccctggggatcctctagggacactgaccctctggctccctccctgaagcccagcccacagcctgaggtcccttggatatcctcagctcagctggttgcttgcttcctggccagcctcctgccctattcggtcctcacccttcttgggtccagtagctgcttccttgtccttgggcttgtctgtttgcctcaggacctcccggaggcagcttttgttcctctctcccttgctgggtggggctttctgggccaatgagccaagcgagagtgattgggtgggcaggcaggagggcggacttccccgggcacatactcagagcaaacacctgcggctcttctctcctggcccacgcctcctctctagcctggctgggtatggctgagcctggctcccaggcaggcaggtatgtgggtgagactgctgtgtggggttcaggagcctgatatcattatgcctaggcctaggacagcaccagtgggattgaccctgtccccttcccattgcctccttaccctgcctccttgccctctctcctgcccttttcctgggaagcctgatactgaggtctcagcagctgacatctacggaaaggggcaaccttaatttagtgcaggaacgcatcccattctggtggtgggatatttctgggactggagtctggaagctcttggattgtgtaggaaatgggaggggtcaactatgacttttctagaccagggcacccatagccttggtggaggcaaggaatgcaggtcagcagcatgaaatgccccagttagcacagggccaggcacagcatcgctgtccatcctctgtgggtcctggggaaggcctccagggaggctggagtgtgacctcacatatgctggtggggggcctgggacctgtgttctggctgggatgatgaaggttaatgtgcagctagggaggggccttctgcctcgtttctcacaggcattatcaagcacttcctaataccaatgattaacatttatgtgtccttttacagctggctagccctgtccacagccatgagctcatcagtcctcagcacaaccccacaggctaggtattattaacccattttggagagaagcttaagttactttcccagagtcccggtggaacttggattcgacacaggcattctaagttcatgaacttcccactgcaacatggactaagctccattctctctgcagacaacccacaggactaaacttgccatgggggataaaggctagatgggagcatgagcaagtagcacgtcccctggagtactgggggccccctttctggaagagaggatgcccctcacaggctggatcaagtgcagctcttcacgggggcagagagattgacaccatgaacgtgtgagggtcacgaaggccgcacaaccagagggcacctggaaccagcaaatgagttgacttttattaagttctgacagtgggccacacacgatgaaggtgcccgcatgtgtgttcttctatgaacgccctcctccctccaaccctgggcattggccctcactatttccattctagaaaaggaaaccgagctgcagagcagagggggaactggcccagtgccgtcgagctggggcaggtggctggagttgaggactaggaactggctcccagagcgtctgaatcctctctcttgcctgcccctacctcatggcttagctcccccactctcaggttgcacctatgagagatgctagagcctccccatccaggcccaacctgccagaccagtccaggcagcccctcacaagatggttttcttcacatggtctcgggggcggtctggtaagagaggaggatgactgtctgagcccagaaagatgaggtcacccgaaaggaggtcgtcttgtttgcaggaagaggtggtaccgtgggggtgatgacctgtgcacatggcttgagctttccttgctgccaggcactcgtggcatctcttgctcaccaggtagatgagctccacgaggttgagcaggatgcagatggcagctgtggccaccatgaagagggtgaaaatgttcttctctgagggcttggagatgaagcagtccactatattgggacatggatctgcgtggcacttgaccacaggagggaggatatatttggggtagaatgagtggaacacatagagaaaggcgatgtccacgctcgccttg

SEQ ID NO: 835 - DNA, 4001 bp, Homo sapiens
gcaggtccagggagccactcattcctccccgggcctgaggctctggtcttgaggttctgcagagtgaagactggtggagctgggacattctgcctgctccctctgtttcaaccctggccctcctcctcaggggggctgagccttgagatggttctctcctttctgagcactgctgcctcttctcagacagccccttccccaggggaacctgctctttgtccttttcttggctcagggatgggactggaaaggaggctggaaccttgtccccaagcccccatctggtctaacactctgtaattagccaggcagagtcctgctcaagtgccactcaatgcaatccagctgaaagctaaagcaggcagcaataaattctcttcatacagtaggtttcctagagtaacctggtattccagtgtttcccaaacagtgttccctggaaccctgtcccataggttggcaataggagaagtgagagaagaggattctgtgtcaagaaaagttggcaaacattgggtttagtaaagttaaatagggttcttttgctcaaccgtgctaataaactcactaataaattcaccaaaagaggtatgaaatatgtggcattgcccaaactcatttgcccacagaagcccttttcctcctgacataacatttatcatcttgtggaacagccttgtcaagacatcaagtgggaaatgctgctcctgtcagttctgctggtgaatttggcctgatgaactcacagaatcagattcacctccgcgtaaggactgtgactgctaggcagagtaaggggtccccacttcctcacccgcgagtcctctgcctgattcctggagatgggggtgtgtccattaagacccatgcactgtggtttcaaccaactgtgcaccctgggaccccaaggaacctgtctgcctagccactaaagggctcatgatggccttcccatgctggtccaggctgaagctcaccaggctctctggagcctctgcatgatcaactgcaaagcagagtagtgataacagccaatatccatgaagcattcatgccgtgccaggcaccgctctaagttctttgtatgaatcagtacattattccttcacagcaaccttaggaaagggcatattttttattcccaatttacagatgaggaaagaggaacacagagggattaattaacttgctcaacgtcacacagctaataagtggcagagctaggatttgaacccaggcaggctggctctagagcccaccctccgggaactgcccagccttaggcctcagaccctttcctcaagtttcaatgagctgcctgcctgtttgtgtgcagacggattctgtccttccccttgtgtgtggatcctggatgagggtggctgggggaacctttgcccaccaccctgtctccacaccacctgcgccacttggacgggggatgggtggaggtgggggccggggttggggggagctctgttttgaatcaccatcttgcatgctcagtcctgtctaaggtaggactcctgcagcttctcagggaacacccaggaaggccccgcccttagccccaggggctctcacccagcccatccctacttggggaggagtggggcagggctttgcaggcccaggcagagctaccctgcctgctgagcttccggcctggcccctgctcctacctttgcccggctggggagacctgaaagaacccagagccccttattcctccaccatcaggacccagggtggcagatgtgtccaggccacatcccaccactccccagcagagaagtgtcctcctgccacgtatgccaaggggcagggcacatgcggacacagatgcccttacctgagtgactactcctcagggctctcctggctcccagcagccggcaataggactcagcaagcagcttgaatttcatatccagaagcggggaaggttttcggggaagcccgttgaagcctgtttccaggacagagcctgccgggtgtgctggcccagcctgggaggaggaggagctgggacctgcactgccattggctgggccccagcctccccagactgcttctgatgaggctcaggaaactgaggggttcactcctcccagggcgctgagcctcgaatcctggtatcctctcaggggagagccacaggtccactctgactccttgttcatcctcccatctgtgggcttgtgtgggagaagctgaggcctgaatcccagctctgccactttctcactgtgtgatttcttgccttctctgtgaaagtgggaaaagaacaacacctacctcatagggtggatacgtggattaacccagccttaggggtgaagtgcttagaacagtgcctgacacaagggaagccctgtctacaattgcctataatgcgtgtatactgcccagcacaggcctgccgcatggtatgtcctcaaaaaaatgtttcttcctcctccttttccttattcctaggccttttctttctgagatacagggaaggcagaggagaagggagggagagagagacgtatgcactagagaaaatctcatttggatgcatgttgtctttgggttaaaaaggccaaacccaagccaggcaggaaccacaggagaggtggagaaggtgggcaggggcacctggggaaagcttctcattagtgcacagacacggtcttttggcctaattgacttccaaggtgccctgtatcagcaggtcacttggggtcaggattcaacagacaaagcatccaggagccacaaacacctcatgtccacaagcaaacacaatgtagcttcacatgagcatactcttacacacaggccacaattatgggcacagtgttgcacacacatgcagcagtggctttattttattcactgctctatcccttgtgcctagtatggtgcctggtgtcttgtccagttaggcttcaatttatatttattgaatgaatgatgtgtgaaatgcacacaccctgcagagagtcacacatttctatactccatgctctttccaaaaagctgttgccaagtacaggagagaggaggcatataaagagatcagttacaacattgtgagaagtcctagaaaagacacagagagagaagggagttttaagttctgccagagggagagccggagaaggtaacatttaagctgggtcttgaaggatgtataggagtttaccaagaagagatgctgaggaggggcctttgaggcagtgggcacatagcgtgcagaggacctttgtgaaaaataatggaagagcattggagagtgggctgggtagtggtggggacaccacatggcaaggagcctggaaggtcagcaaagaccttccagaccatgaaggacctggaatgtcatgctaaggagtttgaatttatcttgggtgcagagggaggcatgagggaattcttttcttttttctatttttacattttgtattgtgctgaggcaggaaaaaggaagagacatggtcagattggtacatttgattctcattattcaaggtagttatagtctatgagtcaccatgagcaccaagttagtgaatattgaagcattcttcctagaggacatatgaggttaggttcctgcaagcttctgtttacaatgtggttatcaactgatcaatacagaagtctgttttatgtgtgtttctgaagacaccttgtttaatatatattgttgactcattaatattggactcatagccaacaccactataactcatgactgaatgaagcttgtctaacacacatattttttccataaggctcatcgtagccttcgtgtgcttagaaacactagatggcacttcagcactgtactcggggccatttcaaacagcaaatccccagcaaaaagcaagaaatgagaaaaacatggcaccaagtagacctccaatagaacatgtttatagcattagagctgaaaggggaaggcagaatgtcaccttgttcagccacagctgggaacacgtgcattggga

SEQ ID NO: 836 - DNA, 4001 bp, Homo sapiens
tggccggcctcactgtcctgcctgtgcagcagtaggccccactgggtgtgggcaccagccatcctcatgcatccttcacatgtacacacagggcacgctcctccctccacccccccacacacaagcagtgcacactgccacatgcacactgctgctcgagctcaacatggagctgggctcacacactcactctcacacatagccatgaaccctccctattcagactcaacctcaccacgtgcctccctcaggagtccccaccaggcccaggaaagcaaggtgcccccaccaagaccccaagtgcctgcccacatggtggctccccttacatggcctgccacagctcctgaactgaccagacccccaggagcccaagagcatgggtgtggcgctcaggaatgtcaggggagtgaggggacactgaggagcgtggtgtggaggtatgagtctgtgggatccccaggccttgccagggccgtgcacacgtgcaggtggcaaggcagcatccaggctggtgcctcctcccccgtggagccctctcctccctggggttgttggcgctgtgaatgcgtgggcccctcctgcagcctgttcttgagttccctccctcagggtcccaagcaggaacagagctgtcaggcccagaagtgaggggctgttcctcctctggaggtggaccaagggggcgagttaggcctgggtcaggctgggagtgtgtcatcgctgaagcctgggcagctccccaggccagcctccagggctgttgcaggcctggagctgagccacacaccctccagaaaccgagccctggcgggtatccatactgggagtgagggggtgatgattaccccagcctcctaaggctgtccctgccctccacccgcaggatccacgaacccgtctcttccctcctgaacgcccagcagccaggaatcctgggctcactgccatccagctctgggatgggggcccccgcgcctgggctgtggcctccctgcgcagcagccctggggtgctccgccctcccagaggggtgtgggcctccccctcctcagccacgccgccccttccttgcactgagggcctgccccagcaccccgggggggcctccacccagttaatcacagcactgacaggcactggggttggatccttgaccacagggtctgctgggcttcagacctaggctgggccccagtgcaaacttagtggcttgtggccttctatggaggggactgagcagggccccaggtctgtctataccaggggcaggctggccccctcacctccaggtggccgctgagggtgggggactgggcctggacacaatgcagctggctggtgtttcagaggccagccctatcactacctgaggggccccagctgctgggggaggtactgaaggcacccccctcccgcttgccagctgtcccagagcagaccccaccggttggtgcccaccctgcggtgaaggcagctgggcctgaaggacacagacatggagtgggggggccaccccaccatctgcgtggagcagcggagcccaggagggggtggcaggcgcaaggagtgcaccctcctatggctgggccctaggaagccctccctccttcggggcctcaaggccaaggggcacagcgtgaggctgtctcctggggcaacagcccccagccccatgaggtacatacatggaccccagcaccctaccttctccaggccagaaaattccagtctccctcagagcccttccacctgcttggatgctggtcctccccgagggtgtgtggccgagccagggccacctctcaccaccaagcacaatgggggctggaggaggggccctcaagggccccattgttcccccctcggcctcagggtctgaatccctgattgtcctggggggcagggcagcgggcagggctctccaagcccaagcaggtcagaggccagccccagcctccgaagctcagtccacctgccctggagcaagcgaccgggggctgcctgggccctcccctcccctcccctgcccagccgcccagtccaggcggctctggcctgtatcctccggcagtctgggctctgggcggggactcttctccccgcccccatttccggccgggcaccctgcctgcctccttctctcccacccatctgtctacaccccaccccagaggcacctcacctaggctcagaacagggctggggctgaccctaggggtggctggcagcacggccctgtgctgccttagacaggcaagctgggggagcactggggaaggagggaggcagcctgagcagaggaggctcctcacacaccacacacagcccctggggcagctaggggaggggcatctccctcagggaaccccttagacctcgagatctagaacctccagctgccagagctcaggggcctctcctggaacctctggcccatgccagacccacagggtcgggcaccaagaggcagccctcagggcccacccctgcagcctcaggctgccccatgcagccgcttcctgctccccacttgccagcctgccaggtgggttgggaccagccctgccaccttccctgcctgccagtcaagcatcatgctgccctggggcagcagccacgagccggcaggcagcagatgcctaggcagaggccatcttgtggccctccttggggctggtggttagggtgggctgccggagctcagggcccgatcgggatgatggggccccaccaaccttggggccacattccactcatttatggagtttctaatccaacagttattttattaggatgtcagccctgggtccagagtgagagatagggacaggggacagcccagcgaggctgggtcgggggtcaccccaggatgttccaaccacaggggcagcatctcctccactccacatgctggccaagggcacagagctgccgtatcgcctgccaagggggtggctcaatgctgctgccctggtcctgtatgggcccggggtgccgagaacagacagcaagcctcaggcgccggtcctttgagctttcttgatttcctgccagtgaggaagaaagggagttgggagggctggtatccaggaagggctgggcttcctgctctccctccaccgtggacctcggtgtctcatgccagtgcttgggtaggactgtcccatctaacctcagtggcctcatggacaacaaaggcctggcccccaggcctccccttgggccttgcccaggtaggcacaaggatgggcccacctcagagagcgcctccttcagctctgcgtaggcctggtccaggctgtcgttaatgatgaccacatcaaacaggccgggctccttgcctgtgggtggggcctggggtcagggcacagtgagcccatgcagccccaccccaggtcccacacgacccccagagcagcccactggcctgcggctgtcctcactgcggctgtgggacagctttccagcccagccgggcctgtgcagggtagggaagggccgccccctgggcctcagtcctcaggcaccactcctgctctctctggagccccagaacttgggtctggacaccagcacccatcaggactctggttaggggctacactatcctctacacacacagcagaacattaaatgccctcttcttgtgggctgcagtcagacccagagaagaggcaacagctgtaagaggatgcacatgacacccccggggctagaaggttggggacatctcatgggaccctgggcgatggggggtctgggggccctcacggagactctgggtaacagagggaaatctgaggaccctcaatgagacccttggtgactgggggtgggttctggggaccctcacggggactctaggtgttgggaggtagttgagaggtctgaggaccctcacagggactccaggtgtcaggaggtctggggacccacagggtccctggtgccacagacctcagaaccctgactcccctcctggcattccctggtgatcc

SEQ ID NO: 837 - DNA, 4001 bp, Homo sapiens
aaggaataatcctttggagtttaagggggaaaaagggcaaaagaagaaaacatgctttaagtgactttcaactctgagaccactgggttagggttgtattctctccacccctacccagcccagccttcggctttctttcagtttcttataaatatggctttgggagaccaaagtagccacaaaactacttttccccctcttttctgctttccttactcagtaactcagctgtcagtccctggactttgcttccaatgctgaaagcttttttttttttttcattgtaaactattaatttgggcagtggctgctgataaacaagaagtccgtttttaaactgctagaatcattagcacagtgaaggcgagcagcacaaatatttcaggagtttggtcttttttcctggccctggtattacagctgtgctttttgcataatgcagtccaagttttcaaagcccactgcaaactttgtttcatttcttctcccccttgaactgaatgtctttgtttctttaaatataaaaataaactaccccccaccaaaagaaaccacacaattctctaggtccaaaataattgcaacggaaatctatattaaaaaaaaaaaaataacaaaccacacattataatttaactttgaatataaccgtatatgtaaggtgaggttgctgaaatactaccacatcgtgttgaaaacagaattcttttccaagacaattgagagaaggaagggaaattatcctcagcgatagtcactggtcgacttcccaataaagtttatttgtttgttattttttcccctaatcctatccaaaacagattgaaaaccctgtcccaaactttagtttctcccctcttccaggatactggccaaactccacaaagtaaaaccgaagaaaatgatgataattatgcaacattcagaacaaagaacataagaatatatttttttaagtgattcattgtgcacttatgcctgtaatgggattttaacgcactgtaaaaataagtgtgctggctcactaagcttctcacgcaaatgaaacgcagggagatgagtaactctgagatgaggttcattttgttttttgttttttgtttttcagaaaaagaaggatgaagaaaaatcatagcatataaagaaatttacatttttaaatcacagatggagcaacatagactatcgatgtgattccacagctctgaagctctgcagacctcagtccagctaagcacgctacaggtaaactactcagaaacaactaagcctaaattaaattacgatctcacgtgatggtccccttgccattttgcccacagagtcctagcttctagaaagcttgagaggcaggaagggaagaggaattctagccgcccgagattcttagggaatctttgggaattatatttccgctacatgtctataaaagatttgtcggatacataactcttatgactgtagacgcaacatgttcctatctcattttttacccacacacatacttgtttctctttgtctcactgagcctgacatttggccagcaggtttttctcccccttatttgaaacttcatgcactgaaaaaatttggatctgattatttccggatcgcaggaccagcactttaaaatggatgaaatgcaagcaaattgcccaccggagccggaggggagaaatgctttaaaagtcactcatacctttctatgagggatgcgctagccttccaaggcctccccagaacatcacaggagcttcttattcagatgaagaaattcaaccaggtggtaccaccaaaacatcatgacttactgtccaccgcccccactccgagtccatgcgcacaatctacaattccttttttttttttttcaagttacaagactgactgctttttggcatttacagccatgatggctgtttttataacggcggggttcacatttgtcgtgatcaacctcttttttattgcaaggatgcatccagtctcagtacacagtgaaagggcccagtgagtcactgtaaattaaatagtgacctcattatctggtttggtgtgggaacagcaactctggacaaatggaatcatgtggtaaactataaagttttctaactatggcatagatactagttaccaattcccaaagatgtgagacagtagaaataccaaaagcaaaagacatttttaaattctctgggaacgttcagaaggccttcgtgtgaatgccagctctcggccgccaacacacacatgtagaaggtacaagttgtggaaccagaatcaaatatttgcagctggaagcctggaaactgccacctactgtctgcagctttgagcaaatccctgaaccttaatgtctgcatctataaaatgggaatcacattaataacagccagtatctgcccagcactttacagacttctacatctgctccctcacaagagcccccaaggcaggcagagcccagctggcgtgagggcagacaagaggatgtgtgggaacacgctctgaacactgtaaagcaccgtgcacagagaacaagcgtcatcaggccatcaccacaaagctgtccgcctgcataaagcccagatgtttaccttctttccttgtcaggacttataaaagcagagtgtcgggtgtttaataataggaaagaaaaatgcagcatctggcaatttggcttttccagctgtttggaatctggataaacgggactctgccataaacagatcatgattcttattgtaaatgatgacaatgttagtccatgacatcacaccatcccagtgcctcccgattccagatcaaatacacaggccccagacatttatggataaactactaggttcaagaacccactctcttcctctgcttagggactgtctgaggcaggcggcagagcatctgaaacctgaccccaggctgagccatactgtcttctctccggtcactgggcagctgtggccacaaaagacctgaagcttggcacctctcagcctcccctggctagcacaccacagttagcacccttcacattcagcattttaaaaatgtaaccttgcttccttctcactctgtcccctttatctcaagtgtcactgacccttgcatgggccctgcacgaattaataaaagtgcctccttctacctttttagcttataaggcattcttacaactcttgttttatttaccctgcaaggtaggcaccattacctctcacgcaaatgaaaacccagaggttgagaatgtgaaacaggttacagtagtaatcctaaaaataaccaggcactgaggtggcccttgcacattctttatcactaatgatctcatcagtcttgcgaattaagtctcagggtaaatttacaaacgaaggaaccaaaggctcagaagagtaaaatcgattcccccaagtgccacagatcatagatggtggggtctcacaattcccagcacagtcaatacatatttttcaattggtatttctgtctgtttccaataagcctgagaacttggagctagacaccaaatattcaaagggttacatggtctgggactatttcggtgggagtaggggcagtaagaaggtgccgtttcctcgcagcatttttaaggacgctgaagaactgggggaaagctgggtttgtctcgggccacttggtgactgcactgtgaggaaaagcttgcctatagcaacacagaggccagcagggaaacctctccaagcccaggaccctgagccttccctttctccctaggccaggttaggccagagctgtggcttccctaaccactgccctacacataccaaacactttcccaccttcaggcctcagtttcctcacccttcaaatgagtgggatacatcccaccacaacagcctcactgggaggctatgaagaaaagttgtgaaacctcttggaaaaaagcttcaccagagagaccagcttaaggtacaaagaaagaggctcttcctcccatccctttattctcctctgccctt

SEQ ID NO: 838 - DNA, 4001 bp, Homo sapiens
acttcaactatagcaattatttattttgcctcattattgttagttgtttacatgtttatgtttgaccagatggtaaaaaccttcaagtatatgactgtttcttttcttttttttttttttttttctgagacagggtcttactctgttgcccaggctggtctcaaactcctgggctcaagtgatctgcctgccttggcctcccataacgctgtgattacgaacgtgagccactgcgcctggcctaaatatttctaattctttttttgttttcagttccctactgtgaaaatttaagtagattcttaaatgtttgatggataaatgactggatgaatagcatcatgtgattattctcttcccaagactgaaaagtaaacaccaagattgtacgcaccttattcttttcattttgaataatttctaatagctggtctgtgtgcccttcttctatgcatctttgcccagctaactgaaataggccaaaatcctcttctttaaagtcttgctcttctaggatttgctggcaaaaaaaaaaaaaacccaaaaaacaaacaaaaaaaagtatatgcaaataaaaattaaatacaataacttcttgatttatctatgaaaaaaggaaatctgtttaaattctagataaatgtaacgtaaataacacacgtatcaaaattaggattaccctaataaatactttaataagtgaccttgaaatctactgtaccagtgaaatctatgaaaaggatcaggattaaaatgtaaaaggttatttagataagtatgtcacctggagaaataatccaatctgcctcccccactcatgctctttacaggtcaaaaaaagcaaggattaaagaagataaacaatttgagtgaccacaaatataattaaaaacaatctgtgcccttcccatattttgaaaggtatttaattttacaaaaattaatacttacacatctctttattatagactgaagttcctctacagccattcttatttctcctagtttcgatgctaaaatctacaaatacaaaacacactgttaactatccgtgatattacacttaagtattcaaaagttatgtttcagtgtgataaattattagtaaatacaataaagaaaatggaaagtttttgttgttgtgttttttggtccaatagcatgctaggagaaaatgtaaagttttaaagttgaaatgttattactgaatcttagtatgtttgcctaagaaaataaagtgtttttttagaagcccttattgcatgttttaagttttctaggagcatagttttgaaagctactttgaaggaaaaaaaaacaaaaaaaacctctcgagcactcccaagaggcgaggcatatacgaactaaagggcttttaaaaagcaaagcacttcttttctgaaaaaaaatttccaaaaggtggacctgaaatcaaaattctaatcatcaggggatttttcatttttaatgtctcacctcacaaaaattggggtgcaacacaagcttatctatagggggtgaagattcagatgccctccattccatttctctctaggagttgcagtccccaaagtgatcaatccagctagtgaaatcactgtatcacacggagacaagacaacggcggccttcaggaggagaccatcgcttctcctggcggcaaggctcggccccaagccctcagtaggggcgcgagtcagcccggtcctcagggcagcgcgctggaaggcgagtgaacaccccagcgcgcgtgcgggctgcatcagaggaagccatgtcttccgattcctgctcgcctaggtgggcaggctccaccacctcgcgtggcctagtcggcccgcagcaccaagtccgccgcggctcacggccaaccgcgagccctggccaccctgaacctctccacaactccacttaccggccagaaccctcgcctctcccagccgccgccacctcctccggcgtcttagcccgctcttctggccccgccccgcgctacgcgtagggaggcggggcctcggggcgagacgccggagcgtgtccccgtccggcagactactctcccccatggcggacttcgctgggccgtcttctgccggccgcaaggccggggctccccgctgctctcgaaaagccgcaggtaggagcaaggatctcttcccacttttggaccctgaaagctgggccccgatctcgagttatagaccgcagcgcgcgggcgctcctgaaaggctgcttcaggggaggggttctcccaggtagagtaggccgaaagcttcccaccgccgtccgcacctcctgggaaagatttcctggccgcccctcacccctttacgccagtgttccaagatttccctcacgcggactgtggccccagcctctgagacaaaggacagtggaggccccgggaacccaggcctggggtccccgggtttcggggcaagtgactagggcagcgttggcagctggccttgaacctaggaccggtcctcctttccagattgcttgggtgcccagttctttaaggtgccggactcccctcttcccccagagaggacgtttggcagacggagagaggtttcccctaaaagtacccagatctcagattttcaggagtggttaattaagcaactatgatacagaagaaaattcaatccccaaagagatacattttaaccaagaaaaattagacagtaatcaatttgcaaaaacaaattgctctcccttcctatttcattttgatttacacacgattggacataaaatatgtggaaaagaagaaaaggtggtctacagtttgttatttgtgtaggaatctatcttgtacctaatgtgtttgtgtagacctgacctactgccaccatgtgtagcttaactgcggggatgcattttgagaaataagttgttagtcgatttcatccttgtgtgaccatcatcgagtgcacttacacaaacctagatggtacagcctacttacacactaggctatatggtacagcctattgctcccaggctacaaacctgcacagcatgttactgtactaagtactgtaggcaactgtatatctaaacatagaaaaggtacagtaaaaatacagtattttaatcttatgagaccgctgtctgtatgctgtccgtcgtttacggaaatgtcattatgtagcacatgactgtatttttattgtaggtactaaacagacaagtactttgaaacaagaagatgcttctaaaaggtatgacagctacatggacaactacattggcatatctacttatcttgtattacttgtaccaattttaaaacaataatggttacctttttttttttagagaaaattatcatgagagggaagggaaagatctgggaaggcctataaattctcacatagactgttacattcctctactccaggctttaagaaaaccaaactaagcactcagactgctagtgaaggaatgagtgtctgtagaaggtgtttgtttttcaccgcttcaggtacactctccttttattgctttatatgccagagactcactctccaagtttcgctgtcactccaagaaaccttttctgttctttgttacatcaagtccagattttcattaaaaagctgtcttgtactagttctggttctaaaaaggcaagatattaccacatatcacacagagtttctagaagaggagtagaatgtgaaggggattaaaagcatatgtagctatgatttttattttgtgaagactcactaatcttatattggctttggtcttaatttactcattctttcaaaaattatttattgagtataagatatgtcggacctgtgttaggctctgaagatatggtgaacagaatagacacagttcttgcctagtggaacagaggaataaataataataaattaattagttaattaacataaacaaatacataattacaaattgtgataagcactatgaaggaaaagactgtgatgttacgagaaggaataacgaagtctaattta

SEQ ID NO: 839 - DNA, 4001 bp, Homo sapiens
cttaaactgtcatacccaaaccatctactacagcatttactactgaaggagctccaatagaacacaagagaatgttttcttgggtagtgagaggaggtaggaggtgcattctgaaatattacccaaataaaagtttctggaagacaccctttcccttcaatttctagttgaccttggtaaaaactgtcgcgaactatgaatagaaacatgcacggaggaagtaagtgcacaataaacatttcatttcaacacagatgaagcacctagtcatgccacatttatggagcgcctactgtgtgctaagtaggcaaagtgctatattgaccccagggatacgcagaaaaaaacacggcggggcctcaaagagctgtcaaacacttaacagcctgtgattagcccttcaggaggggtctctagcttggtctggaaagttaaacttgagattcctagaatcttgcaaaactgatagaagctcccagatcaagtagatagcgagacagactctccggccaagtgcgcagtggcaggcgcggaagtgcgagccggcaggaccgccaggcaccagccgcgcgggcgtgggcagcacagccgcagttcccttccactgcaggtcccgaagccgctgatattccaaacgaggaagtgtaaggaaagcactatcctcggtctagccgcaggcggcatcaccatcagtcagcctctatcctaaaagctctggccattcagcgggaatcatcgccttcacttcctgcagtagggtggctaagtttagcaaacaagaatgcaggacgcccggtcaaattagaattgtaaccaaacaccagaaaactgttccgtttttcctatgtccactgcagtatttgggacacacttggactaagaatcattcgctctttcagagaaattccaattgattgcggcgtcttgtattttatgtagcaattcacagagggatggcctaagtgaacatgagtgaagtattttcaacgcgagagtcacaggctcctgaagtcagcacagccgcggagggcacccttccctgcccatccctcgagcgcctctgcgtgttatgactcagagcccacgcgctagtacgcctcgcccacccggcgccggggcaaaggggcacctccgcccaccgctttctccagacccccgcaaggcctgcgcaccacgccgcggcactcctgcccgctgaccccgtacccagaggccgcagctgccgcagctcccgcagctcccgccgccctgtcaagccagcctgccgagccgctcctgctccaaaccagccgcgtccccgccagcgccgcgcggcgccaaatcatggtcagagcccggatctgcagcgagctctactgccggacaccgcggatcccgggagcccgcctcctccggcccggcccccgccttgccccgccccgtcccgcccctccggactgcccgcgccgccgccggtcacctcctcgcagctgagcgcgtcctcccagggctgcccgagcgctggattccagcgagtgccacccacgtgtaaacatcctttagaggggagaagcggctcacttgcttatctcgagggttcatccgagccccgcctctggattcttttaggtttagggacgctcataaaggctcccaggcacttggaagcagtgcatgaggatggtggcagacatgctggggaaacggaggagaaaaaacatgaccatccaaaacagaatcaaagtggtgcctcagatgtttccaactacctgttacacaagtttttgtgtggatgaaataagagcctaaatatatcctcttataattaggcaattggtcgagacccaatgtaaattatggggatattggggtttacatccataattaaaagaaaaaatccggtgttgaaggtttactccaaagaagacaaagattatttcccaccacctgccaaaaaaaaaaaattaggaaacaaaacaaaagaaattagcacagagatgtttcaccatggctttggaaatgggcgattgctgttgacaggattatttaagccactcagtggtggtaataatagcctttgtgcgtcactatttaaggttgggggtaagcctttatttactgaggacactgaaattcatcttaaagtcaaaggtcaaatggtacatctaaaattctaaacaattattacaacaatccagagcttttttgattcttcatgttcaactaagtgtaaaattcatgttaccaaagtacaaaataagaacttgtatttctgacagttcttttccaacattcaaatgggctatgtttgattacttaataaaaggatggaagttagttgcaaaaataaatacccccaaagggtaggaattcattctttttaaagacaaatttgactttgaaaattaaggcatgtggccaggcgcgatggcctgtcctgtaatgtggccattacaggactgcccgctgaccccgtacccagaggccgcagctgccgcagctcccgcagtggccagtcctgtaatcccagcactttaggaagccgaggcgggcgggtcacctgaggttgggggttcaagaccagcccctccaatattggtgaaacgccgtctctactaaaaatacaaaattagccgggcgtggtggcgcatgcccgtaatcccagctactcgggaggctgaggcaggagaatcgcttgaatccatgaggcagagtttgcagtgagccaagatcacacgattgcactccagcctgggcaacaagagcaaaactccgtctcataaaaaaataaataaataaaataaaataaaaattaaggtatgttatctatctatagtgttgtgggctttttaatttttttataaaactattttggaaatttatggtgttatgttagttttgaagtcaaattttacctcatctcaaattgttttatgaaataaagatcattatgaggtgaaccgatcatgttacaatttaattttaatacagcatagatggactattatcaagcacagaattcactggacagatttttttaaggatttcagaatgtaaagtacttcagaagaaagtgttatgcctgaattcagcataatatattaataaatatattgataattttcaacttctttgtgcttcgtggggtagctacagaagtgattattatttttggtcatagttgtgatgactgcaatagcaagttaagaaatatgtcagcagacagtagaacggtggttgccagggcctgggagaaggtggaaatggggagatgttggtcaaagggtacagagtttcaattatgcgagataggtaagttctagagagctaaagtacagcaatgtgactatagttaggaaaatcgcaatgtatgcttgaaatttgctaagagggtagatcttgtgttctcacacttgcacacaagaaagaaaatggggccaggtgcggtggctcacgcctgtaatcccagcactttgggaagctgagatgggtggatcaactgaggtcaggagttcaagaccagcctggccaatatgatgaaaccccatctcaactgaaaatacaaaaattagccgagcatggtagcacgcgcctgtaatcccagctactcgggaggctgaggcaggagaatcgcttgaacctgggaggcagaggttgcagtgagttgagattgcgtcactgcactccaacttgagcgacagagtaagactgtctggaaaaaaaaagaaagaaagaaaaagagagaagaaaataaagggaatagaaaaaaatggtaaatatgaaaggtggtggctatgttaattagcttgattgtgatagttattatacagtgtatcaggctttggaatgaatgtttgtcccctctgacacttatgttgaaactgtccaatgtggcagtgctgacaggtggggcctttgagagatgattgggcatgagagctggaacatgaatgaatggattaatgggtgatcatgggagtagaactggcagctttataaaacagagttctctgctgccttgt

SEQ ID NO: 840 - DNA, 4001 bp, Homo sapiens
tagaacacaagagaatgttttcttgggtagtgagaggaggtaggaggtgcattctgaaatattacccaaataaaagtttctggaagacaccctttcccttcaatttctagttgaccttggtaaaaactgtcgcgaactatgaatagaaacatgcacggaggaagtaagtgcacaataaacatttcatttcaacacagatgaagcacctagtcatgccacatttatggagcgcctactgtgtgctaagtaggcaaagtgctatattgaccccagggatacgcagaaaaaaacacggcggggcctcaaagagctgtcaaacacttaacagcctgtgattagcccttcaggaggggtctctagcttggtctggaaagttaaacttgagattcctagaatcttgcaaaactgatagaagctcccagatcaagtagatagcgagacagactctccggccaagtgcgcagtggcaggcgcggaagtgcgagccggcaggaccgccaggcaccagccgcgcgggcgtgggcagcacagccgcagttcccttccactgcaggtcccgaagccgctgatattccaaacgaggaagtgtaaggaaagcactatcctcggtctagccgcaggcggcatcaccatcagtcagcctctatcctaaaagctctggccattcagcgggaatcatcgccttcacttcctgcagtagggtggctaagtttagcaaacaagaatgcaggacgcccggtcaaattagaattgtaaccaaacaccagaaaactgttccgtttttcctatgtccactgcagtatttgggacacacttggactaagaatcattcgctctttcagagaaattccaattgattgcggcgtcttgtattttatgtagcaattcacagagggatggcctaagtgaacatgagtgaagtattttcaacgcgagagtcacaggctcctgaagtcagcacagccgcggagggcacccttccctgcccatccctcgagcgcctctgcgtgttatgactcagagcccacgcgctagtacgcctcgcccacccggcgccggggcaaaggggcacctccgcccaccgctttctccagacccccgcaaggcctgcgcaccacgccgcggcactcctgcccgctgaccccgtacccagaggccgcagctgccgcagctcccgcagctcccgccgccctgtcaagccagcctgccgagccgctcctgctccaaaccagccgcgtccccgccagcgccgcgcggcgccaaatcatggtcagagcccggatctgcagcgagctctactgccggacaccgcggatcccgggagcccgcctcctccggcccggcccccgccttgccccgccccgtcccgcccctccggactgcccgcgccgccgccggtcacctcctcgcagctgagcgcgtcctcccagggctgcccgagcgctggattccagcgagtgccacccacgtgtaaacatcctttagaggggagaagcggctcacttgcttatctcgagggttcatccgagccccgcctctggattcttttaggtttagggacgctcataaaggctcccaggcacttggaagcagtgcatgaggatggtggcagacatgctggggaaacggaggagaaaaaacatgaccatccaaaacagaatcaaagtggtgcctcagatgtttccaactacctgttacacaagtttttgtgtggatgaaataagagcctaaatatatcctcttataattaggcaattggtcgagacccaatgtaaattatggggatattggggtttacatccataattaaaagaaaaaatccggtgttgaaggtttactccaaagaagacaaagattatttcccaccacctgccaaaaaaaaaaaattaggaaacaaaacaaaagaaattagcacagagatgtttcaccatggctttggaaatgggcgattgctgttgacaggattatttaagccactcagtggtggtaataatagcctttgtgcgtcactatttaaggttgggggtaagcctttatttactgaggacactgaaattcatcttaaagtcaaaggtcaaatggtacatctaaaattctaaacaattattacaacaatccagagcttttttgattcttcatgttcaactaagtgtaaaattcatgttaccaaagtacaaaataagaacttgtatttctgacagttcttttccaacattcaaatgggctatgtttgattacttaataaaaggatggaagttagttgcaaaaataaatacccccaaagggtaggaattcattctttttaaagacaaatttgactttgaaaattaaggcatgtggccaggcgcgatggcctgtcctgtaatgtggccattacaggactgcccgctgaccccgtacccagaggccgcagctgccgcagctcccgcagtggccagtcctgtaatcccagcactttaggaagccgaggcgggcgggtcacctgaggttgggggttcaagaccagcccctccaatattggtgaaacgccgtctctactaaaaatacaaaattagccgggcgtggtggcgcatgcccgtaatcccagctactcgggaggctgaggcaggagaatcgcttgaatccatgaggcagagtttgcagtgagccaagatcacacgattgcactccagcctgggcaacaagagcaaaactccgtctcataaaaaaataaataaataaaataaaataaaaattaaggtatgttatctatctatagtgttgtgggctttttaatttttttataaaactattttggaaatttatggtgttatgttagttttgaagtcaaattttacctcatctcaaattgttttatgaaataaagatcattatgaggtgaaccgatcatgttacaatttaattttaatacagcatagatggactattatcaagcacagaattcactggacagatttttttaaggatttcagaatgtaaagtacttcagaagaaagtgttatgcctgaattcagcataatatattaataaatatattgataattttcaacttctttgtgcttcgtggggtagctacagaagtgattattatttttggtcatagttgtgatgactgcaatagcaagttaagaaatatgtcagcagacagtagaacggtggttgccagggcctgggagaaggtggaaatggggagatgttggtcaaagggtacagagtttcaattatgcgagataggtaagttctagagagctaaagtacagcaatgtgactatagttaggaaaatcgcaatgtatgcttgaaatttgctaagagggtagatcttgtgttctcacacttgcacacaagaaagaaaatggggccaggtgcggtggctcacgcctgtaatcccagcactttgggaagctgagatgggtggatcaactgaggtcaggagttcaagaccagcctggccaatatgatgaaaccccatctcaactgaaaatacaaaaattagccgagcatggtagcacgcgcctgtaatcccagctactcgggaggctgaggcaggagaatcgcttgaacctgggaggcagaggttgcagtgagttgagattgcgtcactgcactccaacttgagcgacagagtaagactgtctggaaaaaaaaagaaagaaagaaaaagagagaagaaaataaagggaatagaaaaaaatggtaaatatgaaaggtggtggctatgttaattagcttgattgtgatagttattatacagtgtatcaggctttggaatgaatgtttgtcccctctgacacttatgttgaaactgtccaatgtggcagtgctgacaggtggggcctttgagagatgattgggcatgagagctggaacatgaatgaatggattaatgggtgatcatgggagtagaactggcagctttataaaacagagttctctgctgccttgtcccatgatgtcctacatggcttggggaatctgcagagttcccaccagcaagaaggtc

SEQ ID NO: 841 - DNA, 4001 bp, Homo sapiens
tattattgttgttaatctcttactctgcctaatttataaattaaactttatcataggcaagtatgtataggaaaatagcatgtatagggttcagtactatccgaggttttaggcatccaccgagggtcttggaacgtgtccaccacggataagggggaacgattatgatatcagctcacctagagtgaggaagctacagcaaacatcagtttgttcagttataacaaagaagagtaagagacaggaattaaacattataacattataacctacccaatgtttacaatctattattccttgcttcctaatagtattagcaaggaacactttaaaacaaaaaaaaaagtcctgtgcgcttaactcaggaaggagttaagggtagcgagctagggagactgcagccaacctgagaggagggtgaagctttaagataaaagaaagttgagttcctgaagcctaaaccagaaaaggttaggcagcactggcctagccctaaggaagagcattggtggaataaatcagcaagctgtatttggtttatcaactaagaaagcaagtcctttcatctcaggtccagcacttaaactgtcatacccaaaccatctactacagcatttactactgaaggagctccaatagaacacaagagaatgttttcttgggtagtgagaggaggtaggaggtgcattctgaaatattacccaaataaaagtttctggaagacaccctttcccttcaatttctagttgaccttggtaaaaactgtcgcgaactatgaatagaaacatgcacggaggaagtaagtgcacaataaacatttcatttcaacacagatgaagcacctagtcatgccacatttatggagcgcctactgtgtgctaagtaggcaaagtgctatattgaccccagggatacgcagaaaaaaacacggcggggcctcaaagagctgtcaaacacttaacagcctgtgattagcccttcaggaggggtctctagcttggtctggaaagttaaacttgagattcctagaatcttgcaaaactgatagaagctcccagatcaagtagatagcgagacagactctccggccaagtgcgcagtggcaggcgcggaagtgcgagccggcaggaccgccaggcaccagccgcgcgggcgtgggcagcacagccgcagttcccttccactgcaggtcccgaagccgctgatattccaaacgaggaagtgtaaggaaagcactatcctcggtctagccgcaggcggcatcaccatcagtcagcctctatcctaaaagctctggccattcagcgggaatcatcgccttcacttcctgcagtagggtggctaagtttagcaaacaagaatgcaggacgcccggtcaaattagaattgtaaccaaacaccagaaaactgttccgtttttcctatgtccactgcagtatttgggacacacttggactaagaatcattcgctctttcagagaaattccaattgattgcggcgtcttgtattttatgtagcaattcacagagggatggcctaagtgaacatgagtgaagtattttcaacgcgagagtcacaggctcctgaagtcagcacagccgcggagggcacccttccctgcccatccctcgagcgcctctgcgtgttatgactcagagcccacgcgctagtacgcctcgcccacccggcgccggggcaaaggggcacctccgcccaccgctttctccagacccccgcaaggcctgcgcaccacgccgcggcactcctgcccgctgaccccgtacccagaggccgcagctgccgcagctcccgcagctcccgccgccctgtcaagccagcctgccgagccgctcctgctccaaaccagccgcgtccccgccagcgccgcgcggcgccaaatcatggtcagagcccggatctgcagcgagctctactgccggacaccgcggatcccgggagcccgcctcctccggcccggcccccgccttgccccgccccgtcccgcccctccggactgcccgcgccgccgccggtcacctcctcgcagctgagcgcgtcctcccagggctgcccgagcgctggattccagcgagtgccacccacgtgtaaacatcctttagaggggagaagcggctcacttgcttatctcgagggttcatccgagccccgcctctggattcttttaggtttagggacgctcataaaggctcccaggcacttggaagcagtgcatgaggatggtggcagacatgctggggaaacggaggagaaaaaacatgaccatccaaaacagaatcaaagtggtgcctcagatgtttccaactacctgttacacaagtttttgtgtggatgaaataagagcctaaatatatcctcttataattaggcaattggtcgagacccaatgtaaattatggggatattggggtttacatccataattaaaagaaaaaatccggtgttgaaggtttactccaaagaagacaaagattatttcccaccacctgccaaaaaaaaaaaattaggaaacaaaacaaaagaaattagcacagagatgtttcaccatggctttggaaatgggcgattgctgttgacaggattatttaagccactcagtggtggtaataatagcctttgtgcgtcactatttaaggttgggggtaagcctttatttactgaggacactgaaattcatcttaaagtcaaaggtcaaatggtacatctaaaattctaaacaattattacaacaatccagagcttttttgattcttcatgttcaactaagtgtaaaattcatgttaccaaagtacaaaataagaacttgtatttctgacagttcttttccaacattcaaatgggctatgtttgattacttaataaaaggatggaagttagttgcaaaaataaatacccccaaagggtaggaattcattctttttaaagacaaatttgactttgaaaattaaggcatgtggccaggcgcgatggcctgtcctgtaatgtggccattacaggactgcccgctgaccccgtacccagaggccgcagctgccgcagctcccgcagtggccagtcctgtaatcccagcactttaggaagccgaggcgggcgggtcacctgaggttgggggttcaagaccagcccctccaatattggtgaaacgccgtctctactaaaaatacaaaattagccgggcgtggtggcgcatgcccgtaatcccagctactcgggaggctgaggcaggagaatcgcttgaatccatgaggcagagtttgcagtgagccaagatcacacgattgcactccagcctgggcaacaagagcaaaactccgtctcataaaaaaataaataaataaaataaaataaaaattaaggtatgttatctatctatagtgttgtgggctttttaatttttttataaaactattttggaaatttatggtgttatgttagttttgaagtcaaattttacctcatctcaaattgttttatgaaataaagatcattatgaggtgaaccgatcatgttacaatttaattttaatacagcatagatggactattatcaagcacagaattcactggacagatttttttaaggatttcagaatgtaaagtacttcagaagaaagtgttatgcctgaattcagcataatatattaataaatatattgataattttcaacttctttgtgcttcgtggggtagctacagaagtgattattatttttggtcatagttgtgatgactgcaatagcaagttaagaaatatgtcagcagacagtagaacggtggttgccagggcctgggagaaggtggaaatggggagatgttggtcaaagggtacagagtttcaattatgcgagataggtaagttctagagagctaaagtacagcaatgtgactatagttaggaaaatcgcaatgtatgcttgaaatttgctaagagggtagatcttgtgttctcacacttgcacacaagaaagaaaatggggccaggt

SEQ ID NO: 842 - DNA, 4001 bp, Homo sapiens
agatagagactctgtcggaaaacaaaaaaaaaaaacctacaacccaatttctcggctgtcctctccaacatgttacaccaccaatatcatgcacactttgtcctaagcctcagtttcggatctcttgctcttttccgtgagccgagttgcatgccagcagcctagtgccactctatcaactgctgctgctgcggtgccaagtttacgtgggggaaatggattctgaagttttcagcagtttctgcagctcccaccaactccggggtcgtcctccctgccccctcactcaccccagccacagaaagtcaagcgtatcgttagggttgccctctttaacccttctctttttggagtggcgttcgcgcctctcctctttctcagactctagctggtccaagcaccggagctttctgggagagggcgatggagaaggggacagacagcggccggcccggggggtgtccgaacaggcaggttggtgggttaaggtcttaatcttgactcgagatctctccccggagttcacagagtaggcgacgaagccgaagcagctggagcgcgacccggaggagtctgacttctcgttgtcttcataattttcattcgttgctttcttcgtggacttgcggctgggggaggatccccgcttcccgcccccgagggagttataattatccactttgagagcagccccttcccactgaaatgtccctaaagtgggcgccctgcccctcgggcccccgtccgaatctcagggcctcacggaggtggccataccctgccgccgaggggttggggggtccgggggagggtgggggcgcaggccgtagggactgcgcgctgctgctgcctccgcccggaccggcttctccactgactgcgccgaggcccgggctctccattgttcggtcacattggaaggcccccgggaccccgaggcgggagccggccgcccaaacaacgctcaccgttacacgccgcaatcgaggcgtctcaaccatcgccagaaccaggacgattgctccgaaggccccaccacgaggaaggcagccaggcgcccgcgccaaccaagcgccttgtttgcgctccacaggggaccgcaccgccactccatccacagcgcaaacaaaccactgcgagccccagggcgcaggccggcccaacggcctccaggggcggcgcttcggccgcaagtagtgaaaagaagatcaaaacaactcaccccgcccttcccagagcctggccaagggcgcgccccaccagcgccagccccgacgggtccaagccaccagcggcggaagcacgcgggaggagcactcatgccggatctcaggcatgggccggagaggccgcagcgtagggctgggactggaggggcaggcagccgaaaaaagaggctgggcggcgcgcctcgcggggtagcaggggcggcgcgcctcgcttgcgtgacaccgggccgtccgggggcttacctggtcgccgagcaggcgggcgggtaaagctaggccgcgagagcgaggttaggagaggagaggaggccgcagtactgctcacacgctccgctcttctcccactctcgactctgcagagccgccagcagccccgcaccctttatccgcggcccggggccgcccccggtgccctgattggctcccagcggccaggagcccgggccgatcagctgatgcggtcccgggccccgcggccattgggcgaggagcccggcgggcgccgctggggtgggggcaagcgaactgggaaagaaagaaagaaagagaaaggggcgtgggggaggggcagggcggcgtgggggaagggagcggagccgggagggctgagggcagaggggcgagttgccgccaggccgggaagcctcggctcgccgcccacccgccagctcgccaggtgccgccccacggcccccaacccggggtcccgaggctcccagcaaagcccgccctggacctctgccctgccgccttcacggggaatagttttacgaggagagctccctggggaaatgcggaaccagggaaaccgaatttagccttttgttgcgagggagcctccgagccccgcttcctgcgggcaggggttagcttgagagggagcgcggggcgcgggacccgagggaactttgggcgggcctgggctagggcgggtgccgcgcgggcctggggacaggccggggttcccaaggcctggaagagccgcccgctccggctctcttgggtctggggaaataaacagaactctgccatttcacatttgaaatcaacgtgctgtttctctaattttacagagaggattctggagggcggtagaaactaagtctggagacctgtctcatactgctggccagaccctaggcaggtctttcagggcccaagtttcctcatctgcaaaataaagtggtcatcgaaaatgacctgtggagccgcccactagatttgaaattctgtgtgcaaactgcccccggagcagctgaaaggaaatcgaggtgttcacttgccccctttgaagtccagggattgtcaagaaattcctttaacgaattctccctgattttgctttatcaagtgcggcttcttgttaatctggaaaatgggaatacatacctctcctctcagcttgccgtgatggttgggaaaatgtgtatgtgaacacaatattgaaatgtacctagagacacaacataggtaggtaggtaggtaggtaggtagatactgctatccgtactattactcgatcattctatttttagtgcctgaaatctacctgatggtgtccagattttattgcttctttcagtttaaagagcaagaatttatgcttccagtgcctttggaagaggaagggaagaagtttgttctggttatgttttgtaccgcaaatgtggaaaagaaatgttgcctgcaaccacacacacataacttggcttctttggtcaacatccctttcctttaagagtgtataacactgtagtgcttttacatgacagatgcagcattcatctcaaacagggttttttgggatgtttcagactggtgacattttggattgggtaaggtgccttacaaattccttgttaaatttcagtgctgccccttgaagcattacattgtggtggctaaaggcacggctgcaagtcaggtaaacctaggttcaaatctgggctttcccttcataccagctttgtgttggccaaatcacttagccacatgaagcctgtttctttgtctataataaaagagggataatcatttttacctcataaaaggattaattgtgatagcacatgcagaagagattgagtagtccttggtgcatcgtaaatgtttagaaaacagcaattataattatcataggccaagttctataatctgaggtgattggattctttctttccccatagcgacttttgaatacaacttttctgactcagtgtaatgctttaccattcattatatcaaactggacttaaccttggtaacacagtgagctgtcttcatctctttctgtaaaggtttgagtttaaatggtcgaggaaggggagcaaaggaggagaaaagtgatatttttattttaaaagatgttattaatcatttccagataccaaactaccgaaccataagccagagcctctgctgcacacaccaccagcccctgaggtggggatgacaaacataacagagaacggaatggtaaggcgtgagtgcggttctgcaggcttatggtatttctgccatttgagtgcctgcttcccttcctagatgtcttgacctcattgagcagtttattcattgtcatatcccccagtagtgtccacggtgagtgttcaataaatgatatttgttaaccacacagaagtgacagcagcaccatcaagagaacatgtgctttgagctgcttttccaagaatggaaatggatttgctttgatccattcatgtgaccaggggcacgctttgtaagggttaggaacataatacatgaccactg

SEQ ID NO: 843 - DNA, 4001 bp, Homo sapiens
atttttttagaaggctagcagtttcctacacaaaagctgattcaagccagattctaaggggaatgctgccataatttccataggtctcatgcaaagtctcacttaagatagtgggcaagaatcacaacattatggaattctacaagacttgtcaagtaattaggaaatttccacttctaaatcaaaaagatctggaaatttaaaagccatgaggcatactaataactgccagccactaccacaaaacctccgaaagaagagaaactctcaagccacaacagccgaagaggaaacattctctctctccctcctccctccgtggaccagggtggctagaaagggaacacattgttctcctccaacgactagggcaacgttctgaagtacagtggcaaagtttctacgggcaaccgtccatgtttgcccagctgaaaacataactgcttctccctcagcctcaccacccttccccttggggaagaccaacaccccaatattgcctctagaagactcagccggccaaatcctacttcccacctccatcccagaaccctttagctcccgctaaaagctacaacccaccgaagcgggcagatcacctgaggtacaaagttcgagaccagcctggccaacacgatgaaactcccgtctctactaaaaatacaaaaattagccgggcgtggttgtgcacgcctgtaatcccagctactcgggaggctgacacaggagaatcgcctgaaccccagaggcagaggttgcagtgagccgggagattgcaccactgcactccaacctgggtaacagatagagactctgtcggaaaacaaaaaaaaaaaacctacaacccaatttctcggctgtcctctccaacatgttacaccaccaatatcatgcacactttgtcctaagcctcagtttcggatctcttgctcttttccgtgagccgagttgcatgccagcagcctagtgccactctatcaactgctgctgctgcggtgccaagtttacgtgggggaaatggattctgaagttttcagcagtttctgcagctcccaccaactccggggtcgtcctccctgccccctcactcaccccagccacagaaagtcaagcgtatcgttagggttgccctctttaacccttctctttttggagtggcgttcgcgcctctcctctttctcagactctagctggtccaagcaccggagctttctgggagagggcgatggagaaggggacagacagcggccggcccggggggtgtccgaacaggcaggttggtgggttaaggtcttaatcttgactcgagatctctccccggagttcacagagtaggcgacgaagccgaagcagctggagcgcgacccggaggagtctgacttctcgttgtcttcataattttcattcgttgctttcttcgtggacttgcggctgggggaggatccccgcttcccgcccccgagggagttataattatccactttgagagcagccccttcccactgaaatgtccctaaagtgggcgccctgcccctcgggcccccgtccgaatctcagggcctcacggaggtggccataccctgccgccgaggggttggggggtccgggggagggtgggggcgcaggccgtagggactgcgcgctgctgctgcctccgcccggaccggcttctccactgactgcgccgaggcccgggctctccattgttcggtcacattggaaggcccccgggaccccgaggcgggagccggccgcccaaacaacgctcaccgttacacgccgcaatcgaggcgtctcaaccatcgccagaaccaggacgattgctccgaaggccccaccacgaggaaggcagccaggcgcccgcgccaaccaagcgccttgtttgcgctccacaggggaccgcaccgccactccatccacagcgcaaacaaaccactgcgagccccagggcgcaggccggcccaacggcctccaggggcggcgcttcggccgcaagtagtgaaaagaagatcaaaacaactcaccccgcccttcccagagcctggccaagggcgcgccccaccagcgccagccccgacgggtccaagccaccagcggcggaagcacgcgggaggagcactcatgccggatctcaggcatgggccggagaggccgcagcgtagggctgggactggaggggcaggcagccgaaaaaagaggctgggcggcgcgcctcgcggggtagcaggggcggcgcgcctcgcttgcgtgacaccgggccgtccgggggcttacctggtcgccgagcaggcgggcgggtaaagctaggccgcgagagcgaggttaggagaggagaggaggccgcagtactgctcacacgctccgctcttctcccactctcgactctgcagagccgccagcagccccgcaccctttatccgcggcccggggccgcccccggtgccctgattggctcccagcggccaggagcccgggccgatcagctgatgcggtcccgggccccgcggccattgggcgaggagcccggcgggcgccgctggggtgggggcaagcgaactgggaaagaaagaaagaaagagaaaggggcgtgggggaggggcagggcggcgtgggggaagggagcggagccgggagggctgagggcagaggggcgagttgccgccaggccgggaagcctcggctcgccgcccacccgccagctcgccaggtgccgccccacggcccccaacccggggtcccgaggctcccagcaaagcccgccctggacctctgccctgccgccttcacggggaatagttttacgaggagagctccctggggaaatgcggaaccagggaaaccgaatttagccttttgttgcgagggagcctccgagccccgcttcctgcgggcaggggttagcttgagagggagcgcggggcgcgggacccgagggaactttgggcgggcctgggctagggcgggtgccgcgcgggcctggggacaggccggggttcccaaggcctggaagagccgcccgctccggctctcttgggtctggggaaataaacagaactctgccatttcacatttgaaatcaacgtgctgtttctctaattttacagagaggattctggagggcggtagaaactaagtctggagacctgtctcatactgctggccagaccctaggcaggtctttcagggcccaagtttcctcatctgcaaaataaagtggtcatcgaaaatgacctgtggagccgcccactagatttgaaattctgtgtgcaaactgcccccggagcagctgaaaggaaatcgaggtgttcacttgccccctttgaagtccagggattgtcaagaaattcctttaacgaattctccctgattttgctttatcaagtgcggcttcttgttaatctggaaaatgggaatacatacctctcctctcagcttgccgtgatggttgggaaaatgtgtatgtgaacacaatattgaaatgtacctagagacacaacataggtaggtaggtaggtaggtaggtagatactgctatccgtactattactcgatcattctatttttagtgcctgaaatctacctgatggtgtccagattttattgcttctttcagtttaaagagcaagaatttatgcttccagtgcctttggaagaggaagggaagaagtttgttctggttatgttttgtaccgcaaatgtggaaaagaaatgttgcctgcaaccacacacacataacttggcttctttggtcaacatccctttcctttaagagtgtataacactgtagtgcttttacatgacagatgcagcattcatctcaaacagggttttttgggatgtttcagactggtgacattttggattgggtaaggtgccttacaaattccttgttaaatttcagtgctgccccttgaagcattacattgtggtggctaaaggcacggctgcaagtcaggtaaacctaggttcaaatctgggctttcccttcataccagctttgt

SEQ ID NO: 844 - DNA, 4001 bp, Homo sapiens
ggccaacgcgggcgaatcacaaggtcaggagatcgaaaccatcctggctaacatggtgaaaccccgtctctactaaaaacacaaaaaaattagcctggttgggccaggcgcagtgattcacgcctgtaatcccagtactctgggaggctgaggatgtgggatcacctgaggttgggagttcgagaccagcctggccaacatggtgaaaccccgtctctattaaaaatacaaaaattagctgggtgtggtggcgggcgcctgtagccccagctactcgggagggtgaggcaggagaatcgcttgaacccaagaggcggaggttgcagtgagctgagatcgcgccattgcactccagtctgggcaacaggagtgaaactccgtctcaaacaacaacaacaacaacaacaaaattggctggtgtggtggcacgcgcctgtagtcccagctactcgggaggctgaggcaggagaatcgtttgaacccaggaggcggaagttgcagtgagccaccactccagcctgggcgatagagtgagactccgtctcaaaaaacaaataaataaataaataaataaaaagggtccccaaatgcactttggtaactattagaagaggcaaggaggaagaagataatccctcaagactagaattatgtctgacagtctcttttcctaaaacccgtcttgattggcctaaacagacaccaatcaaggccccatctgtgtctactaggaagtggttttgagatttctctcatcttgagagaatccagggctgcgcctgctctgctgtctaggtcaagacttcaccctcttgtcttgtggatcatcctccaaagaccctcgggttgagattttgccttcatctctcctgcccctcaattagataacacctggccaattcctgtcatttcagaaagcgggaacaccttaagcatctttcctcaacgatctctgcttctctcaaaaagataggtttctccatcccctgaccgagcgggttactttgttctccacctagacatcaagaggcacctagacaccttccatcccctcaggtttggacgctgctctttcgtacttcaggaggctctaggagtcttcctaccacgcgctcatctgtggggagacctgggcctgctcacttccccttagagctcctcttccttccctgcctttggaaaaaacctgcccttttttcccttgttctgagtggccgaggcctctaccgcgcccctcgggataagctggactctgctctcctcagaagaacccactctgtactcttgctctcccgccaaggctccgagagggtctcctcccaggcgggcatccgggcttccagcacctatcgtccccctcccactgggcaggacccaggcctccaaccagctcctcatccaagggcccggtgctccccggaccccgcctttggggataccccaggctccccggacccctcgatggggtcctgggcgcctggccctctcagtccggagtcactccggcccctcctggcccctgagccgagtacttccgggcccctcggtccgggggcgccggggcccccccagtggtggactcgccggttcccgccgccctggtctggggcccgagccccggcggcgcggccggctgcgctgggggcggcccggcggctcgggcggacccagcggcagcgtccccccacccccccgcggcgccgcgacgtccgctcgctccccggcggcggcggcggcacgcacagggcgtggggaggcgcccgcggaggcagcagccccccgccccctgcgcgcccgcccgccctcgccggccgccgcgcggcccccgcgcccgcccccccgcccccaccccaccccgcgcccgcgcgcccacccctccccctcctcaccgtctccgtcgggcgggcgggcggcgagcggccagggcgggcaggcgacggagcatgcgcagaggccgccacggcagctaccgccaccgccgccgccaggccgggcttcaacacttccggccgccgccgccggagagctggcgccttaaaggggacgcgtccctattgccggtcccaccgaggattaaccttagccaagggatttgggccttacctaagcagaattctttcgcccttgaaaatcagtgttggaaaggtcgctagagaccccagtaactctccttcccgcactcatagatgaggaaaataggccctaaatgaaagaatcacctcaaccacaattgagggccaagctagctttctcgactcctctggaggactctactccatttacctccccaaatcctgttttatgaagtttacatcttatcggacccttcaagttacaatccagctatcagtttgcaatcagaagatctgcatagatcagtaactggtcacgagtccttgagcaagccctaagcattgtctgacccgtgcctgtttgccaagtttttcctgcttgtgagtttctgggttgaagtcttgactcccctgctggaagtgtaaacgactctggaggaatttcttgacagctctaaacctgtttccgataagacataatgtgagtgctaaagaaggtgatacctgcatgaaaagtgcttcagagagttcctggggtcagtaatagtaattaacaagtattaagacctttattttttatttatttatttatttttttagacagagtcttgctctttggccaggctggagtgcagtggcgcgatctcggctcactgcagcttcagcctcctgggttcaagtgattctccggcctcagcctcccgaagagctggcactagaggcgcgcgacaccacgcccggcaatttttttttttttttgtattttagtaaagacaggatttcaccatgttggccaggatggtctcaatatctgacctcatgatccacccgcctgggcctcccaaagagctgggattacaggcgtgagccaccgcgcccggccgtattaagacctttctatggccaggtgtggtggcttacgcctgtaatcccacactttgggaagccgaggcggacagatcacttgagaccaggagttcgagaccagcctgggcaacatggtgaaaccccgtctctactaaaaatacagaaattagccgggcgtcgtggcacgcgcctctagtcccagctactcagaaggctgagccaggagaatcacttgaacccgggaggcggaggttgcagtgagccgagatcaggccattgcactccagcctgggcaacagagtgagactctatctcaaaaaacaaacaaacaaaaagacctttctatggcctatggcttggtgaagatgcttctgtcttgtataatcctcacagcaaccctactaagtaagtttctctttttttttttttttgagacggagtcttgctctgtcgcccaggccggagtgcagtggcgcaatctcggctcactgcaagctccgcctcctgggttcacaccattctcctgcctcagtctcctcagtagctaggactacaggcgtccgccactacgcctggctaatttttttgtattttttagtagagacagggtttcaccgtcttagctaggatggtctcgatctcctgaccttgtgatccgtccgcctcagcctcccaaagtgttgaattacaggcgtgagccaccgcgcccggcccttcttttcttttctttctttttttcttttttttggtgggggggaccggtctgggttgatctcccaggctgagtgcagtggcgggatctcggctcactgcagccccagcctccagtgctcaagcagtcctcctgcctcagcccccggagtagctgggaccacaagcaggaaccaccatgcctggctaatttttacatttttagtagaaatggggttttaccatgttgcccactctggtctctaactcctgggctcaagcaatcctcctgccttggcctcccaaagtgctgggattacaggtgtgagccaccataattgtttgtttattgattgattgatttggagacgg

SEQ ID NO: 845 - DNA, 4001 bp, Homo sapiens
gagactccgtctcaaaaaaaaaaaaaagttaacgccctgaatgttatagtttatatcaaatttctcaaaggccccaaggaccagtgttcaacatttgctggctcaggctggttaacagtaaatatttaaggagcacctactaggtaccagggaccatgcatatccacctgttatacagacagtcgcagtctagaactacaatttgaactcgcatcttctgaaagttcaggtatacaaaccggaaccttaagctccaatacataactttccctttatagtatattcaaaaaagctattaccagagcttctgcaatctacaaccaaccaaatatgttcacacgaagagactaacaggggcacttagaatgtacaaaataagtcttgggttacagtgtacattctgttctctggagctttataccatgaaaatttagcatttcccctaaagtgactccttttcctcaaaaatcaattgttttaaaaagtaaatttctattgcttgtaagggtttctgtagaaacccctactcctacttattcttctctaatggaaatactaccctagaaaatattggaaaataatggaaatactaccctagaaaatcttcactaataatgaagaaatgtggcttgatttattagtaagctaatgccagtattctttgtatgatttactgagcctctcaaaaattttgaaactcatgttgagtaaaatacatccgactgtgtttaaaaaaagccaattaaaacgactatcaaataacataaacagtaattcctgaagtcaatggttttgctttgaagaggccaaaaaggataaaacagccaccagaagtctaccatagtctttacagtgaatatgtccaactctgtaacttatcctaaggtaactattccaactacacatcatctatagcaactattcagcatcctccaatgtgtaatctcttgttcactagatcttctgctacaaacctcaaagaaatcattctttaaatttcttcagctcacaccatttcccatccttttgtaaaaacagaagaagacgttataaaactttgaaaataaaaatgataggaaacggtggaaaagtagagatggcctctgcacccaagctcttttcctttatacctgataacttgtcatttatctcacctacctatcttcatgttcctggataatccagggttcttccaacagttcaaatggctctcttactaacaaatgtcaacgtccttatgtgaccattctgttccagtctctgtaccatccattcaagcctgctagctttatcctgccaaagaaccacgacgctccaaactcacaaaccattatacaagcccaacatatactctatgccgttctcgttaccaacacgctccaacccaacgtaaaaccttcctagtatcaactcttcctttatgagcttttcccatattcctactccctcaacatctaccggcccatactcccaagtctctctgctaaacgcaattctagcccggagtcacaccctctacagcctaattcccgcaaccccaaaaccccacccccctcatcacgccctctggggcctcagctaggaaccccaacaccccgccccacgcccggcacgccctccagatccctttagggtcctttccgtcggcccgaccagaccccgttcaggccttccaagcgcctaggctctcccgaccaccactcagtccccgcctccagcccctcaccgagtagcagcagcttcacttctttggccgctttttccccgtcctcccgtaagttgcggtcgatcatcttgcttcgctccactgccgccttgtcttcggcgctcaacgtgcagcccatggcggcggcgggagaggggacacgggcccggactcactcacaccacggaaactgcggctcggcaggctgaggcaccgtctattgctgggcggtggccctctccgtcagctcccttagcgcccagaagaaccggatatccgacgtttacgacacttccggcgacgccccgcagccttcaccgtttaaaccactctcctcagggagaggagttgagaccgaaagcggaagtcacggggagctggcggctgggttgggcggcggatctgcagagtttcgaggttctgtcaagttcgctgcccgccgcccaacttgaagcctcatttacctttcggctacctgatttggataaatggagaaaaaccggggcctctaactcataatgccctcccgcgttcaagatgccagttttggggcggagatttctaaattaaagcctacatcccgcgcgggaatatctgctggtaatttctcgcctgccagaaaactcctttgatctctggctgtggagactcgggacccctacccaagtatgggacactgcctccgttggggttatctcagatcaatggaatgggaacaagctatccggcctgggcgccgttcacgtctcacatctgagatcgtaacaccgactgtgcttaggacctcagcaataactttttgccgtctctggcccactgactcctctcaaaatgtcccctggtccttttgctattcacgtatttctgtgggcttgagatttgcttaactcctatattggcaaaaggccacttgaaatcgctagcagatactcgataacctgaaaggtaagcctgtagttcctccataaaatttccatgctgcccttctctccagtataattcagatcttcctaccttagggtcttagaactaaaaccaagataagtcaacttcaattccacaccccgaaacaaaccagtgcatcctgtgaatctcctactaaaatttcctgttgcgataacatgcaaaaggagaggttctagtaaaatttgcctctcagccctagtatcacctgaaacttaagtccactgtgaaagtcccaggcagatagcatctttcactaataaccctggatactgcgtgaaggtagtcctaaatcaacttttcaggcaaataagcccacaattactatacgttctagcgaagggaactcagtccctaaaacctttccctgtgattgtaaatttatttctctaatagaatctgaacttgagaaagtaaggtcccaacagagaggtttatatagtgatgattcattaattagaaggatttaattagaggattagagccaccttaaaaagcctcgtccaccttaactcttagcaatgccaattcttcaaggtttgaaaagtcccccagtcattcccaaatgactgttaagaatgaaagggactgcttttccattatcaatacttttggggaaaaagggcaagaggaaagggaagtaaaaccagtatttattgagtacctatttgccagatacggctaggtgctcccacatcccatctcttaatcctcacaacaaccctgtgaggtaggtaataatgatccccatttttacaggtgaggaagtaggctcagagaaattaagcagctttcccaacttcacacagtgagtaagtacatctatctgaccccagagttacccttttctatcatgcccccgtaggatattgcctggggacacctgacaacagaaagtctaaggttttcatctaggattgggagttaccccaacaccagcaggatgcaggaaaaagtaactgaccggatggttgcctcaatctgttgattcttcagtgagttagctcagattttgtccaggaacagctttcagagccaaagattacgtattgaactttaccaaggcatctggtgactagaaaactcctggaaggtggtcatagcagaaattgttgggaaagttctcagcataataaaagagaaatttttatttccttcatgatccactcctacagggaaaaataaatggcaaatgaacccatgtatgtcaaactctgtaataaacaccagtgagatcacagtgtcaggaaatttcagcctgaattaaagatacccttgctcttaaaactttcttctttgatgtatgtgaaggaagggctggagggcaaagtca

SEQ ID NO: 846 - DNA, 4001 bp, Homo sapiens
tactgcagccttgacttcccaggctcaagtgatcctcccacctcagtctcctgagtagttgggattccaggtgtgcgacatcatgcccgactacatttttttttttttttttgagacagtcttgctctgtctcccaggctggagtgcagtggtgctatcttggctcactgcaacctctgcctcctgggttttaagcaattcttctgcctcagcctcctgagtagctgggactctacaggcgcatgccaccatgcctgactaatttttgtatttttagtagaaatggggtttcactatgttggccaggctggtctcaaactcctgacctcaggtagatccacccatcttggcctcccaaagcgctgggattacaggcgtgcgccactgcatccggccatttccccccgcccctccgtagaggcaggttttcaccatgttgctcaacctggtcttggatggggctaagtgggttccctttattgactaatgtgtcctaatgtcctcattcacactctgctctctccatcaaaaactcataccttctagtactgagtttatactaccctaatgcctcgaactcctcctatttcgcttgtgcttgttccctctaagcagcttatcctgaatgtagaagaaatctgcttaggcttaaaagatctctcagtggccccaccatctctgtttccccctgcgtaacctcctgggctccttagagtctggtccagcttacaaagatatgctcctttagtgtgtccttacgactgtgccacagatcagctgggggaaaagaaggtgccttagcctagtgcgtcagctcccagatcccttatgggggcttggaaacccagctcaggcatctaatcttctgctacgtagaccctacctgctccagctaccctacttctgtggtaccagtggtttgttttcctaagccacgtgtctcaaatgttcttgtcttggttttatttacagctgtgatcaatttccctgacaaattgaggtgcttttattttctcagcacagaccagtgatctgcttaggagctcatcaagttgatgaaccttccatctggcaggagctttgcaggcagctattgaatagagagccaggaagggactgctgtacataaagacaccattcctccttcctcagagccccctacttccaaagtttttactgaaagcaagaaggaaccactatacttggcaaaaaccagtgggactatctctggtactgttggcactgactgtatggtgggacttgtgagcctgttggtgagggaaggtcctgttctcttctgatttcttggcttagagttctctgcagattgggtacagtctgcaagtccagggtccttgaagccaaaaggatgtgttaggtttggttagatttggaaatgggtgggttcatggtggcccttgcactattcctcgctcaagagtagaaaaactctggaatagccttggcattctggatccccttggggtggctgtttaggccccatattaactcagctctagatctcctgatcccctagccagactgtgtagaggagaggaaaaatgacctgccacccttccttcccatggggtgaggtagaacccaccaacccttcaggaaagtaggaaggacccctgccttctctggctcatcttcccatctcactcacccagcagtagcagcttgacagtcttggcttccttatcagcatcctcctgcagcttcttttctagctccttggacctcttggccagttctttgtcctcagcactggctccacttcccatatttgccgtcttgtcagctttttcaggcccctaatcctctctcgtaaggtttcctgtatgtgagatggaagagaaggaaaaaagttgggattgagtatcccaacttggctcccctaaaagctggtctgtacgatggcaggtgagagagcaggctgtagggtcttgtactctgcctacattgactgagactccctacttcaactggagacctacttcttagtctagggattgtagcctttatatctagcaatgtgataggtcaagccaattaagagctttgtcaatatggcaaggggtaaagactcaaatgtttctataactagggaaatgatctgctgggttctgacggaaggataggatgcacgactacttccatcctttaaggggttcatcccctgaaagtctcttgcttccttagatttatttgcatcatagagctagagattactggcacatatgtagaaagcattccttatgttgagcctccagattataaggtcttgatctcaagggcttcagggtatcaaagcatactcgtttaccataggctggtcctggccaggaaatttgttttgggtggtgcccttccttgggaagattaggaatgtttcagctcccgcagtggctgctgctccaggaagctactagcattgttcctttgcattggcccctctctttgtacttctgttattagcacttatcacttcatattgtacgtcgttttacaaatcttttccctcactgcatttctccccctggagctcaacggaccaaatctgactcatctttgaacctctcagaacttgtagtttatttgtggatcaaaaggtttggtgaatgaataaatgcaggaaaagggtgtatggtgaagagaatggggttgcttccctttggcccactaaagccagctgagtcccaacttcacttcataaatgaactttgctggtattcagtgtggggtttgtgctgcctcacacaaaaaactctgcttctttgggaaattggactccagactctggcttctcaaaggttggggcagctctctctccttctggctctcatcccagctgccctttcctgggggaaaaatgagggtgcagtctagcaactgcctcacagacatttaggactccacaggttgtactcctctatgccaattatttcagtttacttaaatgagtgttgctggcggagcctcctcaggtggagatgttttagaattttgttgcccaaaatgtggatcaagagccagcaacatcagatcacccggaagctcattagacatgcagaatctcaggctttaatccagaacttctgattcagaatccgcagtttaacaagatctcaggtgactctaaagacattaaagattgggaagtactgccctagggacctgttttccgctaaacttacctaatcctaagaatcacctgggttgctggtgtctgtgtttcctcaagtcttaggtgccactgactagaagattaccctgctttccgagatgttaaaatagtgtatgtttttaaatggtatgttagcatcaaactccagagccagagaaaatattttaagctaatacaggtagttatcacatctgtgaagtttgaaaaaccctggcctgaaacagttctcaacttttagtgtacagtggcatttacctggagagctttttaaaaaatactgatttaattggtctggagtgcagtccaggcacaaggatttaaaaacgtccccagctgattctagtgtacagccaaggtggagaactactgaggtcgaaggatgtaatttgctctttcattttagagctggacttgtgcagcagtggccagttgggactgggaaggtcaggagtagaatctaggtctccccgcctatcaggtaccctgagccatagctaattatcttcctccttcgcaccacctttcagtgactgtaggggctgatggagaaatatgcagctgctgaggtgctttccatggtagccatgttttcccaatcaaattggcaagtccttattgacttaaggaaaaacaggagagtctctttgaaattgtgactatcttggaatcttggttataaggtttcagtaattataccccactgctagccctgctccagcgtactcacaatactggtaactcacactgaggccagagccatgctgaaggctacactgttcaaggggctgcctggaactattaataattatta

SEQ ID NO: 847 - DNA, 4001 bp, Homo sapiens
attagaaaataacttatgcaaaaaccttatcaataacaatgcttgctccaaagaccttattcagtatgcagttcactgaaactttccacaaaactaatacgtccatttgctaatcatgaaaaataatcttcatattttcttaattaataatctcaccagcaactgcttaatcacctaatactatttgagactaatgttatcagatagatagcaacatgaaaatacaatgaaccaatgctccccaaaagaaaaccataggttaccatttctacactatttacccataagtccagtactgtacaccctaactgtaaatgtacaccaactcccttttcaaaacacaaattttaacatcggcgttttccttcaggagcccatttcacaatcttaagaaaaagcttccatgaagacaggctgggcacggtggctaaggccgctaatcccagcactttgggaggctgaggcgggaggatcgcttgagccccagagttcgagaccagcctggttaacaggatctcttttacaaagagatcccatctcttaaaaaaaaaaaaaaaaaaggcttccatgaagatgaattaagcaaacaaaagctgatactgcttctgcatgctaaccatgtaatttaacggacacaagaaatgttaaaatatcatttgaatcaactatcgattcacaagaaaaaatatagcaggttcttaaaagtcaaaagcctcagccgacagccctgtggaattttcaacagatctccccactccccacccccaccccgcttccagccgaaaagccgatccaggcaagaggaagacacccagcctttgtgctatttcctgtcctctcccccaccttcgggccttcggaatatcgcaaaccgggccccgaaactcggcgcggcggcggccgccccacaaaggcagcggtgggagcgccatcttggcgcggccaccgggcccattcattcgcggggccgggccggggtccgcgcaaccctcgagtcgacacgcgcggggcgccagcgccggacagacccgggcctcggcaggagaagggcgaggccacagcgcgactgcctcagcggctcgacacagcgaaaagggccgaaaccgttattttcccatttcccgacgccgcgcccggcttccgctttaaatccctactccgaccgcggcgcgcggcccggcttccccatttcattgttccccttccccacgctcgcgccccgcggccgcccggccctcaaagtcaccccgataggcggcccgcgcgggggctccggccgccgacaccgccccgcctgcaggcccgcccggcctttgttctcgcgccgcgggcccgagagccacgtccggctccccacgcagggcccggccccgcccgacccgcgcccccggggccccggccgccgccacgggaagcgcccgcggcgcacacaaccccgcaccccggtgccgaaactcggcccccagccttgggcctgggaccccggctcctctccctagaccccgccctcgaccccgaccctgcaccccgaacctcggaccccagcccccggcccccccttcggacgccgcccgccgcacccgggcggggcaggaagacgcggccccgaccggcgggtggggtgggggcggggcgggcgcccccagggcgggcgggtggacgaacaggacccgggtccggggctgggggctgccgcgctcacctcagcgccctcgtcgcggcctgacgcgcccacaccgccgcctcggccgccgctcggcaggtcgtcgcgctcgggccgcgctgcgcgctccgcgggcgctgcgggcaggtgcgcgccggcgaggctcggtccagtcccgccgcggcggctgctccactcccggccccgctccccactcgccgcccgctcccgctcccgccgccgccgccgccgcctccgtccgcccctcagacgcctccagccatcgggatgggcgcggcgggcccctgcccgcagcctcggaaaaccccacgcgctcgcgtcaccacgcacgccgcgcgtcgcgcgcgctcgccaggcccgacgggcacgcgcacgcctgtgcgcgtccaaaccgcatcgggccccgagcgcgtgtccgagcggcttaaaggggccgtgctgctgccttcgggtaccgctgccccgggagacccccggcggcccggccctgcggggaccgggcgggatggggaccggggcagtggaccctcggagttgggatggggcggggggaacgcgggcgtggagccctccggggacagggtaaggttgggtaaccgtgggcgggggctcctccaggggcgggggtggggtaacggcgggcggggggcactcaagcgacagggcaggggcgggaaggccgcgggcgggggcggtccctccggggacggggcgggtgggggcaccgcgggcgagatcgcttcctgcagaggaggcaacaggccccgctagcaggtcagggtcccgggcaggcgcaggtgccccccggcctctcaagcagggactgcggcgagctcagacgcggctgacgggcagagactcgcgcttgggctcagtgcgtgtgaagtgggcctcgggctgcggaggagggcagcaccccgtggctcctcgcgctgctgcgagcagggccgcctggcaggggcgggggccggtgggcgggagtgtcggggtaaggccgcggactcctcccatgccgctgagcagtggacagcggggactggagacctccaggtgaggaaggggaacgaagtcaagaaggccacatgtcctggcttccaggcttggtgtcctcagaagcctccagaacgtccatggaacccgcccctgcgcccaccgcctcctgctgtctttccagctgagttccggctgcccctcaccctcggcttcttcactctgcctctccccagccagcgccctgctccccggtcctcaaccaccaccttccacctgcctgggccttcatcgcctccgagctccccttccacaccaaacctggcgtccgttttcctccaggcctgcaccagcacagctgaaggggagagagacccaacctcatccactgggcctcccctcaaccagggccacaacctcaaggggccatgccacctccaacacctatttcccaccttctactctctccacaccctgggacaccacccgcctctctcagctgacgttttccttcttgttttgtgtgcatggtgcttgtgtgagaaagtggacacacagtaagtgcggcttccagatgcgtccgccacctgccctccgtgccacgcgcttccccctacctaggggagcctccaccagacagggaacccacgccttgccacccttctctctccctcccacttcacctgtccgcatcatttctggagccctttctttctggcacgagatgctccagggccctgttgtattctccctgccccagcctgaacccagctatttctgctgcagcctggttcattgtgggagaatgtcatgcagagcccgggatctggctccggatgtgctcattgctactggggtgtcattgcagctggcggagcaagggaacacatctatgtacatgcccacacgcatatgtatacacacagtttcatgggcgtgtttgtctgtttttcttgggcaccacgtgtttactctgatgccaggccaacactacagggctcaacctgttcggaatgaggggcctcctgctttgggagtgaggaacctggctctgattatctcctgtgtaaccagtctctcatccttgcttccaccccaccatatgctacccgctcctcaccctgcgtggcctctgacctccgctggaccaccgaggccccgcccccacaggggcgcctgcctgcctagcacagttgagcaaggagtgaattcccagtgaaatttttttaatttttattttatttatttattttgggtttttttttctttctttctttctttttgagatgggggtctccctgtgttgcccaggctggtctcaaactcc

SEQ ID NO: 848 - DNA, 4001 bp, Homo sapiens
cacaaatctaagtgctgtgtgccctgttgggggttcgatatctagtaaattacatgagttaaatacagcaaaaataggactgcattatttataaggtctaacgacgcagtagacttttcagcattttttggacttaaaccagggctttacggcgctggttaactattagagaaggcaaagggactgaacattttatctgaaagtccttttatcacttaagactctgtaaaatttttgattactttaaaaattgtgtgtgtgaataacgttagtttactagaaaaggggcttgctagtatatataatttggttaaaaaaacaaaaacaaaacaaaacagctccttacttgaatgtgattgttttggcaatagtaaaattcaatcccgtcgttctagcgctgcctgccttcctggttctcctaggtgagggccgccatcctgcgataatttacttcgagagctgcgaagcgctggcaagggtgcagtctggtgactagcacttttaaaaacaaagccaaactccgcttttaaaatagagaaggcacagacgcagaccctgcctctgacgacatccaaaagattcattatacacagcctattcaggcgaagctacaaccgccccaggaaatataaactgtgtcggcaaagacagcaggggggagaggaagtaactgatgggaaggaagctaatcatgtgaagtttgtccaactccacacggtctaataaattcccgtttgtttccgctgggagcagccattaaacgcgccctgacacgtgggcgcaggaacctcccttctacctctggtgttcagagatttccttctcgacccacttgtttgtatacaaccacgcccggcaggatgaccaccagatgaccggccgcagcaatgcctccactcagtcccagttgggcaaagtttcactccactgcggcgacgtgaacaagaatcacggcttccttatcgtgagttatgaatgatttaagccaagtttacaggacacacaaagcgagggacgagtgagtgacgggaggtgctaagtgacagcgttttaaagttagctttaattgatatgccctaattaaaatgaaaaacagaattcaccctgccccacgggataactgtcggggcaataattaaaaaaaaaaaaatcacccaagactaagcctcaacctcccccttaccacttgcaaatacagtctgcagaaaagcagcctcgggtccccactcgggggtccctcgcggggtgcgtcatatgggctctcccctctgcgacccgctatttccctgctagacccccagcgcccagcggattccaaggctgcgctcccgccggctggtcccgggaggtagaaagtaggcagaggggcgtggcgtccctgtcgcccccacatgccagccctcctccaacgcctgacaccaccacaagccacggctgggaacactgggggcctcccaacccggcgcggggcgcacggccgcaggctggcgaggaggcaagcgagctcaaggggagacctttccttccacccccagccctagccccagccacagccgtgggggcggcttcccgcaacctcgggcggccgcccgtcgagggcgcgcgcgccgtttctgcctctgggtctcggtgtcccttggccccttcctccccctccccccggtctccggcgcccagcgcccagaccagtccccgccctccagcaggacactcttccctccttccttccttcctccgctccctccctccatctcgcttcccagcacccgggactcggaggcggcccccgaactcgctggccgacgccccgcgccgcgccccgaccccgcggggacccgactcaccacccgcgcccgccgcttggtactcacccgcctgccggtgcgctgccccgccgtcgccgccgggactcggtctctaagggctcctggagacggctccgacctctcctcctcctcctcctcttgctcctccgggcgccggctccgcctcgctggggtgggcggggcggcggcggccccgggctccttcctccgcgccgggccctgcctcccgcccggacgccctggctgtgctgtcccgggccggggagcccgcgttgtggccccgcaggaggaggggcgaggcctggcctgtggaagctcggtggacgtctggtcgtctttggccatcccccttcctctaattctcatggaggacctgaagttctaggacttgagggcccccactctacgacccgcccccgcgcggggccgccctgactcctcgcaagtttccttcgcgtgcgaacgcctcgcttgcccctgtgccagcggtccccagggctgtgaggatgagcgctgccaaacccctacacgaaagtttggttctgttccagaaactatggaggaaaacacgcatagtaacatttaaagggccctggggccacggagagaagtttcccagaaagtggaggtataactgcggattatagaatttgtagtacatccacccaccatgagcttcccgtccatctgccccgaccccctgaaatttgtttccgaatgtccagtacctggcagagttctgcctaatgaattaatgggatttggttggtcttttctggaagggttcaaggtcgggtaaatggaggagccatttccgcttccacagattttgtactattcctttggccattcgacagacattaccaagcacccgctgtgtaccaactgcgatgctaaaggtgatgggagaggtacaaagatgaatcagacaaggggcttgccttcttggagtccagaaagagtaaagaagctggatgttcagaaaaccactcagcggacttctagagtattcctaggtagccgctttcttgtttgacagggtggagagaaaagaggtgaggccaaagtaggtcacttagaaccagtgtgggcagagtccacacttgaaatggagtctgaaagcattggtgagggatgtctgtgtattgagtttcaccaactgaggacaagtgggccctggggaatctgggaactagggactgcagtcagggcattatattccctcttgctttccttctgacccctaagcaagtttcaggtttagtgaaatcatttgcacatgtagaagaggtgtcacaggtagagtaggtgtatgaatgcatgccttgccccaggagtgtggtcttagcaagctgcggatggcggtggtttgtgggatgcaagccacagactgccagaggggtctttatttcctgttctgttcagcattaggaaatgcttgactgattcacaagtactaacagttcaaatgatacacctgaaacagaacagcttgacaccacagggactgagagggtggcatactggagtttgtattttttggccacagaccacagaatagactcctctaagctatgctactaattttccttcctgggacactttatagtttaataagtgctttcatgtacttactcttacttttctctcattagtctcttgaaaaaacctggaagctggaacaccacatattgccaccagtaacttaagcggcttgtcgaaggtttttctagttgagtgctgttcaaagtgtggttcatggaatagtgacagtctgcaaaccgttacccatctacaaagggatgagcatagaaattgaagatgagcatgtagaaacttacagcaatttgacagagtaattttatgtctgttaaatcgtttaaaatgcagctttgtattttatgtctatttcatttttcttttatgtggaaaggcatcagcctgcaacagattgaaaataaaatatcacagatagtttgagaagcactgatcgagatagtattaggttagtacagaagttattaccgcaattacttttgcatcaacctaatagcaaggcaggaatgataagagctaatacttaaccagcactttctgcgtagcagatgttgctttaagtgctttacatatattaaaccttttaatcctcctaacaacctaaggacgtagtcacag

SEQ ID NO: 849 - DNA, 4001 bp, Homo sapiens
gtcctgggaggcgacgggtagaggagagacgcggcagccgcggggccggggagacggtgggaggcccggcgtccatcatccactttattacttgatcaaactttaacattttcgggtttcctaacaccttagccccaaatactcgaaatgaagcaaatcttaaattaaggagtctttccccaccacgctctgtcctcctccccacttcaccctcccgccgtttcgcgttatttccaaggcaatttaaaaaatcaagccaaacaaagctccccggttgctgccgggcgcgcgcggcgaacgaagcacatttcagttcagcaccagcctcggggacagacgccatcaaggaggtgaggaaaaccaccctcagctgcggtggctccagcgtcaccccgagtgctcccgaggcggcgtctgggctgctggggagccaggagggcttcctcaggcactcgccagaaacatttccccaaagaaaacgcccaaccagccacgccatctcctgccactgaggtccttttccacgggggacgtccccgctgggaaaacagcaaacgctctgtgacctacaaatggaagaggggacccccgagcccccgcctgcctcatgccggagggaccgggcgcccccagccccggaagcccctggacgcgctccgagggggctgtccacacccgcgcgcgggcttccccggggcccggcgggaggtcccgggagaggaggccgagggaaccacaggtctttgtgtcgcgtgcagcagcagctggcggcgtgaggaccacaccggcgccagagccgtctccctaggtccggagactttcaccccgagtttcccttccgcgtctggctgcaccgggctgggctctccccgcggacacccggggctccggccgggcgcccacttacccggagcgggatcacgcgcgggcttcgtctgcagcgcggtgctcgcggggggcggccaggccgagcggcatcgctccgcatcggggcgcgggccgggctcgggtgcaaacgcgcgcctcgtgcccctcccgccgcccgcggggtctccgcgtcccgtcaccggccccgccccgcgccgcgcctcccgccctgcagggcccgaccacgcgggcctgggggcgcaggcggaccctcccccggccctggacgctgggggcttctgctcggccccctgtgccgtgggggcccagactggggaagggagagccggcgactctgcgaccctcgcccccgttccacgctggccgcgcccactccgccgcggggtctcgcccgggaaatcccgcccgctgccaccgacgtcactgctgcgtcaccggggctcccgcgctccccgcccccgcccccgccccagcccgggcccgcgccccccgcccgctactcgggcccacgccccctgtcccagcaaagggccgcgcccccgccccgcccccccggagcccgcgtggccgggggaccactggaggggtctgtggggcggggccggggggtaaatcactgggggggggtctggggggcgcggcgggggggagatcactggagggatctgcggggcggggccgggggggaaatcaccggaggggtctggggcggggccggggttgctggaggggtctggggacggggccgcggtcagcgcgggctccccgaagcctcaggtaccgccctcgctcggggtgagctccagcgcctgggccgttggggcgcgggccgcttcccaccctgcaccaagggacgcctcggaagcctccggccaaggcggggaacggcggagaaacgcggaatacctgtgcgaattcgcgcggccgcgtcgccactaacccggcgaaggctgacccgacgttgctgagtgacggggaccaggggccggcgaggcccccactccggggggagcgaggccgggagggcggagggcgcgtgctggaggcgggggtgcccttcgcgccccggttctaggagcgactgctctccaggcctcgtccctgtggcaccgcaggcttttgcgctggagattttaaaacactttagtgattacagccctcttcctttcagggaaaaaacagtttaagcgccgtccattttccgacttggtaaaataatacgaaaccttgggaatagagaagcaacgaaaacatttcacgcagtgttggcaagatttgtagaaaaggaggccaatattaattccctttgtgaaaacaacaacataacatcatgatgaacgattaggaaatatttcgggaagatctgggcgcctcatcctcatccgccgtccacaagcggtccctgccacaaaggacacagggcgcgcttgttgctcagatccctggccccactggttggaccttgccctacacacacgtgtaccttctcggagcccaagggccagattggatgcgaacgcggagatcacaaaggcccgtaaacacggggccagcaaacacatcggtttttacaaagctctcaagtgcccatttaaggcacaaaattaaaccttggcaaaccgacgaagccagtccatgtccacctcacagacttttaaaagtgagaaagatatatgagtactgcattgaaaattcaagcaaatccaaaccctagctcattgttttcaccccaaaatcttatttctcctgcatttcctgcccacctcccgcccccgactggttggctaaggcagaatcctaggtttccttttatcccaaatcccaatctcaattaatcaatcacaagggaaatcagtgtctacactttcaagcgcatcatttccttattttatctttctaattgttacactatcattcaagataggatcatgtcagttttaaacaggaggaagaggtcagtcaacaagtggttccagagtggatcccaagaccagtagaatcagcgtgtcacctgggaatcttttagagatgcagactcccaggccccacccagacctaaggaatcagaaactctgggggtggggcccagcaacctgtgattccccaaaccctccaggtaattctgattccgttcatctctggacatcacccaggatagctgcagtagtgtaaagtctggcaccaggaccctgggtatcagttttctttcttcttatttatttattttttttgcggagtgggagggagtctcgctctgtcgcccaggctggagtgcagtggcgcgatctcggctcactacaacctcctcctcctgggttcaagcgattctcctgcctcagcctccagagtagctgggactacaggcgtacgccaccatgcccagctaatttttgtatttttggtagagatggggtttcaccgtgttggccaggatagtctcgatctcttgacctcatgagctgccctcctcggcctcccaaggtttttcttctttattcctagtcatatcctttgttctgaagtcttctttgtttatatctatataaccactgcagatttcttactattagtgtttgcatgatatgtgtttatatccttttaatttttaaatctatctgtatcttttttttttttttttttttttgagacagactctcgctcttgtcgcccaggctggagtgcaatggtgccatctcagcttactgcaacctccgcctcccaggttcaagtgattctcctgcctcagcctcctgagcagctgggattacaggcgtccaccaccacacccagctaatttttgcctttttagtagagaccggatttcaacttgttgtccaggctggtctcagactcctgacctcgggtgatcctcccacctcggcctcccaaagtgctgcgattacagtcgtgagtcaccacgcccggcctgtatctttgttcttaaaagtgggattctccatcttcgtaggcagcacagagctggatctgcttttaaaattcagcttgacgatctgtcagcttgacaactaatagtaaaaaatccgcagtggttatatagataaaaacaaagaagacttcagaacaaagaatatgactagggataaagaaggaaa

SEQ ID NO: 850 - DNA, 4001 bp, Homo sapiens
taaaaactgtaaagtgaatctaggaaaagctttttttttttctggtttctccaccatcagtttgcatgagaaacgccaatcataggactgctgggaatggccccttagctgtgctgtttctgagccaggcctacatcctccactggcttccttgggcgaattttaaggcctatgagcactggagttgtgcatggaggtgggggccaacaggaagtccattgtcctaaatagtcatttcagcctaactaaccccatggtgaggctgctcattaacaggcaaggcatcactgtaaaccttgcatttgcatttacacctactatttattaagtgccacagccatctcttatcatgaccggtcactgagcaaaccctacatttcaaaaacaatccagtttataggtcctctgtctgtttctccgggctggaaaaggctttccatttatcaacttagttgtccccccagtcgcctcttgcagggaacagggccagatcagatggcggctggttcccctcccccgcctcatacaaaaatcaggaaaaggagttgcgggaggaatcgagaagccggccgcagagcccaggtcccccatggctactgtgaggcattcgccgctgcaaatttcctgtccactgtgggaagcggcacacctcactcatgagcagacgacaggactggcacgttttaatggagcacacgggcgcagcctaggcggccttttgctccggctgagaggcacgggcccggtgccagcatttgacagtcctgggaggcgacgggtagaggagagacgcggcagccgcggggccggggagacggtgggaggcccggcgtccatcatccactttattacttgatcaaactttaacattttcgggtttcctaacaccttagccccaaatactcgaaatgaagcaaatcttaaattaaggagtctttccccaccacgctctgtcctcctccccacttcaccctcccgccgtttcgcgttatttccaaggcaatttaaaaaatcaagccaaacaaagctccccggttgctgccgggcgcgcgcggcgaacgaagcacatttcagttcagcaccagcctcggggacagacgccatcaaggaggtgaggaaaaccaccctcagctgcggtggctccagcgtcaccccgagtgctcccgaggcggcgtctgggctgctggggagccaggagggcttcctcaggcactcgccagaaacatttccccaaagaaaacgcccaaccagccacgccatctcctgccactgaggtccttttccacgggggacgtccccgctgggaaaacagcaaacgctctgtgacctacaaatggaagaggggacccccgagcccccgcctgcctcatgccggagggaccgggcgcccccagccccggaagcccctggacgcgctccgagggggctgtccacacccgcgcgcgggcttccccggggcccggcgggaggtcccgggagaggaggccgagggaaccacaggtctttgtgtcgcgtgcagcagcagctggcggcgtgaggaccacaccggcgccagagccgtctccctaggtccggagactttcaccccgagtttcccttccgcgtctggctgcaccgggctgggctctccccgcggacacccggggctccggccgggcgcccacttacccggagcgggatcacgcgcgggcttcgtctgcagcgcggtgctcgcggggggcggccaggccgagcggcatcgctccgcatcggggcgcgggccgggctcgggtgcaaacgcgcgcctcgtgcccctcccgccgcccgcggggtctccgcgtcccgtcaccggccccgccccgcgccgcgcctcccgccctgcagggcccgaccacgcgggcctgggggcgcaggcggaccctcccccggccctggacgctgggggcttctgctcggccccctgtgccgtgggggcccagactggggaagggagagccggcgactctgcgaccctcgcccccgttccacgctggccgcgcccactccgccgcggggtctcgcccgggaaatcccgcccgctgccaccgacgtcactgctgcgtcaccggggctcccgcgctccccgcccccgcccccgccccagcccgggcccgcgccccccgcccgctactcgggcccacgccccctgtcccagcaaagggccgcgcccccgccccgcccccccggagcccgcgtggccgggggaccactggaggggtctgtggggcggggccggggggtaaatcactgggggggggtctggggggcgcggcgggggggagatcactggagggatctgcggggcggggccgggggggaaatcaccggaggggtctggggcggggccggggttgctggaggggtctggggacggggccgcggtcagcgcgggctccccgaagcctcaggtaccgccctcgctcggggtgagctccagcgcctgggccgttggggcgcgggccgcttcccaccctgcaccaagggacgcctcggaagcctccggccaaggcggggaacggcggagaaacgcggaatacctgtgcgaattcgcgcggccgcgtcgccactaacccggcgaaggctgacccgacgttgctgagtgacggggaccaggggccggcgaggcccccactccggggggagcgaggccgggagggcggagggcgcgtgctggaggcgggggtgcccttcgcgccccggttctaggagcgactgctctccaggcctcgtccctgtggcaccgcaggcttttgcgctggagattttaaaacactttagtgattacagccctcttcctttcagggaaaaaacagtttaagcgccgtccattttccgacttggtaaaataatacgaaaccttgggaatagagaagcaacgaaaacatttcacgcagtgttggcaagatttgtagaaaaggaggccaatattaattccctttgtgaaaacaacaacataacatcatgatgaacgattaggaaatatttcgggaagatctgggcgcctcatcctcatccgccgtccacaagcggtccctgccacaaaggacacagggcgcgcttgttgctcagatccctggccccactggttggaccttgccctacacacacgtgtaccttctcggagcccaagggccagattggatgcgaacgcggagatcacaaaggcccgtaaacacggggccagcaaacacatcggtttttacaaagctctcaagtgcccatttaaggcacaaaattaaaccttggcaaaccgacgaagccagtccatgtccacctcacagacttttaaaagtgagaaagatatatgagtactgcattgaaaattcaagcaaatccaaaccctagctcattgttttcaccccaaaatcttatttctcctgcatttcctgcccacctcccgcccccgactggttggctaaggcagaatcctaggtttccttttatcccaaatcccaatctcaattaatcaatcacaagggaaatcagtgtctacactttcaagcgcatcatttccttattttatctttctaattgttacactatcattcaagataggatcatgtcagttttaaacaggaggaagaggtcagtcaacaagtggttccagagtggatcccaagaccagtagaatcagcgtgtcacctgggaatcttttagagatgcagactcccaggccccacccagacctaaggaatcagaaactctgggggtggggcccagcaacctgtgattccccaaaccctccaggtaattctgattccgttcatctctggacatcacccaggatagctgcagtagtgtaaagtctggcaccaggaccctgggtatcagttttctttcttcttatttatttattttttttgcggagtgggagggagtctcgctctgtcgcccaggctggagtgcagtggcgcgatctcggctcactacaacctcctcctcctgggttcaagcgattctcctgcctcagcctccagagtagc

SEQ ID NO: 851 - DNA, 4001 bp, Homo sapiens
taaaggcacacctgaatgacatttaatggttacgaaataaatgatttcgagtttcagagccaaatccagccaagactgactagaaaccactgtgatgaggtaagaattgggagagtagagaaatggattccaaactgcagtgaggtctacagcatttcaaggactggacgtgagggggatcccacaccaagacgaatgagaattcccttcccttctgagttgaccacaactgagtaagctaggtccctgacatttctagttaacaaaactaaatgggagactctctctcaggaggatcctgcaccaagacgaatgagaatttcccttcccttctgaggtgaccacaactgagtaagctaggtctctgacacttctagttaagaaagcttagagaccctctcagttcacaaaacatttcggcaagtaataaagactagcctgatgagtataaaatcaaatcatcttaggaactggctgcttttaacagggcacatgatttacattcttgtttctttttttaactgcagaagtgtttcacatgtagcctgacctattgtaccagaaagaagccaatccatttaggactgtaaaaatcaggaaatacttagaacagcacttgaatgtcaagttattctatcaacacagacaaaaggctttttctcccaaagtaccccaagacaaggccaatactaaccagacgccaaaataagaccaataattacccacaataatcattttctccggcatgcggaccagtcgatatccccaaggtcaaatatgagcaaactgtgccataggtatgaaatgcacgctttgttcgaggttgtacggggcactgaccggaactttacactccaggatcgtttcgaaaaatgcttattcaatccacagtttaagttatgcaataattcgcttaaaagtatgtgttcaacggacaagagaagttgaaggtaagaatttaatactaaaggaagtaggtttgggaaagatcaaatgggagaaaagtctgctctgaatcaaaagtcggaaaataccctgtccgatgagaaacaggaggctggcaaagtgggaaaggaagggtgcggacagcgcgcggaggcgcagctgttggtgagaccagccgagaaggctgccaagggaggtagagacggaggaggaccggaatgtcggccacggttcaacccaggggccagcccgcctcggaaagtcctggggcggaagggcgaactaatcgtccccctaaaacacagcgtagacccacgcggcgcctgctctaaagctggccgctccccgatcgccgccgctgagcgcgcgtcctctccaggggaagcgagggccggcgcgtgtcccgcccgcccccgccagctgggccgccggatcccacccgccgccgccgccttcctcccgcctcggccgcccgcccccgctcacttttacgcggttgagtccggcctccagccggagctgttgaaccactttcttcatagcggcgacgctggaggagccagacatggtgcacgcgacggccgggccgattcgtgggtcggtgggtcgtgggccgtgggtcggcggggccagacaactcagcggcgcgcggcgggggcggggctccgaactttgtctctaagtttccggttctgtgctcagcggctccaccctcggtgcgcatgcgcgccttgccagccctctgttccagctccacacccggccccgagcgcgagcctggaggagggggaggagaaggggcggagcagtcggtgggcgcggcggctgctggaggctagcgcgacccgactcttaagttttcttttcctctccagaggggccgattagggagaggtaaggagagagcttaccgttagccgcgaagaactaagagggggtctgaagaggaccagggagggaaggcagagcttgtgggagtttctaaaaggcccggcggcgggtgaccaggaggtctcagttttcctcccagtttgtgggaagggttgagggaagtgaggggagatactgggtgaggcgtaggagctactgtgcacccggcgtgagtcacccgcacacccccgccccgtacaggcgtgtctctctgtgacccgagtttggccaacaggcattttcagttccacccccaacccccagccccgctgacccgaggcggagagcaggcgcggaggtcgctgtcgcgtacccagcggagccgggcgggcggggagcaggggcgctgattcgctggagaagggatcttctcgaggtttgactttactggcttcttagctcttgaatcggtttttctgaaggagattgtgaagaagccaaggtgctggctgaagattacacctgtctgctcggttacccatttactctggagaattaatgcttattgtactttttaaaataaaacttatttttgtgtttccggaaagtttgctctttagtatttccgttgtaatttattacctcctgcttgaaattgagtaccaaaggagtttttaggagagagggtagggtctaaccaaacaaaataggctcagccagtaggtctttctttcatccacggaaatatgtgtgttatgtcacagcactaagggcagatgtttcctatttcttttcgggtagtcaatctccgaatgcgctgatgttttccattaatgttaataattttatcattaatggatttcaaattttttattagggaagcatgtgtaattgcactggtcaacaaaatctaatttatttactcaacagtttatatcagttcgcaaaaatgtacatcgtaagtttagcattttacttaattcatacggatgtaatgattggggttaaaaccagggtttgaattctggctctgctacttacggtattcttgggcaagccacttaagttactgaggctttatttccttatttcaaagtaaattatacagcttcgtagagttgtttttcggaatgaaatgacattatatgtaaaaagaatgtgaaagctatctcaataaatattgtcttttcccaaaaggtattgtaattatttcacctttggtgctttgttgactgtataatgctaaaacgtcattcatactttacagatttgtaagattaaacacaagtatctattcaaagaatgatctgttttacagtagttgtaaaatatatcactgaactcttagaaccgtggtatgttaatgctggaagagattttagggaatatatggtccaataattacttctgtgagggagactgttgaggaataagcagtgttttaggccgaaacagtttcagaaaaaaaaaaaattgttgcttttttattaactgctgcattgggaaaccacagactggagtgctgtctcaaacaccaggtgttatttttttgtagcgtgtgtttaaagattctatttaggatacaaaagaaaaataaaacattgaggcctggtatggtggctcacgcctgtaatcccagcactttagcaggctgaggcgagcagatcacgaggtcaagagatcgagaccatcctggccaacgtggggaaaccgtctctactaaaaaatacaaaaattagctgggcgtggtggtgcgcgccacccaggagtcccagctgcccaggaggcttgatgcaggagattcgcttgaacctgggaggcagaggttgcagtgagccgagatggcaccactgcactccagcctggcgacagagtgagactccgtctcaaaaaaaaaaaaacaaaaccattgagataactttaagttcagttgcatctgaagtgattaccagtaaatatagtttatgaactatctgtatctcttaaacttttgtttagatgttctttgaccttccacaatgatctaagacatttcaaacatgttaccaactgtacagacatagatgctcactgttcagttggttgaagactggcctgttgtcaccaagaggattcttttagcaataaatgccaagaaaagaccaccaagtaatctgtcactttatgttttgtcagcagagcactgt

SEQ ID NO: 852 - DNA, 4001 bp, Homo sapiens
tgttgctccaataattagtacttgaagctacatggtatgacaaagctgacccaatctttgatcttcgataggattgtatttgagaagaatagctaatatttttgagcacttatgatggcactgtgttatccaaattataggcatcatctgatttaatctatacaataatcctatagatatattatccccatgctgcggagtgagaaactgaggcacagtggtcagacaccttgcccaaggtcaaaccgttactaaatggcagagccagaatttgtacatgagcatttgatcaccatctatggtcttaaccacgaagatacctacctctgtgtctcagtttaacaaatattgagtgcctgctccatgcaaggcaccatggagactataattttgatatatgtgttcttactttcttaatgtttgatttttgtttaatcaacacagcaattcttgccttacatctcaaagagaaagagaaggacaaacgaatagggtaatactagcctagcttctcattttgggagccctttatttacctatttattcatttattcattattattatcttttttttgagacagagtcgtgctctgtcacccaggctggagtgcagtgtcgcgatctcagctcactacaacctccacctccccggttcatgcaattcttccacctcagcctcccgagtagctgggattacgggcatccgccatcatgcccggctaatctttgtatttttgtagagagggggtttcatcatgttggtcaggctggtcttgaactcctgacctcgggtgatccgaccgcctcggcctcccaaagtgctgggattacaggcgtgagccaccacacctggccaggagccccttaaatcacctgtctggtcctgaagtgatacagtagaagacaggctgaaaccacagcccattggctctcctaacagtctctaacagtagaaactggcggctctactactactcactaactgttgcaattatgacaggccacttcctgtattttgattcagtctcttcacctgtaaaatcataatctctaagggccttttggggtctaacattctgagattccagtttgtgcaaagtgaataatttattatcaatccggaataaacattcaacttgcattaaaattgtcaaaaattctaaaccatattttaaaacaaagttttattaattaaacctgaatggaaggaactctcccataggatgtcttgttaatcgtacaggtggaacctcgccaaaacttacacacatctcctaaacagccttactgcaatgatcatactgacttctttgtagggttctctaagcactttaccagatagaataattccaagggccaaaactataagccctttctcattttaaaggtcaaagctaaggtggcaggcaagtatgatcacgtgtaaaaggcccgaagggtcaacctacaccatttttaatctgactttctctgcatctctcaactggagaggacccaaggctgtcagcctgagtgttcactttccttgacttcagaccagttgactacactttggcctgccaggcgtgcactgagccctcctcagttcccccctgagaagaaaccaccacaaatattgctttcctttttcccttttcatccccaacagccaccccgctcgtagtcattctaagcaatgccactcgagtaaccctccttcccctccagtgctcctcggagcccttccctatacttcctccaagctccaccctcgatcagccctgccgcctgtacctgggtttgtgctggccttggacgggttgatggtgctccgtcctttgtacttgggcttcaccatcttggcgacgagaccgggaccggagtgcgaggtccggcttacgtggtgaaacaaacttttatgttcccaagcccggccgaagacacccgcctgaaccacgccggaccacgtgtgcacgacgtacgtcacttccgctcgcgtccctctcggcctcagagcgacttcctgtgaacgcgcggcgcgcgccgtcaccctcctggctccgcccccgctccagccgcctaggcgtcgccctgcgtggagccccagcccgctccagccctagcaaccgccaagctgcccgttcatagcaaccgcctagttaacctgaacgcgcggccagagctcccagttgggtccacctccgaataaagaagcttcttcccaggccagtggcacaagcttaagtttgtcttctgaatttgtcttctaagtccttccaaaagttgccgaccacacagcagccaaatatccgttaggaggtgtcattctcttccttacaactccagtggcttatcatcactcttagaatgagaggtaggggaagggagaagggagaaacagacagagacagagattgattcaaactttttgccatccctacaggattctgtgatctggcccctgcctgcctatttatctaatctcatgtgtacgtccctccctctggttattctgacatttacactggatattctctctgcctgaatcactctttcccagaatctttgcatagctgtcattcaatcctaagctcaaatatcacctattggtaggcctgcaagaattagcaaatagaaatacaggacaccaaattaaattagaatttcagagaaaaaaaatgaatacttttctttagtacacctccaacagtgcctggaaaatacttagactaaaaaagtattcatcgtttgcctgaaattcaaatgtaactgtacgttctgtattttatctggtgacccttcctgctgtgagaactcattcctgtctaatttgtctaaatcagccacctttcaccctttcacagttattctgttacagtattctgttttatttatttcatggcatttatcactagttgaattttttttacaagtttattggctgcttcccccaaactagaatgtaagattcttaaaagcagggaccttgttaatttgttcactgctgtgtctttaagacttgaatagcatctgaaacaaaggactcaaaaaatattcattaagtgaaagaatgagtagatgggaatgtctcttgccttgaggatgaaggaaggcattaagacccagtgatttctgtttctactagccagaataaagtgtctagatgccagtgtttgaaccaagaagccctctctctttttacaatttattttttgtttgtttgtttttgtttttgttttttgagacggagtctcgctcttgttgcccaggctggagtgcagtggcccggtctcggttcactgcaacctccacctcccgggttcaagcaattctcctgcctcagcctcccaagtagctgagattacaggcgcatggtatcatgcccagctaatttttgtatttttagtagagacgggctttcaccacattggccaggctggtctcaaactcctgacctcaggtgatccacctgcctcagcctcccaaagtgctgggattacaagtgtgagccacctcgcctggtccctctctcttttttggtacctcaaattgtcagaaaatggccatctttgtaccctctggataggccaaagaagagatggttaggcaagaggaagggtggattcatgcagtgtagctcatttcataaaaacaaacaatttgttataaagtgaggtattctaattgagcaggggatgattgagtctttatttctctgagtttgaaacaaaccccaaaacattctctttagagcaaaagcaggccatgtcataggctagagctggaaataccttctgtccctcaagcttcgcttttattgccccaagggcaagtatcatgagattaaatgcagctctgctgggaaggccctgactgtgacctgtgttagggaagctctgagagctatttggaaaaaacttcatgatcagtgaagatgcccccttccaccccacactgtccctctgatccccaaaacaaggataccatagcctcctcccagagagaagattcagttaatgtgt

SEQ ID NO: 853 - DNA, 4001 bp, Homo sapiens
gtttgtttacttttatgactttttgtgcccttaaaggcagagcctgcatctgtaacttctatatcttggaaactgagaataatgagtaggatactgtatatattcctaatgtttgctgcaatcagcagtatcttctacgcttctaaagtgctacttttagatcagaatattacacaataacagcgtagctggggaaataaaaacagcctgaagtactaagaaaaagtaaggttaccgtggaagtaaaggttatccagtcacaaaacagtagtgagaactaccagtaaagagtgggttgctgtccagcatcagaactacagaatgctcagatacaactgccatagtttttcacatgaaaaagtggactcaagtcttattaaagaaccgttggtaaaggggaagtaaaacaaacaaacaaacaaacaaaaccaactccttcctttaatgtacaaaaggaaaattccaaccaattcacaaaccagttgggagcttaaaaagctacatgttaaaagctggatctgcacagcaaccctcttcccttcgtgcctgctctggagtagcagagtcagaaaacaaagttgatatccaccacagaactgtggggaagataagatcaatgaagagatatatctaaataataaggcttataggcagttagcaatcagaaaccgaaaggtcttgatagagagggaacagaagtttctccatgttccaaagaatattggtgtctcaatttgaaggaacccatatattctctttcaaaactggggtgtttatcttgctctgctgtgttatccctgttttgacctttctgcacaaatgaacactacatttaagccaaaattggacagtaatcaccaggatatgctaatatgcttttaaaatgaattctttcattttctcctaaagtagctaaaaactaatttagtggttaaaaacaacaagaaacaaacaaaaaccaaaccagttgccccaggtctgtgcaatcctgaaggctataaagctcccatctcataatttcttcatgaaaatcgtgggtgaccaacatctgccagccaaaaagacccgttaaaaccaagagaggaagagggggttggaggaaaaaaagacaagcgggagagaagctgggtggcgctggctgtcctccaaaatgatttgtggaaaaggtacaataatgactggaagacaagaacaggcaataaaaatgtctagaagttctaaattttcctgaagtgtttaaaactctattcccacatacaagccaagtgctctactcccaggaatataacagcagcatagggcggggtgcggagccacaggctatctcagggcgggtcaaacccgcaagtttctcaggtttgcccaaaaggtagctcgacatgccctcgctagagatggggagactccaattctcattcctcattctcgtgtccaggagctttctgaaggccccagggcctgatagaaagaaagagaaggaaaaagtggaaaggaaccaaaggaaccataatccgtagaaacttccaaaagcatgcacacacagacacacagcgatacactgttgtcctggaaaccaatccaaccaactaacccctcctcgggagcctaggggccagctcttttgggcaagggtggtgggccggaggaatagggactgggagaaaggggtactatttcgcgcggctccgctctgggcctcttttccctgggcgcctaccgagtagaggagcacgacagcgctgggactggttgggccaacggagaaataagagttagatgaactggaagactccatggtgcggctgccttcccgggcggggtctgggattctttgctaagccgtggtggtgctcctgctgggggcggttctttcgctcaggacggccctacttcgcctagggcggcggcaccctctgcagccgctacacaggatcccgggcgccgccatctcagccaggacggaagccgcgcagggccctgcagcgcatgcgcgcagtcgcggaacccggaagcgggggtgcagcgcggcagaatgagggttgattcctcggctgaccccacaatgtcgcaggagcaagggccggggtcctccacgcctcccagttctccgacacttcttgacgctctgctccagaacctttacgactttggtgagtgcggggtcccaggagcccacgtggagaacagatttgaggaacgtgggtctcctgtgttgcccgtcctgggttggcctctgctttgaggctaaaggttcttgcatgtcaagcacccttcgtcccacctggttccagtagcgaacacatttctccatcggaagtcacccctcgaccgggctctgctgagttattcatcaaaccttccaactcgtccccaagtgtggggaccatcctacttgcttgtaggaagcaccaaggctttccgatttaaaagtagcccgcttttccacgttttcttgagccctgggaagtcccctttccccatgccacccccaagacctgcctgaccctggtgcgatggtgtcatttcgctctggggcctcgggcctgttggataatacaccagcttcatccttgtgtgtccctctccagagacatcatagtccttggcgagttgtccttttcacgacttttttttttttaaacaagtgcgctgatcttttactctccgttctttgtcttgatgggggaaaaggaaaataaaagagcctattaaagtcgcatggcatgtcagtaggaagacagtgcctcatactctgaagagctttcccgggagaaggtgacaccctttgcacatgcaccaaagaaaatcattagatttcaggacaacacacatttcttaaatttacagcgtgatattttaaaagctatttttattttggaatgactgctcaaaattctaagttcacctaaacagtaggaataatagttaaaactgttgagaacttgccatatagcacatgcttttcgtgtatttgctcatttaattttcaacttcatgaaatagacactgtcataaatccatgattgcagatgtagaaacaagtactagaagttcatgaaacctgatgcaggttgtctgactggtaatttttgcagagcctgggttctgattctagccccagaccccatgcttgtattaactagcatttctgtgcccttggacatattggaggacagagaagacttagtctctgaccttgagaagtttaaaatctagaggaaaagactattctgcaaaataatatagttcatgtcaacacaggctggaaatcatggtaggagctctgaaggcattgaatgtgtctattcatttttatatccttaatgccaaagtttagttggctcttaaatgtttattgtataaaagattaagcaaatagtagcaagcataaatcagcagctggtaatttagagagctctgtggtatttgtaatacatgtgagtaaggatgcctaggattctggttagaactttcaggtgactggtcagagcttcaacaagtgaaatatagaaagaggaattaatagaaaacaaaggcattcaaattgagccagttgtcttaggttcatcttaattcctaactgtgaaagaaaataggaagactattccatgttcctgtaacccagaaagtgttaaaaagaaacagtggctgcagtgcctgatatttttagtataaagccaattgggattaccagccctggggactattgctgtgatgacactttgagtaggaaccaaagtggagactaaagtgattgtgctaataagggtcaaagacatagttacctaggaaaagatgactacattttggattctctgcattttgcaaatacacttatttgaaagaaaacaaatagtttatttctttgtgtgtgcttctaggtgcatatagccctggaatatgtacaaatacattcgtaggatttgatactgatgatagctaagactgaaaatatttattttccttcttgtgtttgaacaaacaggaggtacagaaggtga

SEQ ID NO: 854 - DNA, 4001 bp, Homo sapiens
tgcgatgttggctcactgcaacctccgcttcccaggttcaagtgattcttgtgcctcagcctcctgagtagttgggattacaggtgtgcgccaccatgtctggctaatttttgtatttttagtagagatggggtttcaccatgttggccaggctggtcttgaactcctgacctcaagtgatctgcctgcctgggcctcccaaagtgctaggattacaggcatgagccaccaggcccggccaaacctgctgattttttctgcataatctataaagaaggagtgaatatccaccattgtcactcctctttcacaaaatggatcccaagttaagtaagatggaacaacaaaaaattgtgagcatccagccccaaaatgcatataataatttgtatctaatttctataaacgttccatggtactacattataaaaaaacacaaaaaatagaaagtaaaaaagaatacgaaaaactaaatagaaatacatgttctatatttccttcccataccctaatgactcatttcatgtactcactttggagatcacaagtctagacgataacattcagaaaatcatgtgtagtaattccacagtcagtaaacttagcagctctagtcctagctagccatatcttgcaaatacacaaggagctgcaaacaaaaattactggcaagagagtgttgaaagattaacaaattttctcaatttaaaaaaaaaagtcaaagaacatgtcttttattctatgtactacggtcaaaagaaactgcactaaatcatttgtgataaagtttatagttagcatactttattttatataaatctagatatcagtttttaagataatatataacaaatattttaaatcagcaattatataaaggagtatctttttcaagatcaaaataatggtatttaagagttgctatgactggactcgtttctactcctctagcaatatttcccattgctcctaataagtagtgttgccagactttttctcaaaaatgtctcatgctttctttctgcttctgctcctctgtacttgctggggtcttcacccttttctcttcctctttacattctacccattctttaaaggccttgtgaaggcctttaagtgacctcctcttttctattacctatgtgtctcatggccactccctcagctgtttcacagagctttatttatactcacttcctttaaagtatttattatagtctttctcttggtatagctgtctctcaactgtaaacttcttaagaacagggatattgtcttcttgggtttatatattctccatagcaactagcactgtctttaacattgttattgctcgataaatttatattgattaaaatgaatactcagaagtgcatgtgaacatttaaaatagaaatacaaatgaagtgagctacaaaagtttttttgtacaagggtatatttcaaatataatttgttatgggaggtgggaagaaaagtgaaggaggaagagaaccatgaaataaattcttaagcgcactaagcctatctggcactgtgaatagggactatttcctaaaccaatccaagaaactttaaaccttcgcggggcagggggggagggggagagggggcggtttctttgagaaattagtttcatctgcacatttactagttaaaaatcctacttgaaagaaaacaaatggcccaaatgaatacaaacctttccctcccataaaataataattttaaaaaatagaggttttttttggtggggggaagggacgttaggaaatgtaattttctcgttgcttacctgatgttactcctgggttatggctggacgcaggctgtagcttgtgctgtattttagaaggacacctgttctccccaccccacccccgtcctagtaggtgaaaaacttagccacgcagagagcacaaacttcctgatccttcgatgcagagaaggaataacacatcagcttcctcaggatcactaggcaacctaccttggtgtttcttcattgcgccaatcagaaatcaccaaggttgagtcccgccaatcggagctcacagggggaggctctcccccagctattctgttgcgatccagacaaacaccaccaaaaggaggcaggtttgcgttcaacctgacagctggtcaatccaatgaaggaaccttggtggaagagaggaaagagggctgcgctccccacccccattaaaccagccaatcaaagcgctgagtgagctaacatgggctgccaatctcgaaaggtttctgtgggttaatttcagcgtagcaggtgtgttgctgtagtagcgtatactgggacaattaagtgagatgtgttgggatccaagcaatacagctaaaaataaataaatatttttacattggttgtttctgacagtcagtttatccttgacttgactgttccagaaaaacatgatctgggtcagtttgtgtacgtttatatggtttaccttaaacaggatgaatacatttctaccatcgcatatgtaccagcattccctatagcgcttattactgacaaacccatggatgtgtatgtttttggaatatggctgctgaaactacaagcggcaaacagaccaagttttaagtcttcctttttctaaagcaaagaaagcaggcaaggctggaactagctcccaggtttctcattaaaagcacagcatttttcatactaccactcaaaaattctagaaagtgtgctcaactcttcttgcaaagtaatagctaccgaaatcatctaaaaattagtattccctatccccccatcctcctaccagcctttcaaatgaatgaagccatatttcctgctacttaaataaaaattagaagcgataaaagggcctacgtactgaacaatattttatttatgctgcaaaaaatgccatactttaaaaatcagtctttttgtcctgtaaaaaaaagcatagtaaaggtaaagcaccaattcttaaattgtacattatatattaaaatgttaatacattatgtcaaaatattgaagaacattgttttaataacagcacaatgacaaaagagccagttaaatggtataattttaacataagtaaaaagtgaatccataccaaattttaataccaaagtaaacattactgtttagaaaaatggcattagagggccttaacagttagtatatatttaaaggaaatattaagtaggtaatgaacaaaatcaattttgaaattttacttattaccgaatcaattatgacatttgtacttttgcttttattcaaaagttctattggatttatctcaagattaaggaccacaatatgacagtcagccaaaaacttagttttagtgtacaaactgctttaaactacatatacatcttcagagttagggaaatataatatagggtccttcagtttaaatggtgagaagaactctgcaagcctgcagaacaaaaataatttttatatatgttcctttggttcactaaactttctcctttttggcactgactcttgactagaagaatcaaagtgatggaggacctgtcaaaagaaaacaactactaagaatagatactttcctgtttaaatgtctttaattgtagattttttcatgtatctgagatttctcttctttttaaaaaaatttatgcctagcatacctagcataactatatctgggtttcttaaaagtagagtaaaatttattattaacatcttccaatggctgctgaaagtatgtacttgcaaaatgtataatcttcagtagggctgctctagaagtgagaagatagatttaacattatgtcctcaaaatagccaaatatttcagagcaataagaagggaaaaaagattttaaaatgaactacaaatagaaaaacattctaccttggaatcatgtacgatttaaatcatgtcttgcttttgtactcttgagacgttaacatttgagttttaaaaatagtcttaggttttcagttgtttaattctaacctactaataata

SEQ ID NO: 855 - DNA, 4001 bp, Homo sapiens
ctcacccggatgtctaacagcacaaacagactcaacacatctaaagcccaattcctgcttccccccactcaacccttcccattgcacaggctaaaaaatatacaaggcattcttgactcctctttctctcacaccctatgtccaaaccgtcagcaaatcctcaacgctttcctcaaggcagatccagcatggaccacgccccgctaatctcctgctaacaccttggtctccaccttcacacactcaggactggcttccctggctgggcgcggtggctcacgcctgtaatcccagcactttgggaggctcaggcaggtggatcacttgagaagtcaggagttcgagaccaacctggtaaacgtggagaaaccccatctctactaaaaatacaaaaattagccaggtgtggtggtgggtgcccgtaaccccagctacttaggaggctgaggcaggagaatcgcttgaacccaggaggtggaggttgcagtgagcagagatcatgccactgtactccaacctgagcgacagagtgagactctgtctcaaaaaaaaaaaaaaaaaaaaagaactggcttccctgctgctgccttcatacctccacagtctattctcaacccagcacccagaatgatcttttaaacatagaaatagaacatatcacaccatagcacaaaaccaaggtcattaccatggtctataagtctccagtgtcctgacccctcagtgacatccctgacctaaactcctatgattctcccctcacctcactttgctccaggtatacccacctccttgttgttcttcaaacacaccaagtatgctaatgcctcagggcctttgcactgcctgtccctgcttcctgaacatttcccctccagagagctgcgtggctttgcttcctcacttcctatagatctctgaaaaaagatctgaataaaggctcaccttctcagtgaggcttccctgaccactctatataaaatagcgacccctcctacctcgaactccatagcctcctcttgttttattttcatctggaggacttatcatcttctgatatactatatacttctttctgttaattacctgtctcccctctctagaatgtaagcagggagtcagtttcatttaatgttggacactctatatccaacacagtgcttggcacacagcagagacaaatctgttgagtgaacaaaagaatgttgtcaccaattctcagatgaaaaaccaaggctcagaggctttaagtaactcacccaaatgaagcccacagagccacggttcttcccatggccccagacttgttccaagacctcctccctacctcttcccccaaaagaaggggaaggatgtttaggagtgagggtatggtggtttggtcaggggagtggagtttagttttttataagaagcccccagggccacaggagaccttgatggtgtggggaaagatgtctgaatgggcagaggcctcctgagtccacctttgtggcaacccagttctaagaacccgggatgggaaaggggtcagtgtgaatggggaacctgccaggccccctgggcaccagcctctagctacctgtgggccctgagcaactcccacccgctggagggtagggagccacaccccaccctgcctgctgccccagggtgccagcacagcatctcccagcccctggctccagaggtcacgcttgtagtgacagagagcccagctgggagagagagccagccggcagggagcctggcctggatagcccattgcagccccgctcatcccacttactctgccattcggtgatggagatcatgccgcactcagcctggggggctttccgggtggaagcgggcaagtggagcgtggcccagaggacgcagctggtacatggtcacgggaagctgacccttggttaagttgcgaaatgagcctgtggcaaatcattaactctccctccagcccccgctccacccccgcacaccacgcaggtgcttctactcgccagctccctcctcccgttttccggtagggcaatgccccgcccctccacctgccgcgcctgcccggggaaggcaccgcccacctgaccctttcctcgcacctcgcggtgttctgcggctctcgtctgctccgcgaaacttagattgtatgtggaagcattggaatctagggggtgctcaagtttcttgcttggtttgatagtgtgggaagagttggcatctgcgcatccctttgggaatgtactaaattcatcttgaaagtcaagctttttgctctctgctattgcacatgctaggcgctgggaggcgatgagcgactgagcacaaagcctgttgttgacctaatggcagagccagatcgggttaaatcaatggcaaaagcgccatgggggaagttagacgtgaaggtcttcgacctcctttccccaagcggcgtccaagctttggactgactgtgatgttgagctatggaagacaaagccctgaatttggggttggggcaggactgcacaatttaggaggcctggttctagtctacccaccagctgtgtagacatggattcgtcctttgggcctgcaaaaagagaggcagttagttcctaacatccttttttcccatcgcagagcagtggttctgacgtggcattgatgccaggagagccaacatccactttgcaatgtcttctgtgtccagaaatgaagaaatgaatttcaaagactacctatatacatcatttaaaaatgcaaataggcctggcatacaaaatgcattatgtctgtaatcccagcattttgggaggccaaggcaggaggattgcttgagcccaggagtttgagaccagcctgagcaacatagtgagaccttgtctctacaataataaaaataaaaaattagccggatgtggtggtacctgcctgtagtcccagctactggggaggctaaggtaggaggattgcttgagcccagaaggtcgaggctgcgatgagctgtgatcaagccatgcactccagcctgggtagcagagcgagatcctgtctcaaaaaaaaacaaaccaaacaacaacaacaaaaccaaggaaagctaacataattttttaaaaagaaacaaaaagataaattataataaaacatgatgtctttcaatatataaatgttcaggcaagacttaccagaagacataaatgaaataggcagattgcttgcacccacacataatatatgtttgaatttaagagaaatagaagatgagccattctatgcaaaaacaaaaatcacacacatgcaagaaaatgaaagagtagcaggaagtgaacatagaataaaaactgttagataaggaataacagaccagacgtacttgcatatgatgagagggaaagcatcttaattgaaatagggataacatagcaaggcaaattagagagcacaaggtggagataatatagaagtatgatgtgcatgcaaaggaactcagtcttaggtatgtgtgtattgtcaaaatagctcccatggaatggggtcgccatagagtaccacagacacatcaacctctgtcttgaaacatatcagcgttgaggtaaaattcagtctctgggatcttaaaaggccttagagatcacatatttccaatgggcaatgggggatagaggatggattgggaaaagaaaagaagataaaagtggtttagagcaattgcatgtggacacccgggacagtgttgtaaagacaggacacaacatttccacacataattatgacaacatagcatccttgggctccaaaaaaactaaacatataaaggatggcaataatatgaaataaaccctaaaaacttttattaaggaaactcagtgagatcttctgcatctcaagtgtctctgattccatgtttgcttctctcacatatcctctgttaaatattttcagtcaatttcttcgtttattcagtatcacctactgatcagaactgttttcaatcaaatacatagtagctgaaatct

SEQ ID NO: 856 - DNA, 4001 bp, Homo sapiens
aaaactatcagcttttcgagaaatgggattatttcaactcatatccctaatatccagcagtatctgggtttttttttttgaaacaaggtcttgctctgtcacccaggctgcactgcagtggcacgaacatagttcgctgcagcctcgacctcctgggctcaagcaatgctcccacctcagcctcccaagtcattgggattacggtcccatccaagccactgcaccagttcagtatttgggtattgtagatactcaatgtatcactgagtattgatactcaatgtgtcactgaatattgtagatactcaatgaatgctccctgaataataaatgaaacagaggttaaacaacttattctgtgcagcatttgggccaaatgttaagcattatataaaaactgatagtggcttggtgcagtggctcacgcctgtaatcccaacactctgggaggccaaggcgggcggataacaaggtcaggagttcgagaccagcctggtcaatatggtgaaacgctgtctctactaaaaaatacaaaaattagccgggcatggtggtgggcacctgtagtcccagcttcttgggaggctgaggcaggagaatcgcttgaacccgggaggtggaggttgcagtgggccaagatcatgccactgcactccaccctgggcaacagagggagactctgtcaaaaaaaaaaaaaaaaaaaaaaaaaaaaggcatcttattacccaggaaaactttactgtcataaatagatccaataatagaataagccgccttgtgttagatcactggcaatgttcaagcgaagcctgaatgtccacttatcagagtactagatgaaagcctgaactagagaactgaaaaataaaagttatttgtaactctaagcgtctaaggttagatttctctttcttcttttctttctttctctctctctctctttctttccagagacaaggtctcgctctgttgcccagaccggagtgcagtggcaagatcctagttcactgcagcctcagactcctgggctccagtgaccctctggcctcggcctcccgagtagctaggactacaaggcacttgccaccaccctcaacgactttttttctttttttttttttgtagagacggggtctcgatttgttacccaggctggtctcaaactcctggcctcaagcgatcctcccgccccagcctcccaaagtgctaggattagaggcgtgagccaccgcgcccgacctacagttagttttaaacctcccttctgtttctccaagacattaggggagattctccatcccctcaatcaactgatgtaattaaaactcagtaactaaagctcaataaaacatgaagatttcgttgattcctgtgagagatggtggtgaccttataagaaatagaatgggagtagccagggcagctcttttatttcacagataattactgagatcaaaaaaaggggaaaaaaagaaaaagaaagaaagaaaaagaaggaaagaaagacagctacttcagctccaggcacctcaaacacagcagtagctcgacagaatccacttttttgggaacccaagtcggaccagcagggtgaatgaatgccaatgtggaggcagccccggcacggccctctcctaggaaaacattttcaaaaggggtcctaaccgcgcttccacctcggtgcccagggctggctccagtccccattcccaactagacactggacttcacgcccttaacttccgccacgcacccagcgcccaccctcagacccgaccttctcaacctggacatcgttcgtccaggtgtcccagctcccacctgcctcttcccaccccaccacacacaaacctgtaccctcaccagccggcctgattccacggaaacggctttggcaccaccggaagtcagccaacaacagcgaattgcgtgcgcgtccccgagcctcggagcgccgcgccgcagtgcatcaaggagcatgcgcctaacactatgcgccatcccattttagggcagagtgaagccacaacgttagtgcgtcagttattggcaaaaaaatttaaaggcactacttagctttctctgcccatggagttatcctactcaaaactgaggttaagattcagtggtttagattaacagctaatttgggggccaggcgcggtggctcacgcctgtaatcccggcaccttgggagacggaggcgggcggattacctgaggtcgggagttcgagatcaccctggctaacatggtgaaaccccgtctctactaaatatacaaaattagctgggcgtggtggcgcacgcctgtaatcccagctactccggaggctgaggcaggagaatcgcttgaacccgggagacggaggtggcagtgagccggcatcgtgccactgcactccaacctgagcgacagtgagactctgtatcaaaaaaaaaaaaagattaacaactaatttttctcactacgagtcacctggaacacaggaccaagggactgaagaagtcataaaatgccagaaaaagaagtctctaaattacaaatagtgcaggctcctgattaaaactaaggcactcttggactcaggctatagtaattattcatatatgtacaatattctgcattttacaaaatgctctcacattttcttaggtgacttggtctccacaatagactgtaagattattatatcatattccagtttgcacaggacaaagttctggctcatctgagtaggtgatttcacaacggtacacagacagctatcaaggagaatcaggtattaagtctcctaactctagctaataatgcattgacccagtgtccaggaggctgcctggggtgtaacagatgttcaataattcaatacgtgctttttgaatgagcgaatgaatgaatgacttctaaaatgatgttatttccacttttctagaaaaacaatgtctggaatccacggagattaaaaaaataataaaaaacagaatgtcaaaaggtggaaaaatactttcaaccccctcattttacaggtaaaccaccaacacaaatttatacatttgaactaatcctatctgtaaacagaatccaacggatgaaattatccacagccaaaatgaaggttgaaatttatgcaaacatggcagtagtctgactaacctgaatcacaccaactctcccaaataccaaggaagactccagaagctcggagtttcatgtgtgttgttctttgacctacagaatacacagatctttcggtttggcctctctcatacgaaaccctaagcacttgaggttcatgaaaaaaattcaacactgattaactttggcacttttcattagttgtttttttttttttttttaaacagctttgcataccacaatatccatctgttttacgtgtacaaccaaatttttttttttttttttttttcagacggagtcttgttctgttgcccaggctggagtgcagtggcgcgatctcggttcactgcaacctccacctcctgggctcaagcgatcctcgtgtctcagcctcccaagtagcgtgtgccaccacgcccggctaatctttgtatttttagtagagatgggggtttcaccatgctggccaggctggtctcgaactcctgacctcaagtgatctgcccgccttggcctcccaaaggtttgggattacaggcatgagccaccgtgcccggctgtttttttaaaattagtaaatgttcagagttgtgcaaccatccccaggtttggtctttcatcagagtttctgaggtttaagacagtttccatccactgtgaaatataagccaaaaaaaaaagttctgtaataacctttagcggtctcagaaatgcataatgatggcagtcgatactgaaatccaggcagtacagaattttattttcccaaaattctggaactcaggaccgagaacattttgctgctgtattaaagcccagaaaactgaaatcagaggatttcatataataatctacctatgc

SEQ ID NO: 857 - DNA, 4001 bp, Homo sapiens
aaaactgaggttaagattcagtggtttagattaacagctaatttgggggccaggcgcggtggctcacgcctgtaatcccggcaccttgggagacggaggcgggcggattacctgaggtcgggagttcgagatcaccctggctaacatggtgaaaccccgtctctactaaatatacaaaattagctgggcgtggtggcgcacgcctgtaatcccagctactccggaggctgaggcaggagaatcgcttgaacccgggagacggaggtggcagtgagccggcatcgtgccactgcactccaacctgagcgacagtgagactctgtatcaaaaaaaaaaaaagattaacaactaatttttctcactacgagtcacctggaacacaggaccaagggactgaagaagtcataaaatgccagaaaaagaagtctctaaattacaaatagtgcaggctcctgattaaaactaaggcactcttggactcaggctatagtaattattcatatatgtacaatattctgcattttacaaaatgctctcacattttcttaggtgacttggtctccacaatagactgtaagattattatatcatattccagtttgcacaggacaaagttctggctcatctgagtaggtgatttcacaacggtacacagacagctatcaaggagaatcaggtattaagtctcctaactctagctaataatgcattgacccagtgtccaggaggctgcctggggtgtaacagatgttcaataattcaatacgtgctttttgaatgagcgaatgaatgaatgacttctaaaatgatgttatttccacttttctagaaaaacaatgtctggaatccacggagattaaaaaaataataaaaaacagaatgtcaaaaggtggaaaaatactttcaaccccctcattttacaggtaaaccaccaacacaaatttatacatttgaactaatcctatctgtaaacagaatccaacggatgaaattatccacagccaaaatgaaggttgaaatttatgcaaacatggcagtagtctgactaacctgaatcacaccaactctcccaaataccaaggaagactccagaagctcggagtttcatgtgtgttgttctttgacctacagaatacacagatctttcggtttggcctctctcatacgaaaccctaagcacttgaggttcatgaaaaaaattcaacactgattaactttggcacttttcattagttgtttttttttttttttttaaacagctttgcataccacaatatccatctgttttacgtgtacaaccaaatttttttttttttttttttttcagacggagtcttgttctgttgcccaggctggagtgcagtggcgcgatctcggttcactgcaacctccacctcctgggctcaagcgatcctcgtgtctcagcctcccaagtagcgtgtgccaccacgcccggctaatctttgtatttttagtagagatgggggtttcaccatgctggccaggctggtctcgaactcctgacctcaagtgatctgcccgccttggcctcccaaaggtttgggattacaggcatgagccaccgtgcccggctgtttttttaaaattagtaaatgttcagagttgtgcaaccatccccaggtttggtctttcatcagagtttctgaggtttaagacagtttccatccactgtgaaatataagccaaaaaaaaaagttctgtaataacctttagcggtctcagaaatgcataatgatggcagtcgatactgaaatccaggcagtacagaattttattttcccaaaattctggaactcaggaccgagaacattttgctgctgtattaaagcccagaaaactgaaatcagaggatttcatataataatctacctatgcttcttacccttcagtactttctcgttttggaaccacagcgcgtcagtgggcgcggcctcattctcgggaaaactcggcggtgggaggagtcccctccgggagagcttcctgaagggggcgagggctgacttccgtaatctttcggaagaggcggagtcttcttccgaggaccattcggaagaggcggagtcttcttccgaggaccattcggaagaaggcggagcctacctctcatcaggaccagtctgactgcacctgcatccttagctcagcgcatccccggagcatcttaagagctgagcgcagctgacaactaggggccggaccgtcgcaggaggcgtccgctggataccttcccccttccctgacctagagctctacagctgctgcctcggtactgaccgagggttcccagagctgtctcaccattgcaaaaacgttatagcaacagcctctgattacgacatggctgagatcaccaatatccgacctagctttggtaagtagactcgggaaaactaagcttgaggtggtcagaatggttgcaaggccaagggggcccagcggcagggcagagaatgcagcccagaccagagccttcaaaatgccagccccactaaaatcgggcctgtggtggtgggtagtgggtagtgggcagttgacagtgcatgaacttgagctatgggctgcagggactggcagggcctgagccacaccgagggtggggaagtccaggatgctaaaaccttgtatggtgcactgtcagcactgctggaggtgagaaacagcaagcgtgcggaggatgtgaacccctccttctgggggaggagaggtggggtaggccaagccctcccccttggggcacacagggcggtgccccttcctccccctcccattcctaagggctgcgggggagggaagtgacaagggggatggggcatcaagatggcagcttggagactgtgggccgtgtggctggcagccaggggaggcggcggcctctggggaaagaggggtgcggggtggggagcaaaaaggaagccactccttaagccggtcagctggatgctggggctaggaggaaacgtgagccctgcaagctccattccgcatcgtaatggtggggtccctccgatgctaccaaatggcgcttggcgctgctgggctgggggatgacgtgatgtctatttctgggcctcctggcagcgccgacgctctccttccggggcctttgttccctgtttccctgggccgccttttcaaaaagggggactgaccagcgttgatgctggcgggggcgcgatccaggccggagggggaggggcgaaagaggcccagcccgggggaggccgctttgtgtaccgcagaaagcattacgtcatttcagagcggctggtccccgacccagccctgtgggctccaagattagttttacactctctggagcagaaagtggagtggaaaatagggaagaaggtggcaaagacaagcttgagaaggaagttttttcctctttggggactcctgcagtatatgctaaaggagcaaacttcctgtgttatgctttcctgatcaaataaataaaatataattgccctgcttctccttgattcagtttagatgggggaagccagtgagagttgctgccaaagaaccttcttattccttcagggattctatccctcagacaatccagtaggtttgagcatcgggactccagtttttagggtggagacacaatccagctaggaaatggcttttctcattcctgaataagaggtacagtgaaatgagcagaatccagtgtgctctatcccctcagaataaggaagaagaaatcaaatcagatgtgttcagataactgatcttcacactcattaactacttgttctcacttattccacaaggctaaatcttgatggtattttttcttccacttcaccttccgcatctttattctttgagttctaagtttccaaaacaaaagtccctttcatgatcacatgagcaatccatgatttcttcctgttctttttcttcttattcccttccaacagattcctttctctaactgcagttccagaatccttgaaaaaaggagatgg

SEQ ID NO: 858 - DNA, 4001 bp, Homo sapiens
cttaatattataaacaagactattaacaactttcttgactatgttcctcaatgcccatacaggggtctccagagtactactgtccttatttttcctggcaaccaactccatcttcctaaattattcaataaatttttaaagatagagaacagctagaaatggctttaaaattaaagggccaaatcctctaattttacaaataaggaatccaaggagaaaagatttagaggaagagctggaagttctatatgccaatcactgtgtttagctacgggtatacaaggaggttaagatattttccgtcctcgaggtggtcacggactagcgatttggtttccacactacagtgggccttgaagttcaggtcctcaccatcctctatctacccccggttgcaaagatatttcaaaatatacttctacataatgaatatgttgtttaatttagatttttatattaagtcatctttaccctggaaaatgcgcctctgctaacacacaaactttgtgaaatcttcccaagctccatccaatccccggcagagtgaggttcctcttgtctctgaagcaagttcttgcaatatctactatcacataactttgtggtttgtctcctcatgagtctactggagtcagaccagaggccagggcacttgtaccctgtatatcaaagtatgtgaatggatgttgaaaacacaaagcaaaagaatttgagtatatcaagcaacacagagtcagttaactacatagcttagcctaacctttatgatagagtttttaaagtcccctggaccagtcaaaatgtccccagtcgatataatctacattggccctatcttactaatttacttcttttcccacttgtctgccctagattattctcatatttatgctaaaaatgcacaagctaccagagcaacatccaatttccccacaaacgctaacaaaaggtttacttcatttgctaccaaaataaagtatttgaattaaggtaccaagagtgatgtacacttcttacagaaattgtgtgtactaccacgataaccatacagatcactgcgaaatttcaaccacaagcaaagtgcaattaatattactaagttttccaccaacaatcagcaaacttaattccttccacaacaacaaaaaaattgtacaagcccattcaatgattactctataaagccagagagagaagcacaaggttagcttactccaaagtcagtaagactgtatgtatataaacatataaagtcttcacatctaccctctcaaagacccttttggtttgctgattctcaaaaattgggaagtactgcaaaaatcatctggcaaccagaagtgaatgcaacactccagatgaattgtgaaaagtaccgaatttttgcctttattcagacgcctgtgctccttttttccaaccatctgcttctataaattcatcacaattctaatacggtgtgcgcccctcctccttcccttaccctgaccctaaccttccaaccgttgattcctgcagcaatcttccctaagggagacaccccggctgtaggctcacttcctctcccaagtcccattcctttcacaagagtcaaatccctacagtggattcctggaccgttttttctaaaagaagatcccagtcctctggcttgcccctcccgtcgtgactcccagtaagtcctcctctgaaaccccctaatccagtccacgtacttacagcgccttccgctaacacaaacgtagccgcttccacgccccctttccccgccaaagctgcatccccgcctcttccccttaagacccaagaattaaaccactgtaaacccatcttgtaacctttagtctgctttagtctcctcagttcctcctcagagaatcctgcccaaccttgcgccatcggcccgggccaccggcacccccaaaagtgcccaaatctcgcagccgcgactgccaacactgctgcccagctcatccgggtttttccccggccgcggccaatcagtgcatcgggctccaaacacaaggccctctctccccggcctcagggtccggcttccttccaggctgccttcagcagtgcctgacaaactgcctaaggaaaccttgccacgcagacattcgtttcctctggcttacctctactctctctctctctcattgtttctcactgttgctggttaatcgcttcaggagctaaggggggaaatggcgatggggataagggtggagataaacaggtatttgggaaggagcaacaagtcggtggcggaaacgggagatctaagtgcctttggggtcctgtacctgtggggcgggagcggtgctctctgtggctcttagtgtgccctaaaatccttgtgttttgctgggagtgtgcacagcgctggaggcctccttcagattaactcaggaaatgatcagatttaggattttgatgatgaagaaacatttaaaaggggtggggtataattgatgaaaagggaacaggcataaccaggtctctcgcaggccggagcggctctcagatttcttttgctttgggttgtttcctttgtgaataattataatatgtaactttcctcttaagggatttctttttctttttttcttacttttttttttttttttttttgagacatagtttcgctcttgttgcacaagctggagtgcaatagcacgatctcggctcactgcaacctccgcctcccgggttcaagcgattctcccgcctcagcctcccgagtagctgggattacaggcgccggccaccacacccggctaattttctgtatttttagtagacacggggtttcaccatgttagccaggctggtctcgaactcctgaccttagggtatccgcccgcctcgggcttccaaagtgttgggattacaagcgtgagccactgcgcccggccgggatttcttagtctcccctttaaatctgtttttcagagaagacattgtaaaacgtcggtgctgggggatgggaaagcatttcttaggatcctgcctggaatcctaataccgtaattcgggttctgccttgaacactaacctgagatcccatttcctcatttgaaatatggttgcaaagattaaaagatgcaagcgttgtcaaaatacacatagataaggatgattcaagagagacctagttatactatttttcatggttctctttcactatttttgcagtaagaacaacaaaacacctcatcttggcttacattttaaaatactttggctttagtgtgttgatatttttaaacaaaatgaaagaaaggagtaaagtacaaaataaaacacgtcaagaaaagttgaaatgagtacttcagatttagtaagtgataaaaagtgaaggatgtttggaatttcccatgtaaatccgagcttttaaaacttaaagtggtttctgaaatttggggatgctgcagatgcgtcattttaaatatgtactcattttttataatattaaacaatcaaaatgcctggaggagacagttaccaccagtttctgaatatagactgaatatagactacgtatattcaagttatagattatctagctccaaagtagtagatggggatcagtggcaatctggtagttaattcagtttcctagttgcaggcaaccgccatctagttcatctaataacagtaaaccaccttgtgtgccccatgttgaattttatacataaatgttctttagttcactctgggggaatttcaaaaattatccgtaatcttaataaagatgtaaattaggatattttaaaaggttttgcattggcccttaatgagaaccaaagcgaaagtgacacgtggtaaaagataataaaatccgtctgtataaaagttataatttccagtttgctaggttctaaatctcctgtttgttgtttctgttggctctccctcatggtggctagtttcttcaaatgttgtgtaatatttaagtgggaatttatcttcaaagttctttgttctgcagaagtctt

SEQ ID NO: 859 - DNA, 4001 bp, Homo sapiens
aatgtcctgctccaggcaattcagagttacggccacttttccctccaagctgggtgagcatcttgttttaagatcgtttttctaagccaaaatttcttatttttattcatgcatgggtcgcagccagtctacaagtgtggggatatgtgttgggggttggggtggtgcaggcatggaggagcttctggcttaccaggagaagatgggagaatcactggcccagccagggaaggatgggtatttccttcagcctccctctctcaggccctggagcatcctccctgcctgaatctgatggctgagataggcccacttatgactaatcattccagactcctcacttctatggcacctgcacaaactatgtgctcagtaaagagttgtttggataaaggaatgagccaaccagtccatcttggtggatgatgaggggctttctgccttcagtcagatgaacttgagccagcctgagagaatgatcttacccagatcttcctccaaaccgtgtgatccagcccttccccagcagcaggctgcccttccctcgagagccccaaggccaggtgttgagagaaaagcatgtctagggcctgggagaaccagaatgagctgtaggccccgtggcccggggctttcctgtgtatgctaaaaagtgagctctaaaccagtctcctggtttccacttccccaggcttggtgctcctgagtttcctggtatagctcttctcctccccgttgcagctggatcctggaagccctcaacagtgtctgaattgcaaggtgatggccaaatacactaaaccaaagatattcctaaactttgccaaaccctgcgtctctcaacttccttctctccattctatttccttccaatgcccagcaaaatggttggtaccttaatgccaagactttcattctaacccttagacactccataggtccccacagaacactgtgctattaagcacttgatgtggattcaaccatatactcatgaatgtctgattttgttctgggaggtttccctcccagagggaaatgctcagagtcccagaattttcaatgaccagggtcccagaagtggcaaggagctttggcctttggaaaagacccatctagtttgttgtttgtttttagggtttgaatcttctcttgctctgtgaatgatacgggataagttgcattgtctcttctgcctcagtttcctgtctctttctctggttttaacacaaacgttaatatactagataatgaacatatctagatccacacatcctggattttctaggacaactccgatttcaaatactttgtccacattgtcaaatcctgtgtctgatcctataatctaatttgggataagaaaatatggtcttgagagtactttgaattcttcatttcagcagtgggctagaatgttatttactaatatgtaaataaaaaccattctgattctgggcactggtccggaatgtgtaattctggcccagcaggaacgcagctgtgttgctggaggcccttcctgggaaggctctgacagagcctctccttcagccctaggtccccatgtctcacccacccctgggcactggagagaaaaggggcctactcacctgcacagagtgtccacaacacaggccacatcttccccaccatggtcttgcttcttctctgccctaaacctaacctgtcactggcagcctccagacaggtctgagctgtctggttaaagctacagcagcttctggcctggcccaactggaggtccctgcaattttccctcttctcacccacctctgcccagcctcagctggattggcaggtgagctcctcagctggattggcaggtgagctggggctgggctcatgtgtcacctactccaaaggtcccaagaggagtcttccctacttccctcaagttccccttaaaccagccacctcccctgccttctccctacttaacaagtgtacaaagtcctagactgctcacaaaggggtaggcctctcttataactgacaggaaataaataataaaaagggaaatgcactcagaggtagggttccaagctagtaaaagaagggtgttgcccatatttgctgaaacacttcaagacacaatgtgatctgtttctctacttctctcctcttctacagcctccaccccacagtgcgcaagagatatagtcatgaagaaaacaggaagtctcccccttcagagtttatattctgactgggaaagtagcaagttcataagtgaaagaagatcatcttggggacatgtgaccaacttgtctcacttttcctaggactgtcctggttttcaaaccaaaaggaaccccctcagtcccaagcaaatttggatgatggtcaccctactgaaagaatgatcagtggtgtgggaccataattctccaggagcagtggctgttgctggtttcttccatagatattttagatatatatacactgttctgcaatgatttattcatttttcatttaatgaaaggttttagaaagctttctgtatcggtatgtatagcaccaccaccatcatctttttaaaatggggatgatatttcactgtatatgagtgacatgatttatttaaccaaactacttttaagattgtttttcctcatctttcacaactatgaaaagattgcaaccaatatctattatgtgtacgatatttcacacgtgttgtgattatacatgtaagataaattcttaaaagtaaaatttctgactcactgaaagttatgcatatttgtaatttttatagatattgctaaactagctaccatgagaattttacagcctacactcctattagcagcatataaggatacctatctccccacacactcactaacacagttaccaagtgtttatgacacagttatcaaactttctgctcatcgccaatctaagtgaacatgatatcccatgtatatataatttactttttaaaattattagtgaaatttggccaggcgcggtggctcacgcctgtaatcacagcactttgagaggccaaggtgggctgatcacgaggtcaagagatcgaggccatcctggctaacacggtgaaaccccgcctctactaaaaatacaaaacattagccaggtgtggtggtgtgcgcctgtaatcccagctacttgggaggctgaggcaggagaatggtgaactcgggaggcagagcttgcagtgagccaagatggtgccactgcactccagcctgggcgacagagcaagactctgtctcaaaaaaaaaaattattagtgaaattgaaaatcttttaatatagttgcacatcatatatattttcttttctgagactaggtagctcatttgcccgtatttctttttttaataaatttttaaaaatatagacacagaatctcgctacgttgaccaggctggtcttgaattcctgggctcaagcaatcctgcctcagtctcccaaaatgctgggattacaggcatgagccaccacgtccagccgtttggccatatttctattgagctgttgatctttagcttgttgacttctagcagatctttgtatattagggaaaggaacttttggatgtgataagcattgcaaatatttcccctagcatttctttgtgttatgaattcatagtatcctacatgacttattgttattaatccttttgactgctaggtttggttgacatacaaaatttgttgttttctgtttattacatttcactcaggcaccttgttaattctcttattatatgtaataattgttcagccccaacattttataatatctttgccaaattagtcttcctaattacttgtctgcttgggtcctatcactgactctgcagaacctaacaaattagcttttaaggtattctagcatttgttctcaaacacagtctaccttccagaatacgtaatttatgctctgaccaagttagacatattttcatacccagaactcatacttccttacccccaaaactt

SEQ ID NO: 860 - DNA, 4001 bp, Homo sapiens
gcagtattcccagtgggactggaatttattactgggatcaaacatacttatatagtaaatatctgttcaattaatgaagaagaaaattccattaagaaatctggaatttttacattccagatagtcatacagatagtcatacagatagactagaaaataaagatccagttttctggaacatattcattctgacagaacaggaatgactttagaatttcattcaaaaatactaagtgctaccactttgttatactctggtgccataagaaatggtgagttgtatgacaagcgagcctttaaagagaattgaaggaggtttctctcagtacctaaccatgattttaaaggtaaaagaagttgagagaatcaatcacattctgatgtagtcacctaccctacaaatcaatagcaccctaggaagagcagaccaatctacataggacattttgtctccctgacttaaccaagataatgaacagtgaaacattaagacaggtatccttgagagggaactgtggggtgatggacaaatccattatcttgttttgtgtggtgtttacataagtatatgcaattgccaaaactaataaaattaagcctgtaaaaattgtgcatttcattctatgctagttataccattaaaaactggttcatttaaaaaatgctccctacttttctcactggaaaatgtaataatttacaaatagtataatcaaatctatattcactataaaattaactacaggatgatcaggtccaactagaaatattttggataaggtattcttttaacttttcagtgataggtgatggaaaagcaattatctgagatcacagactactagaattcctcatgttctaatttttgcagaatctaggaatgaacacgcaccatttagccacatttctttcacctgttggtcagaactttatgtttgaggattttcaatgggaaattgcttgtttgtgtcactggttgtcttatgttatgtttggaggaaaagggcttgggagaaaaacaggacagataatacagagtgttcaactagaaatccccaaatcaggattctagctctaggattaaaatgtacagggcaactttggacacggtacttgaattttctgtgcttgtgatattctgctatcacaaggctgtcataggataaagtgtattaatttgtggaaatactttgaaaagtcaaagcaatatattattctaacatgataccatagacatagtcaagccccaaacttaatcctgacagttataggttcttggaaagcccccatacatatctcactttaacttgaatagaatgttcaagagggtggaaacaggtaggttaccctctctctttaaaaaagggggtgagagggtgatgtgttttccacgattgaacttccagaactctagatttctggaatttatcttccaaaagacttggtataatctggtaaatattgaaagaggagtggggaataaggcccggattaagataaattcttcctgtccctagtgttgtcaacaatcaatgaggagatgaattgctcctggagtacaggaagcttgacttctaaaatattgttaaacaagcaatcagaaaacatttactgtattctttcacaaatctttggcacacacccaagagctccctcaaactgcgtgcatcccaggaatgagtgagagcaaggcctagatgtcttcagatcatccatcacagctccctcccgcctccattccaggtccagcggagcggcctcgggcaatcacacccttccctgacctccccctccccagggccgccagcctcaccagctgttcccggctgctggagctccgatcggttggcgcccggcggccccgaacattaacgacacccgggagcctggcctcgaagctcaggcccgtgaacagactccaactacaacagcaccggcgacttccaaagagcagttcagcattttgagatgagcttccggaagccgacaggcggcggaaaccggatgcccggagcaaccattagttctccgcgtttactgctttccccttcctataatcccctcttcctactcgcagtagagacagagacaaataaattaaacttttgtgctacacagaaatttcttaattctctttttagtgctcttaaagtcaaagcagcatgagagaaaagaggagtgaacaaaaagtcgaaccccgggagtgagctatggtttagcccagttaccatggagaccggtagtaacaccagttgtaaacccaaggccaagagaccatggccacgttagcccggctgcaagctaggtcgtcgactgtaggaaatcagtactactttaggaacaggtaagtcaggaagagaaggatcgcgtaaagggcgggcgtgactttataccagttgttcctcagcgggagtttccaattaacgatttaacgattaccctaattcattaagtagtacccaattcttcccttaatgggctgcaaacataattgggagtttctgttaccatacaacgaaattctaaatagagaggggccgtagatattcagtgtgagatgatttaaggaaactcccagcatagataaaattgtaaagtgctttttttcttcgacatcaccactctgcaatttgatgaaacctatgttcaataccctgactgggggtcaccctgactcactagcccaatgaactcagattgtgtcccatctacctagggatttgagcctccgttattttacaaacatcactaaactcaattgttctatgactcattcgcctttttaaaatgaacgtatctgccgggtgtggtggctcacgcctgtaatcccagcactttgggaggccgaggggggcgaatcacctgaggccaggagttctagaccaaccaggacaacatggtgaaaccccgtctctattaaaaatacaaaaactagccgggcatggtggcacatgcctgtcatcccagctagtccggaggctgaggcaggagaatcgcttgaacctgggaggcagaggttgcagtgacccgacattgtaccactgcactccagcctgggtgacaaattaagaccctgtctcaataaataaataaataaatataaataaaataaaataaaatgaaagtgtctaaaccattctgacacggtaactagtaccaatatattaattaatagataacgggtaagaaaaccactagcagtcttcttcatctccctacagccaaacttcttgcccaggaagagtttcattttaaagaagcattgccccaggagtttttgtaacttaaaagaaactgcaaaaaagtgaattagactattatggaatacagtgacatgacagaccaatggaaaatatgtcaatgagatagggtcttgctgagctgcttttattctaacgtttatctcacctactacatcattatttcacaacgtacctctcttacagcactgatcacaattcaattttacattcttttatgagataatatctatctcccctcttaaactagtagcagagacagtgtctcttattttgctcaccattatttttgtctccaacgtctatgatagccccatacaaataatagtaacacaataattgttgaagactcacattaatgaatttttcaataaatctgtagccctggtttaagtaaacatactaacaatagctaaacatagaaattatctatttatttagagtatgtggcaggtgctgtatttatgacatatataaatgaaataagccccatccatcatgatgttcacatccttgtatggaatataggcttttaaaaaataattacaatactagctgggctcagtggctcatgcctgtaatcccagcactttgggaggcagaggcagatggatcacttgagggcagaagttccagaccagactggccaacatggcaaaaccctgtctctcctaaaattacaaaaatcagccaggcatggtggtgcacgcctgtagtcccagctactctggaagctgaggc

SEQ ID NO: 861 - DNA, 4001 bp, Homo sapiens
catgcctggctgatttttgtatttctagtacagacagggttacgccatgttgtccaggctggtcctggcctcaagtgatatctacccacctgatgaccttttgattctcggctgtcaccaactcccacctcctgcatgtcttcatacgatgtgttccagccacaccaaacaatttttctcctaatttcttttttttcttctttttttttttttgagatggggtctcgttctgtcacccaggctggagtacagtggcgcgatcttgactcattgcaacctccacctcctgggctcaagtgatccccccacctcaacctcacaagtagctgggactacaggcatgcgccaccacaaccggctaatttgtatttttggtagagacagggtttcaccatgttgcccaggctggtatggaactcctgagctcaagagatccacccacctgtgcctcccaaagtgctgggattacaggcacgagccattgcaacccagcccacaatgaacaatttaacatgccctgaaagtttttcacgggctttcaaagctgtgtctttgcaaacgccatttaccctgaaacccagaaacaccattctctcctattaactcctatttatttttcaagacccagatggaaagccacatttcatgatccatctaggaagttagtttctcccttctctgtcatctcacagcacttggtgataaacagtataggctctggaacagatgcctaggtttgttgtagctctgacactaactaactctgtaacctcaggcaagtcacataacttcggcttccctcagtttcttcacctatgaaatgggagaaacaacagctcctatctcataggactgttgagaggggtaagaaaacaaaaggcttagaacagcgcctactaaatacagagtgctcagtgaatgctaacaattagaatgacatctctgtggcaataacctttttccaaatgtcttcctttgtggattctgagcacacactatgtccaactgttctctgcatacccagctagtcacactaggtctagcaatgtaagcatttgttgaatgtgtgaactggagggctctgcactgtcctgtttccccatcaaactgatttcccatgaaagtgggagctgtccagagaaaagattgtctcttcatttgtatcttactgaaaggactgggtaggaagcacagagagagcaggagagaaagacagtaaaagggttagagactggatttccttttttctttctgtgttagtgcaaaatcaaccccttggatagagaaagggtctcaaaagggacctaacaaaatgaaggctcttccgaataagcctctccggtttatttttctccatgtattggactaactccctgcaagttgagcctgaagctctgtctagaatatgaactaaactcatagagtcctaaccagaggcctgacttatcctcaccactcctctgaaaaggtgcctctgttccaggcccgtaggcccagtctattaactttctcactcttacctgatgcctccgtaggtagccgaagtctgcggatgagacagcgacccggtagccaagtcccgtgagaatccagccaccggcggcccgagtacatgcgaataagcctctgagcttgagccaacccccttaccgagatgacgcagcagcaggtgcgggtctggattggagtagagtctcgagtggagagaggccggacatcggtggccgaagtctgagagagaagctggccctcagcggctgggtcggtaggaattagggcagagttaggagcggcctgcggaggggcccgctcaggccgatgccggtagtggaaacagaggaagccaccgccgcgctcttctcggaactggctaaaatagctccgtaaatgggccgagcgcaacacggaggggataccgctcactaccaggtaaactgtcgcctcctcctccgcctcgccgggcaccgccatcttggattgtcacatgatcagctagaaccaagtctcgcgagaacaccgcgagcaacgttccagcccctgcgttgcgagattgtgaaaattctaactagtcctttgggattggggttgtggaacctggagctggaagatccgaagtcttctgtgttcctttcccacagagggaagccggcgatgatggaaaaactcacctggaaaatggggtcatagagttctttcataaagctctcatgaggaccaaataagaagcctgcgggaggggtcatttttgaggtatttagttgtggatattgcacacctaatctcaaccttcctcagttctgaacctttagtcgttcttccatttatttttccaaaatgtgttgatgaactcccacaaatcggtaagaaaaagataacccggtagaaaaatgggccgaagatacttcgcaaaagaggaaacacgcaggtccaatttacaatgaaagtgctatgagttactagaggcttacgttaaagaaaagatgcacaactcaataataaaagaaatgcagcgagacccactttgcatccactatgttggcaaactttaaaaccttagagtcgatgacaacatggtggaactgaagctctcatacactgttggtggaaatgtaagttgatacaaccactttgggaaacaattggcgttatctagtaaaagcaaagctacacatcatttgactcagcacttgtaggtaatattttatttatttttgagttggggtctcgctctgtcgcccaggctggagtgctgggaccacagatgcaacccactatgcctggctaattttttaaactatttgtagagatggggtctcactgcattgcccaggctggtattgaactccagggctcaagtgatccactggcctcagcctcccaaagtgttaggattacaggtgtgagccacggtccccgcctttttgtctttttttttttttttttttttttttgagatggagcctcgctctgtcatccaggctggagtgcaatggtgcgatctcggctcactgcaacctccgcctcccgggttcaagcaattctcctgtctcagcctcccgagtagctgggactacaggtgcgtgccaccacgcccggctaatttttgtatttttagtagagacggggtttcaccatattggtcaggctggtctcgaactcctgacctcaggtgatccacccgccttggcctcccaaagtgctgagattacagatgtaagccaccgcacccggccctctttgtacgttttttaattgggttatttgattactattgattcattgattcataattcagacaaagtctacacattatactgggtgataggaggaacctgtagattgagagacctcaaacaaaagcaaaaaataaagggccaagctcagtggttcacgcctgtaatcccagcactttggcaagctggtgtaggaggatcccttgagcttagaagtttgagaccagcctggccaagttggcaagacccttgtctaaacaataaaaaaaatgactgcacatgtttatcagaagacttattgataatgttgacttttacccaagccctgtgatcctggaaaactaaggcttaagaaatgccttcccactgttttgtgttctggaacacagcatattgcaaaaaaacatccttccccaagtgagttaggtaagactggtgtatgcccctctggttcaccaatgacaaagccagacacagactccatattccaaatctcctcatgaaagctttgaggaacttcttgtccccactgatcagttggaacaaactttggttaaaacttctctccttcccccagcttcccgaactttggcttaccctcagcttgagccagcgcacatctcctccttaacagcctctcctgagaataggctggcttcaaggtaaagcattatctgatctactgtcccatcatgccactcctgatcatcccacttcctcccacccagttctgccctgtttactcctctgtatgagagaagaaccctt

SEQ ID NO: 862 - DNA, 4001 bp, Homo sapiens
gtctttggggagctccctatctggctacagaaagagcatatagagaagtcaaggaggaatggtgtcaattctgatacctaagtttatggtgtgctcaccacatgccaggatgtgctaagactttacaaagattatttcatttaatcttcccagcccattcagggaaatattagcctattttacaaatgagtaaagtaaggcctaaaaaggttaagtgacttcaaggtcacacaggtaacatgtagaattcaagcccaggcagcttgtctgcagaatctgtactgtaccactacatagtatctcccaaaatatattaccttgtaaacacaaagctaatgaggtgcttattaacctgagtcataagataatggtactcggtagagaccagatcctgtacttatgcttcagcatttacactgtcctcttggtgtgggggctacacacttctcccacaccactgcagtatttcagtctggctggagttccccttttgaaagtgtccaacttaggaagggcactcctattgagcacttaatgcataacaggtggattacacatattgccacactgtcatattaactcagtcaatcttttttttttttttttttttgagacagggttgctctgtcgcccaggctggatggagtggagtgcagtggcacgatcatggctcattgcagcctcaaacttccaggctcaagcaatcctcccacctcagcctcccaagtagctaggaccacaggcacatgccaccacgcctggctaatttttgtatttttttttgtacagacagggttttgccatgttgcccaggctggtctctaactcctgggctcaagcgatctgcctacctctgctttccaaaatgctgggattacaggcgtgagccactatgtgtgggcttaactcatttaatcttgatagtcctgtgagatagatattattcttattttacaaatgaagaaaacaaggcctgggtttcttgcctaaggttacatggctagtaaatgatggagctggaattacatgatggaggtggaatgagcccaagtcgcctgactccaaagtggtcctctgtctttcttttttttttcttttttgatacggagtctcactctgtcacccagtctggagtacagtggtgcgatcttggctcactgcaacctccacctcccagcttcaagcgattctcctgtctcagcctccgagtagctgggactacaaggctcatgccaccatgcccggctaatttttgtatttttagtagagatagggtttccccatattggccaggggctggtctcgaactcctgacctctggtgatccacctgactcgacctaccaaagtgctgggattacaggcgtgagccaaggcacccggccaaaaactgatgttcttcatcactacactcttcagtctcttacagctctttgtgctttctcctgtaagaccacacacagcctaacccttgtcgcaataattgaaaactacatgccctggaagttaagagaccggctttattccgccactccagagcacgtaacgcggcgccagaactcaagaatacattcagtcgttatttgttgaactgaatggcatagttaggaatggctttaccggattttcagtggataactgggtagaagctgtgcgccccagtctttctgaaacctgtgatcacacttcgggcactgtcccctctacagtcaatctgtgttttcagaagtggccccaggttcactcgtcttacagcagtcctaaagagccggctgccctttccctaggcttccttgctcttgagggctaaattccagccctcctaccccagtgccacttgggtaaaaatactctgctcctctcacgtttgctaataagcccgggctccgactaccaccgttcgggggaagggagccccttaccgtcattgctgggtccgctccgcggaaacatgtgccggacctgacttgtgcgccgccatcttcccggaaatgccgttttgttccttctaggctgtcgaaaccatagagacgtccgcgggaaccaaaatcacggtttttccaggagaaaccattgcggagcccaatttgccggtatggttgccatagaaactgggacctggagcgtgcccattttcggaggttccgaggctgttccacttgcctcatccctgcaatccttgagcagccaagggacttcagtactaactggccctctcaggatgccaagaacggctccgcgtcctacactgagctagtcccgggcgcaaatacgaggaaggaaaactccagggaagcattgagagtagcctgagaaattcgtggaggcagagtaggtgatagctgtgtcctgatttttcagggttgaatactcatgaatactcagccttcacaggaacagttatttatgaaagcctagagactagacatctcaataggttcatcaagcactttttttttttttctgagacagggtctcgctctgttgcccagacttgagggcagtggcgcgatatcgactcactcactgtaacctccgcctcctgggctcaagtgatcctcccatctcagcctcgtgagtatctggtaccacagtcatgcaccgccacgcctggctaatttctgtattttttttgtagagaaggggtcttgccatgttgtacaggctggtctccaatccctggccttaagtgatatgcacacctcggcttcccaaagtgttgggattacaggcgtaagccaccgtgaccggcctcatcaaacactttttgactcaccattgtgtgccagaacttgtccctttggtactgggggataaaaagacgcataagacacaggtcttgatttaggggaacacccagtctagcctgggaaacttgggaccttgagtgggattagatggaggacatgccagtgggacttggagaaagatacaggatgggtgagacgcggtggctcatgcctgtaatcccagcactttgggaggccaagacaggcagatagcttgagcccagaagttcaagaccagcctgggcaaaatggcgagacaccgactaaaaataccaaaaaaaaaaaaaaaaaaaaaaaaaagccgggcatggtggtgcacgcctgtgggtcccagctactgaggtgggaggatcccttcagcccgctgtgggagtgaggggagggcggaggttgcagtgagccagaaaaaaaaaaagcaggatcccagaatgcatgccaggctgaggagtttggacttgccctgtcggtatgaggatgtattgagcaaaggagggaaagaagatacagcaaaagggactgcacatgcccctacccctgcaagctgttccttggcctcactgagccacccaagaactaaaacccgagaaaagtatccttttctgcctccccatatcggtatttccgttgacttagcgccccctagaaacttccaaacagaaaaatcgccatttcacaggagagccttgtcataattgccctgtatgtcatacccattcatccccataattttttccataaaattaattttactttcaaaacatgctacatggggacaatactttaaacgatcgatcttaattactggaattttagacacttgcagaagggatgtgggatgcttcaaaggcattccttagagatggattcaacagagaaacattttgtggagagacatctgactccttttcccattctgccactcattgtgtgaccttgaacaattttttttttttttgagatggggtttccctgtgtttcccaggctggccttggactcctgggctcaaatgatcctcctgcctcagcctcccaagtagctgggagtacgggtgcatgccactgtgccggggcaaacttgagtttcgctgcagtgtcctgcagccactgagaaaattccacagacagggcttcaatttccacccacccccacctctccatctcttctaccccttctatctaaaatatatgtgtgtgtgtattatatacaaaattg

SEQ ID NO: 863 - DNA, 4001 bp, Homo sapiens
ccagaatcaactgaatgtttatattaacatgtacaaaccactgagtacccccccaaaaaatcaatatctcactccagtttagtagttaacagtgacaaaacacaaagcaactagcttgtaatttctattaaaaactttaaatatttttcctgtaaaaccaccaaaataatttaacaacaacaacaaaaaatcctaggggtattaacaaaaaccaacttttgtatttgaaaaaacgtcaaaaggtacattgaaaactgactccctaggaaagatgagtttattttactattaatttcaaagttctcattcacaattagcatttcactcttttatcttttaaatagatacaggcttcagcacctttccaaatattgaaatttattggttttggtttccaatctatgactttttgtttaaacttctggatctatcgattaaaaaaaaaaagcaaacaaaagacagtctcttgttcaaaagggcacgacaatcaggtactccatacctaaagtatgttttcacttgttaaaatgtcttacactattctagtaaatatctcaaacttaatagcaccctaatttcctttcaaatattggataaaaaagaccttagaaaagatcagcagtctactaaattacaaatataagtctaatgaggagtgactaccaatcactttacttttggataagatttacacaagaacacgacttactactaaactaaaacatgaaccactattattaactgtatttttctggtaagcaataaatgtcaatgttaaaaatatttcaacaaatatgacaagccaacttcagagcacgaagttggcagataaaattgacaccacagcacaatttcaaaactataagcaactattaaacacacacaccaccgcaccgcacccattcttatgtaaacttttggaatagtcaactttgtgagcctcacctttgttttcacccagcataaggagagttaaaggtgagacaccaactgcaaaaaaccaaaatatcaaaagattcagttaatgtccccacaggggaaaggactaaaatctttaaacgttaatgtatttaagtaatcgaagggcagggcacttccccaagctacagccattttggattcagactgtctttcgaatttcacgggttggggagaactagatttaaaacaacagaaaaaaaataacacttaaaacatttcaggatcgaccagctttccctgcccctccaaggaaaggaggttggtagatatcggatagactcaatctaagcgaaaacacctcgctaccacagagaaccggaaagctgggggttaaaacttttttcccctcagatatccaacatttgacttacactttttcctccttaggttttcctttgaaggaaaacaaaagcccttagctctcatttcaagaaggaaagaaaaaaacccgtaagccaagtcactcaacgagcaccaagccggatcgcctggagaggagccaaagagccgcaggtgagcgttccgacccgacgaccgaagttaaagtaggagcgctttcgcggagccccggcgacgctcgcgtgcaaagctccatgcacgggggaggcgggggtgccgcatccgaaccacttgacccgtgggctccgctcgcccctctcgggtcggacctatacccaaccacctgtgtgagagcttctttcaactagttttaacagcccgttggttaggcaccgggcggagccccgcgccagaacgactccaggatctcctactgccccgtttcccaaactcccactcaccgggcagcggcggagctatggccagggactagacgctgcgtctgaggacgcgtccccagcttgtcgacccggcagaggcggctagtccacaaccataacaaagctcttcccaaaatggctgcccggcccacaaggtccaggaggggcagagcgggtggaggaggaggagcgaccagcagcacggccctcccatcccccgtccgaccccgccttacacacgcccacctgaagaagcgcatgcgcaagggactgctccggcgaccctcccggacgccagttccctacgctgccaacgttcggcctccagaacggcggttatgccctgccccgcccccggctcccttcttcgccgcttgaggcggcgcatggtcacctctgccccctacagaattgaatcctctgcctttcctcgtgccgcctgaggcacggacaagcctagtttagtacgccccttctaacccccttgcccacttccagggcctgggcgcgtatgaatgagtgggtgggtatgcatgtgtgtatcccttttttcttcaccctcccacagcccgccccttggccagtgcgcgtcccgaaactacctctacaaggacttgcaaaccggtttcggaggaacgtgtgttttccggccctttcccaccttccgctccttacttctcgtgtgcgcgtcgttgagactccagtccccagcgggccacacggcctggccccggaggctgcgcggctgcgtcggccgcgctacccgctgggagtagtagttcccctggagcgcaggcgtcactcccccgcccaagcgaagggcgggattccggcgagagcctgcgcttgcgacagtgccgtttctcctacctgaagtctcattgggtatcgcactactggaaggggcggcgctgccatgacagagaaggcaataaaactgaaggcctagctcgactaaaagcgcttactattaaggaagacttcgctgtggctccatccggcacggaaagctaaaccgtgtaatggctggcaaccaggaagctagactacctagaatccggaggattggagggactggccggcgtgggcccctgagatctcctactacatgtcttcagttttatccatagacacggaagggcactaaaattgcctggtgccatttcctgtgaaacaagtctagataagagaagggacttgcccaaggtcacatagccgagaaataaagccgagggcagtaggagaaatgatctgactttccgaaccacccccaagcctagggcccttatcaccacacctttcatggaagtgaaaatcctgctcttgtgctctttaacccttaatgaagtttataggtcccagcaaagaaaatggatgtaagaactgggcttttttccccctctaaatgatagtaaagggccctaatgcagtgagatgtgtccccataggccttataaaccctgttttgcaaagtaaaacataagtcccacagatggcaagcaattcaggtcacactgggcctaaaatcccgtctcttaccttccttcaccaccatcattctgagattgtttcagtacttgcactctacttacccgaactctgtgggcagattctgctgcctgggagccctggaatagaacttcaaggaccgttcaacatctggattcaactagaaattaagaatggcccccaaacagaaagccgggcctaggaaccaattagcgcaggtcaagtccctacccggactcattttttttcagccctcaggaagtaggggcctctctgaatccacttgccggaagtgcctttccagtggacctgggctgttgttgcggttgttttccttctctccgtgcaacgctggcaagtctcaaagtcgccacaggtgcaggttgggatgggaggcaccaagggttggtagtaaatttgcgacgttgggatgggagggcaccaagggttggtagtaaattggagacgcgggcactctcgggcagggtttcccgaagacactggcgtctaaaccccgccttcctttctcagaggtcagtttgaagctggcagtttgcagtcttcccaccagggcaatgggaatattgagctttttcatttatattaggaggattaagctttgagtctcagtccttaatcccgcatcacctgccgtccctggactttttaggttatcactttttaatacccactagttggaaagcacgtgccacagaggaaagggagtttcca

SEQ ID NO: 864 - DNA, 4001 bp, Homo sapiens
ggcttgtgtcttgatcttggacttaccagcctccagaactgtgagaaataaatatttattggctaagccatctggtctatggtatttttgtgatggcagcacaaactgactaagacaaggcctttattcctactagtgcctctgcatagaacagtcctcccttggctggctccttctcaccattcatgtctcagctcagatgccactgcttcagagcagaagtgagaaactgaggtccagagagatgaactgacttacccagaccacacgatgattcagtggcagatccagaatttaaactcatgcctgttttactccaaagctcactcacttcactcccaaatattcactgtcgtatcactttaattcctttgtaacacctaacaccatctgtagctctcttgtctccaaaatctacaacggtaactagcacagagtggcacaaaataaatgggcaggagttagaacctgcctgtggctactatcaccagaccacgcaaggcaccagaggcagctaccttcagctgagatgtctgcttcattctagcccagctgctgccctgctcttcgcctggaacagaagctcttacccagcttcccataatgctcaatgaggtccatcttggaaaggaggttgatgtggggcagttccacgtgcagcatggtggccagggaggtacacagtactgaaatgaacttggcagggtctgtgcagtagtgagaatccacgaggtggacggcagtcagctgggagggaatagacagggtgagagtggcctggagaaacagggatcagcattccctcatgagaatgagggcttgaggacagaggggaagctttccccattagtctcctgcctctgtttctttctaataaccaccctggtttccttctcccaggaaataggagtcattttttttttcttacaagaggtcttgcactgagcctcccagtgggcaaggggtttaaatcccatggcatctgactccactctttcatttacttttgcccaccaatttacaacaatctccatgccactttcgacattaaccccttccatacttccaaaatcgccaagttggctactaacacattttacacgtgaggaaactgaggttcagagtgatgaactgacttatcaacaccacacagccagtcagtagcagagccagattctgaactcatgcctgttttactccaaagcgacccagcccctacctccctgtgtgacatgggggcgtggcgtctgtcctccctgtctcagttactccatccgcaaaatgggcctccccgccctgagacgcaccctgaggtcccactgcgccatttgggagaagatgctgcgcaaggcgccgtgatgcgtgcagagctccacctggcctgggcagtcgaagaggaagtagtggccgcggagggggtcgagcttggcacgcagccagtccaggttggcttccaggtactccatgcagtagagcaggccgccgttgggccccaggcgcagcgcgtccatcacgtcgcccagccccaccagctcgcccacgtccacggcacactcgtacggcagcccctcgttggccgggtccaggttcaccaccgccacgcgccggcccagcgcgcgcaggaactcactcatgcccaggcagtacgtggtcttccctgagcccggcgggccgatcaccgcctgcccgaaggccgtggtcggagcggcccctgccattggcggcccgcggcccggagcaggtcaactcacagggaaaacggggcaggtagccgcgccggagacgagactgagggcgagggtcccagtacgtatacctcgttggcggccagcgtcactcgcctcaggcggaacagctgagaccgtgtcgcgcaaaaggagataacaggccgatactaactagactaactcgacttccggacagcgtcggaaacggcgagccaacgagaggaagtcccgccctcacggcggggacgaagctagacgccgaggggcgggcggcgcagccgcatttctctcgcgggtagtgggtcgaatgtggggtctttgcgggaaaatcgctctcggaatttctctaaccttcagactcgaattagaaaagtaagggagctccagtagtaaacgtctttattcttccgtgacgtcgcacacccaagccacctcccgcggactctccgctggcagtcccacccagtgagggtagaggcggtggagggcccacccaaggccggctcttccaagcaccacaaatcctctcctcgcccaggtccctttccccctttctggccttcgtggggacaccttcagagtccccaaggaaggctgtgctgatagcctcactcaacccagcttttcaaagttctgcaggaggcaaagggcaagcccagagattagggttagagaccaaagacaagcggtcgttacccctaatatccaaggggaggggacgggagggggctttttgtaaaaatgcccctgaggtatagaaccggcaggcaggcaggctcggaacaaaacaccctgaaccagccacgaagactgctgctcccagactcctttctgcttcagtggtagatgaggccagggcagagggttttcatcatgtagctatgaaaggaagcccccaacccggtcagtcaggcaatgaggggctgtctgaagcacaactggaacccctcacaaaggccatgtctgtccgaaacttcatgctggtgggtggctggcggcggagcagtgactccgtctggtcttggggtagaggctcatcatagatggtggagatgagccccaagccatttctacggggcctcttcagttgcccaaatggctgtagcttctctccatggtacctggataaaaacgggctctcagtgagaaggctgctctcaaactccagttaaaggggttgggagaggacggggaagtagttactacatatctggtttgtccaaagacagaggctttaaatctgggtctttgttctccagccctcttatctatccattgacagtgccagcaagaaggggcctcatataaaattttcattctgtcactacagacttcctaatagtaaccatcaagtccaaactcctccaacaaagggtatgaatgatcttgttaagccttagggcttactctttaaaaaaaaaaaaaaagtcagatttactttatttatttatttatttctgagatggggtctcactatgtcacccaggctggattgtaatggcgtgatctcggctcactgcaacctccacctcctgggttcaagcgattctcctgcctcagcctccagagtagctgggactacaggcgcatgccaccatgcccagctaattttttttttttgtgacagagtcttgctctgtcacccaggctagagtgcagtggcgccatcttggctcactgcaacctctgcctcctgggttcaagcgattttcctgcctcagcctcctgagtagctgggattacaggcacccactaccgtgcccagctaattttttgtatttttagtagacacagggtttcaccatcttgatcaggctggtctgaaactcctgacctcgtgatccacccgcctcagcctcccaaagtgctaggattacaggcatgagccactgcgcccggctaatttttgtatttttagtagagacggggatttcaccatgttggccaggctggtctctaactcctgacctcaaatgatctgcccacctgggcctcccaaagtgttgggattacaggcgtgagctaccacgcccggactttttatttttctaacagagacagtctcatatgttgcccggctggtttcaaactgggctcaaggaatcctaccacttcagcctcccaaagcgctaggattacaggcttgagccaccgtgcctggcccagatccactttttcctcttaactgttttgaatttcatcccgcacgagtacccagcagccatgccaaaaccagtgggaagagggaaaccagggcatagctgaaaggcttgg

SEQ ID NO: 865 - DNA, 4001 bp, Homo sapiens
atcacatatgctattttttagccaaaagtacttcttccatattttcagtcagtggcttccactgtaccagagcaatccttttcctactttgttttttttgtttgtttgttcgtttgtttttttgagacaggatctagctctgtcacccaggctggagtgcagtggttcaatctctgctcactgcaacctccgcctcccgggctccgcctcccacctcagcctcctgagtagctggaactacaggcgggcactaccacacccagctaatttttgtacattttgtagagaggaagtttcgccatgttgcccaggccggtctcaaactcagggacacaagcgatcctcccgcctccgcctccacaatgctgggatgacaggcatgcgccaccgcatacggcctctttctttttttaaataagtgactttttctcaaaaaaaaaaaaaaagacacttaaaaggaatgagatgcctgcttgcacagggtttctgcccatccgacagttctgaaattaccctcaccaggtgacaccgttgacgccttccccttcggcagagtcctagtgaaaatggacatcttagtgcttggaaagctaatgggaatcagagatgatgatgacgatgatgacggcggcaccgcgttattaaacctttgtgcaacgctatacaaagtatttgcaaagtgctcaacaattactgcactttcattaagtcaaccatcagcagtaaagcagcagccaagttaattcacatactctcccattagcttatttaataatatgccccataaagtgatttttgtgtggctgtaaaagagccccagtcagcttttatggccttttcttggggcctctcagatgagctcagacagtaactctgatgagcggcagcagctcggagctgggtgttaccccagcctgctgtttagcaatccggtggaatgagttagtaagccgcagttctgtagagctcctaagccggaggttcaaaacatctcatcaaaaccaacatggtctcaccctgccaacgctcaaaacagcagtgtcaggcccaaatctggaggccaacgtgcagaagacctttccaggccgggagttaggtgcctggggaggcagggcaaattctagagttcaggcctcccttgggggcacaccttccatccgtactaactggcgtgtgcaggcgctgctgcttcgcgctgcgcacggagaagcgccccgaatccaccgcacgatgcggagccaggggcagcgagtgagcggcggcctccagccctcccctgccttctccttgccccttttgggaatggcagggggtttcctatgacaaatgcccgcaaacaggacagggttcggacgaccccagagccggcgccttctccctacactctcagccctagggccggacccgcccccgcggctgccatcgcccctgcctcgggcgccccgcggggaccaccccgccaggtgagcgcctccaggagcctctctgaaactcacctgcgtgaagtacaagttcatcagcgtgagggtgaaaaactgcaggcacacagggaagcagtagagcagccagaagacgaaggggctgagcgaattggccgccacgaagtctttgaagtagaaggagaagaggacggtccgcagggaggcccagaagaggcagagaaagaggaagacgctctggtagctgagccgcttgtggcggtaacgcagcaccagccagagctgcacgtagatgaacacgaagagcagcgcgtagaacacggtgtagacgacggtgaggccaagcttcacgtaggggggcacggccggggtcagcgtgggcggcagcgagtcgttgcgggctgggtcccacggcggggtctccatcgggccgggggcgctgccgcgcggccggggacgctcgggcctcatcggggctcacggccgccgccgcccccgcgggggtctccgcgcatcgcgctcagcctgcagccccgagactggaggaaagaaaacaagccgcacttcctcccccggcaccacatgattcactgggacggcctttgtctgcgattggcagcgccgcgcccgccgcccccgcgcgccgaccggccccgcgcgcccccgccccggcccgcgcgcccccgccccggcccgcgcgccccggcccgccctcccccgggcaccgcgcgccttcgccccgcgaaccccggcccgccctatcctcgccaccgcgcgctcccgcagtgcgcgcccccagagccgcacgcctcctcccggccccctccccatccccggggccgcgcgctcccagactgcgggcccccagagccccgcgtctcttccccccttcccgccccctccccatcccaggggccgcgcgctacccgtccccggccccttccccatccccggggccgcgcgctcccgcactgcgcgcccccagaaccgcgcgcctcctccccggtcccggcaccgcgccgcgcgcccccaaaacttcccagccgcgccccgcgcctcgggggatcgcactcgtggcctcgcgcattctgctgctgattgcttgttttgcagaagttaattcctttatttaaaaacaaatttaaaaaaaaaactttacaagtcctttccgtccccccctttaaaaataaaactttacgactctgtggctatgaactggccggcgtctggaatgatgtttatttctaaatgcagacatgccaaagacagggttcgtatttttgaggtcaaatttgtatactgagtgaggaaatagacggtgcctgcggctgctgcctcctctgggatgcaagctgggctgttttctcccggagagcctcacgcgctcccagcgcctcacctcccagcgatgtagccggtgccgggaggcgcgcgggccgcgggtcagtggatggagcccactgggcttcagagagaagtggggcagctgacggcacacggccccccttgtccgatccaacccatgccgaaggagggtctgtccccgccacccgagagcccttctcttttgcttttgctgagcagctcgctcctcgaggctgtacagcgacttagtctttgccccggggcaccacgccacccttgtcttgggagagctggggagtgctctgggaaaagagggaaagccgggcgccctctggaaacattgctgggcaagcggttctggtaaacagaagaaactcggatttccgaggctccagtaattgtgatttcttttcttactccacttcgtgcctaattgtgtgttctttttccaaaagacggcctggcatatccagaatccaccctagcttttgctcagaattacttagtggttacagcgctcccagcgtattccaggtggttcactggggccaagtgtgcctttggcgtggagctccttttccagtttttctatcctttccctctctccctatcgctatttcaagaggaaatacggaattgggctccacgcctctgatctcgttcccctcaatccccgttctgaacagcgcaagtggaatgatggaatgatcgctctaaagaacacctggccactttactcccgtgcttaaatgcccttcccttgctcctcatagttctggggttagagtctaaactcctaccctagcttacctccctgccttatctcttccaaggtgttaagcagtgttaacacctcctgactcccctagactaagaaaattctgccctttcctccaacagctggtccttcctagctatccatgagggtgtaacttcctgcagagagcctctccagaactctccacccaccaaactctcaggattaggctaggtgtttcacctgtgtgcttccctaatatccttgcctgattgttagtttcccccgcaacacacttatttatgtgtccttatgatagaaactaggcttgtttaccagtctctcccctggcacattggaaaagcatccgtatacattttattacactgaaggaatattgtttgtcaacagaggtccagactctgatatttctccctcca

SEQ ID NO: 866 - DNA, 4001 bp, Homo sapiens
gaaggcagggtgcagtggctcatgcctgtaatcctagcactcggggaggccaaggtgagtggatggcttgagcccgggagttcgagaccagcttgggcaacatggggaaaacccatctgtacaacaaataaaaaaattggccaggcgtagtggtgtgagcctatagtcccagctacttggaaggctgaggtgtgaggatcacctgagcctggggaggtcaaggatacagtgagccatgattgtgccactgcactctagcctgagcaacagagtgagaccctgtcttaaaaagaaaaaggctctaggtctgtgggcaggggcacgtgcatcctcttgcacacgggcatgctcctccagtgagtgcccccacaattcatccccattgtaaagtttgtccagcagaagcagggagaggtaaagctgtttgcccggccagcacttgcctgagccaggatccaaactccacttgcctgacaccaaagtcctggcctctcaaaccctaaaatgttggggaaaagggcattttttttttttttgtccctagagctgaggtctttctgagcctcaggtctgcagggcaggtctcaccgtccccacactgcagatgggaacacttcaggcagaagctcagggcaacacggagagaatagtgtcagggctgggtttggggccaggcactcctgggcactgtagtcttggcatgggagaggaacgtcctgggggacagggcgtggacaccgggttccaagtgcagagtgacagaggactggttgtgtgggaacaaagtgtccctctggctctgggtcagtgaccacagatccacggattgcaccctttctgttcattcttcatagaatggagcggccactagggccagaccccaggctgggctccccacagtgccgacgggacccagtctcctgctgggaagtgtctcctgcagggcacttaaagccctgtcttctgctgggaagtttctcctgcagggcacttaaagcattccgcagcatctcaggacccggcttcccacttccccgcccactgcagggccaactgcaggtgcaactagcctgggacccacccgggccatgaggcctccctccgcaagacatgcgggcggggccggggcgtgacgtcacagctccgggccaatgaggccgcgcggccccgaggccccattgcgcaacaaagagaacccagaacttgaaaggattccccgggctctggctgcgccccggcttccgcccccacgccggtctccgcccgcgctgcagccgatgtgttccacggggcccggcctggccgtcgcccagggagggacgcgcagcgcgaggcctggacatctccggcacgccccccccagcccccgcccctacagtcccaaccccctggggctccgatccccccccccccccgcaatccccgctccgactcgcgtgctctcgcctgctggtccccagtgggtgccccgagtcctgccccaccccgagggcgcgtccgagcgacaggctgggaaacctggcgggactgcggcccccggacccctctgggttgcgccgagcaggggcgggctcaggatccccagaccgcgccccgcccccgtcccctgagaagcccagggggcggcgctgctaggccccgatgcagggggacggagggaggggctggccccagggaagttaccccgaaggtccccaagttgggggggtgccagcgctaagcgccgctcgtgggccctcggacggaccccgcgaccgatagggcgcggaaagccccctcccttcccgccgagtcctcccgccggggtcctcccgtccgtccgccctcgggccagggcggcgacgctcaccctgcattcgagcgcccggggctccggctcgctgctcccgcctccggctccggctgcggttcccgcgcccccgggccgagcgcaggccgccgagggccgcgggggtggctggcggcggagcggcccgcgggccggggcatgctggcggcggccaccggcggccggcgcgctccgctaggtgggctcggccccgccgcccctccctcccctaggcgccgccgccgccgccgcgcttcgctcagctcccgccgctccgctgctgcgccgggcggccgggggcggggggcggagcagggcgcatgtctccgccggggcctccgcaccgcccctcggcccgccccgcccccgcccgctcagaggcgcggccgtctgtcggtctgtcagcccgtccgtccttccgtcagtccgtccgtacgcagcccacccgtgtccccgcgtccgcccgcggccggcccgagcctccctgggctggtggcgcctcctgacagcgccgcgcccctggctcccagctcggctcggtgcacactccggacgccgccttcggacgccggggcaagacccaggcccggagctctgggggcccgggggccagagggagctggggcaggaatggacactgagaacctggggccagggctggggctcagggagaccttcctggaggaagccgcatctaagatgaacaatcggggcggggcgtggagaggacaagggacgcatggccagcggcttctaggaaccgggaatccagtctgaagcaggggcagcgaggggcaaggttgggccagttacggattcacgctgctccccgggcctggggggtccactgagggaataaagtgcacgggccaccgggctgccgagtggtccccgccacccccacaggctcagaaattgttctctctgaaactctgagcaccaccgcccagccgggagaggccagggtctgcagcccagcgcctgaagccttctcctactcccctcctcccctcctcccattcttcccgcccctccgcccctccctcccaagccctcatgctatcaccactcctcatagagcacaggctgtcacccacagactgacagcctcagctggccccatgcaggcggaaagcctcctgcttcttgatgggggccctggagaggacgcctcctgaggatcgtgcctgtcttttctagaaagcacctgaccacacacacaatgggcacaaggcctctggggctgcctggcatagtgtccttccgtgcctctgggacacatccatgactaggcacccctgtgtctggaggaaactaggcacccgaccaggaggagacccaaaccaattgcagccaaaacggatgcttggagcttgcccagtccgggcagggctgctccacagcctgcacctgcctaaaccgtccccacaccccaggtccctgagcagcttttagggggcccaggatgggtcttagggtccgtcccatgagacaaaaagaggagtgtctgtagagaaaggccccgcaataacgtgtggggctgagcaagggggaatctggggccatgcacacctatactccctgtggtttctcgggcagccagggccctcagtgtccccagtgagccctctgtggacaggttggctccccctccaggtggtcctggttataaataggccaccagcagtgggaggctggcacagggcagctgtaatcaagggtggtgtttctaagtgtctcgcctgtgactcggggtgaaacggtagaaacgccacacttaattacatggccaccgagagccatgccgcttagaaacaccacggttaagattgcacacacagccatggagagccatgcctctgtctgggcctggctcccctctgccagcccagctgacccactgcctggaccagtgcctctgcccggcctcagctggctctagggcaggtgggagatggcctctgatggccgccccggggccctggcttatttcgtgctgtgctgggttctgctgcaaagtgcccggtgcccctgggaggcggttttcaggtgcctggtttgcccaaagccacacggatgagtggctgagccaggactgaactagggagtctgatgcggggcccaacttcaagtgaagggtgtgggtgctttggggaactggtcccctcagtga

SEQ ID NO: 867 - DNA, 4001 bp, Homo sapiens
actgggcctacttctttatcaaagaagcccttcctgaacaacacagaaacccccctagagggtccgtaatgagaaccgaacagaaaaacccccaactcaggtttgctgggcaatccttcttttccacagaagctggaccaggttctgttaccattaaaaaaatactgtattcaatatttttaaagacaagaagggaaagagaacaggttcttgcaaagagaggtacagcctcgactccttccaagtacacacgatctcccgtgtactcggggcccacacccagccagccatcacgggacccagacagggtcagatgggatgctgccgggaaggcaaggcaaggcagggccctattccatctgcagcatctgagcctcggtttggatgatgtgttgcaaagattttttacttgtacagctgagaagcaggtcacttagtttctcaaggaccagccggcctcagtgcacaactgaaggtcaagcgactcttacagccctgtagccttgccgtgtgacacccaggtgacctgtctctgccaaagtgctgactgtgctcgcagtccttggaatgcacttaagtttttaatagaaaggacctataattagggcagtatctgatgctctgatctgggagaaggagaaaaggaaaacagcccctaggattcctgccctcagttcagcacagcacaggacgccatgagattttcaaaacctgacattccccagggaagggccgaccctcttcagcgaggcttacttgaaagacgcttgaatcgcaaagtaaggtcttggcttttccccactctcagagagactccaggaggactccgagactcccagaccagccctccgcccctgccctcaatctcagaattgctgaactctggaaagtcaagatcatctagaacagaaatacaaggggctggggcctgaggctagaaacgaccaaagacagaataaaaagcacagtcctttgtaaactgtacagcagagacacggcagctcgggagtggcggagtgcaccaagctcactgtggcttggggtggggtggtggcgtgggactggcagttgccggctctccagcccgggacagttacctaactcgtctcccagcctgtttccccatgggcagcagagacagccaggacacagtgaagcaggtcacaaggggctcagagtgtcctccccagccccgtccaaggaaacagggcccggctctgggggcgaactctgtccccactaccccaaggggctgtgccctggggcaggcacagcggggctccttcgggagggagcgaatctcgggcaaggctggcctcctcccgctggcccaggacagcctcgggggcgccagcaggcactgcttgctgtgggtagggggtgtccaacctagacgcggcctctgggagggcaagaccgggaggggtcggcctgtgtcgggggctcctggaaaagcagcgccaccgccacccacctgacgacatggaaggcccaaagcaggcgatctgtgcgaggcccgcgcgcggcgcggacgatgctgaggtacaagtagagcgcaatggccacggtccagaagaaggagctggtgttggcgaaggtggacagcgcgccctgcagcacgcagtcccacgacgggcccgcgaagttctgcagcactccgtagaagtaggaggcggccgagagcaggtcggccagcgacaggaagagcagcaggcgccgtgcccggctgcgcaggtcgggccacagggcgtgcgtggccaccagcaggcccgagccgagcgcggagagtgcgcacgacagcagcaccacggcgcgctccgacggcaccagctcggtgggcggcggggacggctgcatggcgtggggggccaggagccggagcgccgcgaggacagaagccgggccgcgcgtgcggccacgccgccgccgtctgggcaccgaggcgccctaggctcgcgtccaggcgcccgccccgcccgcgtccggccgctcccccgcccatctgggccccgggccctgaaccccgtccacgccctgcgccccgcccctatatcccgggccctgagccccgcccacgcgccgcgccccaccccggtaccccggcctttaagccccgcctacactcccagccccgtcccgccgtcccaggccctgagccccgcccacaatccgagccccggacacacgtcccccggcccacatgcccttcccgcccacacgccccccccccgcccgtgtgcccccgcgttgagactgggacttagagctccgcccacgcgccccgatcccctgtccacagggcccagagacctgggcctagagcctaacccacgcgccccgctccgcccacgcaccccgccacacccctgtgttccgggccctgaccctggctcaggtgcccttcctcgtcccgttgccccgggccctgagccccgcccccgccacgcccctgaggcttccaagctccacccggtgcccgaggctcctgagccccgcccacgccctcacaccacgcccctaagcccctaggtccctaagccctacctcagggcacccccaggtcccagcacctgtccctccacgctcctccaggcccacccctgctcttgccaggtgtctgggacatccagtcctgtgagaggaagggctggcatttttagggctaatattactttccctcttttcagccagcttctgtgtgtgttgtgagtggaagggcgtgaggatcagaggcattctttccactagcaacagaaacagctctcgggtatgatcctcattccttcagccgtgatcccgacgtgttcacaagttggtggtgacttggggaagccggcgtttccaccttttcttaaaataagcatgctattttttaaaaaccatagctaactaggtgtgatttttaaaaaatgaaatgctaggcagggcatggctttttctttaaaaatttcaaactttgtaattaagatgtaattcacataccataaaattggccctcttaaccgaacaattcagtagtatgttcacaagtttgtgcaaccatcattattatgtaattctacaacattgtcattactcccaaaaagaaatccttatccctcagctgttagccctcagttctccccgacagccctggcaaccactcttctaccgtggatttgcttattctgcacatttcctgtaaatagactcatatgctctgtggcctttatgtctgacttttttaacttagcacgtttccaaggttcatcgtagcatatgcagtgcttcattccttttactgccccgtaatattccattatatggatataccaccttttttttttttttctagagacggagtctccctctgtcgcccaggctggagagccgtggcatgatctcggctcactgcaacctctgcctcccggcttcaagcagttctcctgcctcagcctcccgagtagctgggactacaggcacacgccgccacgcccggctaatttcttttctattttagtagaggtggggtttcaccgtgttgcccaggctggtcttgaactcctgagctcaggcaatctgcctgccttggcctcccaaagtgctaggattacaggcatgagctaccgcgctcggcaggatataccacattttacttagctattattcatcagccgatggacatttgggttgttaacactttttaactattaagaataataccactatgaaaatttgcatacaagtttttttgtgggtgtatgttttcaattctcctatgtgtatacctaggaatggagttgctgggccatacgcaactttatatttcaccttgtgaggaactgccaaggtgttttccaaagtgactgtacatatcattttacatttgcactagcaatgaaggtcgcaatttctctacattcttccaaaacttttttttgagacaaggtcttgtcgccgaggctggagtgcaggtacaaccacagctcactgcagtctcaaattcctaggcttaagaattc

SEQ ID NO: 868 - DNA, 4001 bp, Homo sapiens
agtcaatccctcctccaaactccaggtagcactgatagctatctctagttctgttgatgttttttgttcttatagaaaaacagcaagaagacaccatttctcccctgctgtcatgctttactgcatctcagaatgacagtcagtgcttcccaaggtctcacacagaagacgcaagcagcctgcacacataatttggttaaactgcacgcacattaaaaaaaatgttttgaatcagttgctatctttaaaaatatatgaagcttgttttccgtaaaaatttacagtttcccccaaaactaagatcaggcaaccatgtgctggagccccaccgcacctgcagctgcccccttactggagacaggcttagcagcacacagctcccacccagccctcctgtccacccgcctcctgcactcaggcttcctgactggtccctgctggcagtggagtttacaccacagaactgtacctcctcttgctgacatttaggtcagttccagttcagcccattctgtcttcctcggaacccaaacagagagctcgcagccctctgaccacacagtgctccttcacctctcagaggacgcacagtgcaccaggctgcaacacaaagagaacggttcggatatcgttgcggccttggattagttccaaaatgtcaagcgggcctcttaatgaggggtctctattcttgatgttatggcagtggagctacagggcagggagaagccctgagttaaagaactcacctgtgtgccatcaggaaaccacgtgaaaagcactaccaaggcaaaagatctgagttcaatctgggctgcttacctagctgggcaagaatgcttcatctctcctgagcctcagtttcctcacctatcaaatgggctagtagagcttcacaaggttgttgtgtgaatgaaaaagtgtacatgaaagtgcttgtaagcacctgacaagtataaaataagacgggtgtggaggaggaccggaagagaggtgctctgaaagaagtaacagaaatgggtgccatgcattccagttacagttgaagagcctctgtctctatgacctgaggtccctcccacctcctctttctgccctgagggcctgaaaaatgcctctcttcacttgctcccagtggctgcagtaaaatagattataagggaaaaccgcctattccccgaagcagtagctctccagaactcatctggaggtccaggtcactaggggagaagaagccaggctgaatccacgcctggctccacggaggagccacaaggatggccatcctcccccagcccctaggacgctgagacaggctcaccggaggttatcggtgtctccattggacaatcaaggaactgaggttctttccctccaaaaccacacacctcctcacggcttcaccgggaggtggatcaaatgacctgctctatgaaagcactttgcaaaagggatgaaagtacaataacaagcaaaaatagcctccaagatgtgatataaagcgatgccaatgcgcagctatgtggttactggtgagcagacctccgggaagcacaggacacaccccacttacccaacagacgttctcatcccatatgcctttgtccaaaggttgcacgggggttaagcttggcccagaaggcgccgagggctggtcgagttctcccctttccaagaaccagccgaatctccctcccgcagatctgaggggcagagccgcccatccggcggcgccgggccacttctgggcgcgccacccgccgcccgcccaggctcggggagacagcgccctgagtcccggctgggagaaggctgctcacctggtcctcacggattccagccgaggggcgtgaccgcttctccccacaccctttgccctgagcgggacgtggagtctcttggccccagggggcgcggcccgcatcggcagagtcccgggcacgcacctacgccctcccatccagcggactgtttaggggcttcgggcggcgccggagaaacggggcgggctgcacccagcagaatggggtgggcctctcagaagccccaggccgcaggggaggggcgcgcccccaacatcttcccacaaagagctccagctctccaaagcaaggcgcagtgcgggcggaggacagccctgacctccgagaggggcgcggggagaaagggagcgccgtgggggcggggacccttcccggcccgcgccctgagccctcagcctcgcacaatgagtttagcctggctccatccggaccgccctctccgcccgggcccgcgcccgcgccccacgccgggtgctcaccgaggagcggccgccgcggcagctcaggccccggcccagccgcctccccgcctcggccaccgccgccgccgcttccttcctccccgccgcgctccgggactggaggtttcgggtttcagcccaccgagccccgcttcgctcctcccgcgggccagccaccagcacgcggacccgggcgggcgcaggccaagtaactttgcggcgcccgcgccccgccccgccccccccacgcccggccgggcccctccggcccccggagccccgagccgcctccccgcgccccgcactgccccgccccgcccagctcccggcgcccctccccacccgcgccccttccttcgcgtccgtccgcccgccctcccggctgcttctttcccatttcttcccacgaacagcctcggctgctgctctttgtctcgcccttaccctctcggctcgccccacttttctcctgaaaacctttgtggtgcctaactcaggccttccctgttcccgttcctccgccccagttccagccgctgggacgtcgccttttccatgtctctctccatcacacagacactttcagattcttcccgcaggctccgcacagtcccattctcctcctccagtcccgccgtggacgatcctggtatcgcctttgctgctcacctttcattcatccagccgacgggcacgagcatccatctgccttctgccaggctctgtcccgggctctgttaataccacagtgaattcgtcccgaagccagccccggggagtggggagtggacgtaaacaggtcttcacactgctgccctgcactccctcggaaccaaaaggccagggagcagtcatcacaaaacaaagagcgggcgctgtcagctcgggggacggaacagttccttctcagaatgtttgttttcccttcctcactccccactttgcctgcctgtctccagactcctacgttttctatgcagcagtcttaataaggggatgaaaagttgaagcacagagtagaactgctaaaaagggaaagaaggaaggacaaacagggcagcaaaataatcaggtaagaagttacaaagcccagttcactaaactccagaaaaaaaaaaacaaaccctgatgctgtgcttagagcaggattcacattcctctgaaatccatctgctttgataaatacattaattattcccttgtctacagattgacactgtgggagatgcttccttaatattattgggccactgaggcacaatttagaacagtaatttactgtctggcacctgccaaacacccacattgctctggggacaaatgggataatggggagaaaaaagtaaatgggtgccttaatattcctatgggataaatgctttatttggtcaaaaactggaagctgacgctccacttaagagtctaggtcacgcggcaagccagacacttgaaggagcttaaagctttctgttcttaatagtattttagacacttattttgaaatccctgatatttatttaatttacactgactcagatgtcggctaagctctatgagcctgagggagtgagttaaccttcctctcagcttattcatatataaaatggggatactcatactttcctatctgtagagttgaaaaggttaaatgaggtcatgtaagtaaatcatccagtgacatagaatctgagaactaaacccttttgaaaattggtat

SEQ ID NO: 869 - DNA, 4001 bp, Homo sapiens
gaagccaggctgaatccacgcctggctccacggaggagccacaaggatggccatcctcccccagcccctaggacgctgagacaggctcaccggaggttatcggtgtctccattggacaatcaaggaactgaggttctttccctccaaaaccacacacctcctcacggcttcaccgggaggtggatcaaatgacctgctctatgaaagcactttgcaaaagggatgaaagtacaataacaagcaaaaatagcctccaagatgtgatataaagcgatgccaatgcgcagctatgtggttactggtgagcagacctccgggaagcacaggacacaccccacttacccaacagacgttctcatcccatatgcctttgtccaaaggttgcacgggggttaagcttggcccagaaggcgccgagggctggtcgagttctcccctttccaagaaccagccgaatctccctcccgcagatctgaggggcagagccgcccatccggcggcgccgggccacttctgggcgcgccacccgccgcccgcccaggctcggggagacagcgccctgagtcccggctgggagaaggctgctcacctggtcctcacggattccagccgaggggcgtgaccgcttctccccacaccctttgccctgagcgggacgtggagtctcttggccccagggggcgcggcccgcatcggcagagtcccgggcacgcacctacgccctcccatccagcggactgtttaggggcttcgggcggcgccggagaaacggggcgggctgcacccagcagaatggggtgggcctctcagaagccccaggccgcaggggaggggcgcgcccccaacatcttcccacaaagagctccagctctccaaagcaaggcgcagtgcgggcggaggacagccctgacctccgagaggggcgcggggagaaagggagcgccgtgggggcggggacccttcccggcccgcgccctgagccctcagcctcgcacaatgagtttagcctggctccatccggaccgccctctccgcccgggcccgcgcccgcgccccacgccgggtgctcaccgaggagcggccgccgcggcagctcaggccccggcccagccgcctccccgcctcggccaccgccgccgccgcttccttcctccccgccgcgctccgggactggaggtttcgggtttcagcccaccgagccccgcttcgctcctcccgcgggccagccaccagcacgcggacccgggcgggcgcaggccaagtaactttgcggcgcccgcgccccgccccgccccccccacgcccggccgggcccctccggcccccggagccccgagccgcctccccgcgccccgcactgccccgccccgcccagctcccggcgcccctccccacccgcgccccttccttcgcgtccgtccgcccgccctcccggctgcttctttcccatttcttcccacgaacagcctcggctgctgctctttgtctcgcccttaccctctcggctcgccccacttttctcctgaaaacctttgtggtgcctaactcaggccttccctgttcccgttcctccgccccagttccagccgctgggacgtcgccttttccatgtctctctccatcacacagacactttcagattcttcccgcaggctccgcacagtcccattctcctcctccagtcccgccgtggacgatcctggtatcgcctttgctgctcacctttcattcatccagccgacgggcacgagcatccatctgccttctgccaggctctgtcccgggctctgttaataccacagtgaattcgtcccgaagccagccccggggagtggggagtggacgtaaacaggtcttcacactgctgccctgcactccctcggaaccaaaaggccagggagcagtcatcacaaaacaaagagcgggcgctgtcagctcgggggacggaacagttccttctcagaatgtttgttttcccttcctcactccccactttgcctgcctgtctccagactcctacgttttctatgcagcagtcttaataaggggatgaaaagttgaagcacagagtagaactgctaaaaagggaaagaaggaaggacaaacagggcagcaaaataatcaggtaagaagttacaaagcccagttcactaaactccagaaaaaaaaaaacaaaccctgatgctgtgcttagagcaggattcacattcctctgaaatccatctgctttgataaatacattaattattcccttgtctacagattgacactgtgggagatgcttccttaatattattgggccactgaggcacaatttagaacagtaatttactgtctggcacctgccaaacacccacattgctctggggacaaatgggataatggggagaaaaaagtaaatgggtgccttaatattcctatgggataaatgctttatttggtcaaaaactggaagctgacgctccacttaagagtctaggtcacgcggcaagccagacacttgaaggagcttaaagctttctgttcttaatagtattttagacacttattttgaaatccctgatatttatttaatttacactgactcagatgtcggctaagctctatgagcctgagggagtgagttaaccttcctctcagcttattcatatataaaatggggatactcatactttcctatctgtagagttgaaaaggttaaatgaggtcatgtaagtaaatcatccagtgacatagaatctgagaactaaacccttttgaaaattggtattcacgaaaggtctgaaaatatatgccacagactggcatggtgagaatgagaataaaaaataaacagttacggctgttgtggctccatacccatccatgatgcgaaagatgtccttcatactgagcaaccttttcccatacttactctatttcattttgaactcttcaacagaaaacactttttttctcctgctgctcattatcaaatgcattatttatcacaaagatttttcttttttctgagctcataagctcagaacttactgtgcattcagggatggaaattgctgccaacaaatgcattttcaattgctctcttaagatttttttcccttctggagctaatattgagctatgagcagaattcaatcagatgcagagaaaacagacaaattattattaaagtaattatttcaccgtatatcattgtataggtgacaattgtgaaaaacgtgactgattttgtgcaagaatgtatttatatttttttagaaaaagagaaagatacacactaattctcctttcccaaattagtttaataaaccattctgttttagagacatccacaaagacttataaagtaagataatgagaggccttgtccaactgaacctcacatgtgtgttgaataatttatatataaaacatattttatgtaaaatatcatttcagtctagcagtccacataaaactggtgaaagcaaaactgtgaaatatgctatttgttccacatggaatgttatttcctccactctttacaggccaagcccttcctgcccttcacatctcaccttaaatgtcacttccttagagaagtcttccctgatgggatcttgctatgttgcccaggcttgtctttaactcctgggctcaagctatcctctcaccttggcctcccaaagtgctggaattacagatgtgagccactgcactcagcccctgaccaatctaaaagaaattctctaatctatgtactctttcacagctctgttgtttttctacataaaatgtgtccaaatttataaaatatgcatcaatttttctatttatttgtttacagtatgcctccactgatagaatggtaaaaccatttgacctcagatggaaacttccctgaaactgatgtgcctctggactgatcagaaacaagagccaatcaatatacatatatttttattgaatcagtatgggtttatttctgttacttggaacagaaagcatctcactcagtg

SEQ ID NO: 870 - DNA, 4001 bp, Homo sapiens
gctgcagtaaaatagattataagggaaaaccgcctattccccgaagcagtagctctccagaactcatctggaggtccaggtcactaggggagaagaagccaggctgaatccacgcctggctccacggaggagccacaaggatggccatcctcccccagcccctaggacgctgagacaggctcaccggaggttatcggtgtctccattggacaatcaaggaactgaggttctttccctccaaaaccacacacctcctcacggcttcaccgggaggtggatcaaatgacctgctctatgaaagcactttgcaaaagggatgaaagtacaataacaagcaaaaatagcctccaagatgtgatataaagcgatgccaatgcgcagctatgtggttactggtgagcagacctccgggaagcacaggacacaccccacttacccaacagacgttctcatcccatatgcctttgtccaaaggttgcacgggggttaagcttggcccagaaggcgccgagggctggtcgagttctcccctttccaagaaccagccgaatctccctcccgcagatctgaggggcagagccgcccatccggcggcgccgggccacttctgggcgcgccacccgccgcccgcccaggctcggggagacagcgccctgagtcccggctgggagaaggctgctcacctggtcctcacggattccagccgaggggcgtgaccgcttctccccacaccctttgccctgagcgggacgtggagtctcttggccccagggggcgcggcccgcatcggcagagtcccgggcacgcacctacgccctcccatccagcggactgtttaggggcttcgggcggcgccggagaaacggggcgggctgcacccagcagaatggggtgggcctctcagaagccccaggccgcaggggaggggcgcgcccccaacatcttcccacaaagagctccagctctccaaagcaaggcgcagtgcgggcggaggacagccctgacctccgagaggggcgcggggagaaagggagcgccgtgggggcggggacccttcccggcccgcgccctgagccctcagcctcgcacaatgagtttagcctggctccatccggaccgccctctccgcccgggcccgcgcccgcgccccacgccgggtgctcaccgaggagcggccgccgcggcagctcaggccccggcccagccgcctccccgcctcggccaccgccgccgccgcttccttcctccccgccgcgctccgggactggaggtttcgggtttcagcccaccgagccccgcttcgctcctcccgcgggccagccaccagcacgcggacccgggcgggcgcaggccaagtaactttgcggcgcccgcgccccgccccgccccccccacgcccggccgggcccctccggcccccggagccccgagccgcctccccgcgccccgcactgccccgccccgcccagctcccggcgcccctccccacccgcgccccttccttcgcgtccgtccgcccgccctcccggctgcttctttcccatttcttcccacgaacagcctcggctgctgctctttgtctcgcccttaccctctcggctcgccccacttttctcctgaaaacctttgtggtgcctaactcaggccttccctgttcccgttcctccgccccagttccagccgctgggacgtcgccttttccatgtctctctccatcacacagacactttcagattcttcccgcaggctccgcacagtcccattctcctcctccagtcccgccgtggacgatcctggtatcgcctttgctgctcacctttcattcatccagccgacgggcacgagcatccatctgccttctgccaggctctgtcccgggctctgttaataccacagtgaattcgtcccgaagccagccccggggagtggggagtggacgtaaacaggtcttcacactgctgccctgcactccctcggaaccaaaaggccagggagcagtcatcacaaaacaaagagcgggcgctgtcagctcgggggacggaacagttccttctcagaatgtttgttttcccttcctcactccccactttgcctgcctgtctccagactcctacgttttctatgcagcagtcttaataaggggatgaaaagttgaagcacagagtagaactgctaaaaagggaaagaaggaaggacaaacagggcagcaaaataatcaggtaagaagttacaaagcccagttcactaaactccagaaaaaaaaaaacaaaccctgatgctgtgcttagagcaggattcacattcctctgaaatccatctgctttgataaatacattaattattcccttgtctacagattgacactgtgggagatgcttccttaatattattgggccactgaggcacaatttagaacagtaatttactgtctggcacctgccaaacacccacattgctctggggacaaatgggataatggggagaaaaaagtaaatgggtgccttaatattcctatgggataaatgctttatttggtcaaaaactggaagctgacgctccacttaagagtctaggtcacgcggcaagccagacacttgaaggagcttaaagctttctgttcttaatagtattttagacacttattttgaaatccctgatatttatttaatttacactgactcagatgtcggctaagctctatgagcctgagggagtgagttaaccttcctctcagcttattcatatataaaatggggatactcatactttcctatctgtagagttgaaaaggttaaatgaggtcatgtaagtaaatcatccagtgacatagaatctgagaactaaacccttttgaaaattggtattcacgaaaggtctgaaaatatatgccacagactggcatggtgagaatgagaataaaaaataaacagttacggctgttgtggctccatacccatccatgatgcgaaagatgtccttcatactgagcaaccttttcccatacttactctatttcattttgaactcttcaacagaaaacactttttttctcctgctgctcattatcaaatgcattatttatcacaaagatttttcttttttctgagctcataagctcagaacttactgtgcattcagggatggaaattgctgccaacaaatgcattttcaattgctctcttaagatttttttcccttctggagctaatattgagctatgagcagaattcaatcagatgcagagaaaacagacaaattattattaaagtaattatttcaccgtatatcattgtataggtgacaattgtgaaaaacgtgactgattttgtgcaagaatgtatttatatttttttagaaaaagagaaagatacacactaattctcctttcccaaattagtttaataaaccattctgttttagagacatccacaaagacttataaagtaagataatgagaggccttgtccaactgaacctcacatgtgtgttgaataatttatatataaaacatattttatgtaaaatatcatttcagtctagcagtccacataaaactggtgaaagcaaaactgtgaaatatgctatttgttccacatggaatgttatttcctccactctttacaggccaagcccttcctgcccttcacatctcaccttaaatgtcacttccttagagaagtcttccctgatgggatcttgctatgttgcccaggcttgtctttaactcctgggctcaagctatcctctcaccttggcctcccaaagtgctggaattacagatgtgagccactgcactcagcccctgaccaatctaaaagaaattctctaatctatgtactctttcacagctctgttgtttttctacataaaatgtgtccaaatttataaaatatgcatcaatttttctatttatttgtttacagtatgcctccactgatagaatggtaaaaccatttgacctcagatggaaacttccctgaaactgatgtgcctctggactg

SEQ ID NO: 871 - DNA, 4001 bp, Homo sapiens
taaaaatttacagtttcccccaaaactaagatcaggcaaccatgtgctggagccccaccgcacctgcagctgcccccttactggagacaggcttagcagcacacagctcccacccagccctcctgtccacccgcctcctgcactcaggcttcctgactggtccctgctggcagtggagtttacaccacagaactgtacctcctcttgctgacatttaggtcagttccagttcagcccattctgtcttcctcggaacccaaacagagagctcgcagccctctgaccacacagtgctccttcacctctcagaggacgcacagtgcaccaggctgcaacacaaagagaacggttcggatatcgttgcggccttggattagttccaaaatgtcaagcgggcctcttaatgaggggtctctattcttgatgttatggcagtggagctacagggcagggagaagccctgagttaaagaactcacctgtgtgccatcaggaaaccacgtgaaaagcactaccaaggcaaaagatctgagttcaatctgggctgcttacctagctgggcaagaatgcttcatctctcctgagcctcagtttcctcacctatcaaatgggctagtagagcttcacaaggttgttgtgtgaatgaaaaagtgtacatgaaagtgcttgtaagcacctgacaagtataaaataagacgggtgtggaggaggaccggaagagaggtgctctgaaagaagtaacagaaatgggtgccatgcattccagttacagttgaagagcctctgtctctatgacctgaggtccctcccacctcctctttctgccctgagggcctgaaaaatgcctctcttcacttgctcccagtggctgcagtaaaatagattataagggaaaaccgcctattccccgaagcagtagctctccagaactcatctggaggtccaggtcactaggggagaagaagccaggctgaatccacgcctggctccacggaggagccacaaggatggccatcctcccccagcccctaggacgctgagacaggctcaccggaggttatcggtgtctccattggacaatcaaggaactgaggttctttccctccaaaaccacacacctcctcacggcttcaccgggaggtggatcaaatgacctgctctatgaaagcactttgcaaaagggatgaaagtacaataacaagcaaaaatagcctccaagatgtgatataaagcgatgccaatgcgcagctatgtggttactggtgagcagacctccgggaagcacaggacacaccccacttacccaacagacgttctcatcccatatgcctttgtccaaaggttgcacgggggttaagcttggcccagaaggcgccgagggctggtcgagttctcccctttccaagaaccagccgaatctccctcccgcagatctgaggggcagagccgcccatccggcggcgccgggccacttctgggcgcgccacccgccgcccgcccaggctcggggagacagcgccctgagtcccggctgggagaaggctgctcacctggtcctcacggattccagccgaggggcgtgaccgcttctccccacaccctttgccctgagcgggacgtggagtctcttggccccagggggcgcggcccgcatcggcagagtcccgggcacgcacctacgccctcccatccagcggactgtttaggggcttcgggcggcgccggagaaacggggcgggctgcacccagcagaatggggtgggcctctcagaagccccaggccgcaggggaggggcgcgcccccaacatcttcccacaaagagctccagctctccaaagcaaggcgcagtgcgggcggaggacagccctgacctccgagaggggcgcggggagaaagggagcgccgtgggggcggggacccttcccggcccgcgccctgagccctcagcctcgcacaatgagtttagcctggctccatccggaccgccctctccgcccgggcccgcgcccgcgccccacgccgggtgctcaccgaggagcggccgccgcggcagctcaggccccggcccagccgcctccccgcctcggccaccgccgccgccgcttccttcctccccgccgcgctccgggactggaggtttcgggtttcagcccaccgagccccgcttcgctcctcccgcgggccagccaccagcacgcggacccgggcgggcgcaggccaagtaactttgcggcgcccgcgccccgccccgccccccccacgcccggccgggcccctccggcccccggagccccgagccgcctccccgcgccccgcactgccccgccccgcccagctcccggcgcccctccccacccgcgccccttccttcgcgtccgtccgcccgccctcccggctgcttctttcccatttcttcccacgaacagcctcggctgctgctctttgtctcgcccttaccctctcggctcgccccacttttctcctgaaaacctttgtggtgcctaactcaggccttccctgttcccgttcctccgccccagttccagccgctgggacgtcgccttttccatgtctctctccatcacacagacactttcagattcttcccgcaggctccgcacagtcccattctcctcctccagtcccgccgtggacgatcctggtatcgcctttgctgctcacctttcattcatccagccgacgggcacgagcatccatctgccttctgccaggctctgtcccgggctctgttaataccacagtgaattcgtcccgaagccagccccggggagtggggagtggacgtaaacaggtcttcacactgctgccctgcactccctcggaaccaaaaggccagggagcagtcatcacaaaacaaagagcgggcgctgtcagctcgggggacggaacagttccttctcagaatgtttgttttcccttcctcactccccactttgcctgcctgtctccagactcctacgttttctatgcagcagtcttaataaggggatgaaaagttgaagcacagagtagaactgctaaaaagggaaagaaggaaggacaaacagggcagcaaaataatcaggtaagaagttacaaagcccagttcactaaactccagaaaaaaaaaaacaaaccctgatgctgtgcttagagcaggattcacattcctctgaaatccatctgctttgataaatacattaattattcccttgtctacagattgacactgtgggagatgcttccttaatattattgggccactgaggcacaatttagaacagtaatttactgtctggcacctgccaaacacccacattgctctggggacaaatgggataatggggagaaaaaagtaaatgggtgccttaatattcctatgggataaatgctttatttggtcaaaaactggaagctgacgctccacttaagagtctaggtcacgcggcaagccagacacttgaaggagcttaaagctttctgttcttaatagtattttagacacttattttgaaatccctgatatttatttaatttacactgactcagatgtcggctaagctctatgagcctgagggagtgagttaaccttcctctcagcttattcatatataaaatggggatactcatactttcctatctgtagagttgaaaaggttaaatgaggtcatgtaagtaaatcatccagtgacatagaatctgagaactaaacccttttgaaaattggtattcacgaaaggtctgaaaatatatgccacagactggcatggtgagaatgagaataaaaaataaacagttacggctgttgtggctccatacccatccatgatgcgaaagatgtccttcatactgagcaaccttttcccatacttactctatttcattttgaactcttcaacagaaaacactttttttctcctgctgctcattatcaaatgcattatttatcacaaagatttttcttttttctgagctcataagctcagaacttactgtgcatt

SEQ ID NO: 872 - DNA, 4001 bp, Homo sapiens
aaatcctcatcatcctgagatcaacctcaactactgtgttgagttttgtctcacccagtgtacgacccgcctcctgatatgcatttcactcccactgctcaagcaaagacggttgtcaagacagggctagcaagagtgtttattgagaaagatgaattcacagagattttgaggttcctggctgagtgatggagacctcaaaaaacgcctggtgagcgatttcaggaccttctgtccagagggaaagaccagaacaacttccaggtgagtcctgccgcttcacagggggagaagtgtcaccagattcaatgcaagggttttgtgagtgagaagggcagggggtctgacttggagaaggtatttctctgaaagcaacggctattgtgggagacgggagaaagcacagccagaaatcagaatggcatttgggggtctgggttagatattctggtgggttctcttcccgatgggacagagaaggaaacccacttcccttctgtctacttggtgaatctgcgggtctccgagttgctgtctgctacatctcatagcacctatcttggactggacaaaattagctcaggtaccctgcaggctgagagggaacagctagtcacaggagcctggtttaggggagttcaattgttctgaggttccggggaaaccgatggaggaggccttgggagtccaggcagcgcgcgaggaaatgcgatgccggcccgagcagcttgctgccgccagaacaggcgcgtctggggagctcagtcccctccgggacctctggcctcctctcgatgctccgctgccgcccacctccagcggcccggggcagctaccaggaggccgaggcagtgttcgcggcctgggcccggcaacggaacacggaactgtcgtccctggagagcgaggaggctgagctgatccttcgcgccaggcggccggtgcgcccgcaggccccgtccagcgcccgggctcggaatgagcggtccagcaggaggtagatgagcgggttggcgcagctgttgacgaaggccaggcaggtggcaatggtgaggccccagcgcagcgccagcagcagggggcacggcagcggcagcgcccccagacgcgccaggtggaagacggcccgcagggcgctgaagggcagccaggagcccacaaacgtgctctcgatggcgaagatgatgcgcagcgagttcctccgggcccgacccacgtgcggcggccgtcgcaggcggcgcgagatgcggcagtagcagaagagggtgacgaccaggggcagcacgaaggtcagcagcagcagcagcaagctgaggccctggaaggcgtgggagggctcctcgccgcactggctgtcctggcccccaggcaggggctgcaacccccggtagaccagggagggcaggccggccagcagcgccacggcccagacgccgcagcacgaggccagcgcgcagcgcggggtgcgcagtggcctcgcctcgagcagcttcaccacggccaggtagcggtccacgctcatgcccgccagcagcagcgcgcccgcgcagcgcgtgcccgccagcgcgaagctgctgagcttgcagaggccatcgccgaacggccagcggccgcctagcgccgccgccgcggcccacagcggcagcgtgagcacgaagcccaggtcagctgccgccaggtgcagcacgaaggtatccaccagccgccgcgggccccgccgcccggccagcagccacaccacaaaggcgttgcccagcaggcccacggcgaaggccgccaggtagagcgcggggatgtagacgtagccgtagggcaggtccccggccggacacagctccagctcctccaggccgtccaaccccgagtagtcccagggcgctgaccccgggctggggctccagggctctgtgggggccatggcctggctatgaggcctgcgcggagtgcagccctgggcgcaggcggcagcagctctgagcaggagggggtttgctcttcacgcccggccctgcacctcccttcctgccacccaagccggaggcaaatgggtgggcaggaaagaggggagggaggaggggatggggtgggaggggcaggcttctgtgagagagatggtggcctccgatttggggctgacccgaggggtaagggcagggacaggcaaaaggggcttcacatctaaatcttgggaggaaaagtcttcagggctgggagacctgcccggcctcccagtaggagcgtggcccattcctctattagttgctcagtttctttgttcgtgaaatcgggatacttgccccactgtctcagggtcgcgttgcaagaggtggtgggtgcccgagagccctaacctcttctcagcctccacttcaccccttcccacctgcacccaccggctgctgtcttctctgttttagaggtgagaagacagagccccgggattttatgagtatggggcctaaggcacgccccaccccaaatccacctgttccctaggaaagactccactgccgggacacagcagatctgggtgggtgggggagcccgccctgggcagtcaagcagttgttagcgtcctgagatgtggggctcatgtcttcaccctatgagtggcttctctgacccagtcaggtcctcatgaagccacgcgaaagggttttaaggcagcgaggaaggggtgtagtcagatcatcctgctggaaaggggtgaaacctgggattcacatctgcctcttccctgtcttctcctatcctaaaaaacctgtcaagccagacacagatgtaagctcagttcaaaagatgacacctaatgaaacaccagattagttgtcctaaattatgagtcaggagcttggaggcagcaagatcccttctgaactgagaaactgagagtaaggggaggattcataaagacgagggggaatgaagtctgaccctgaggaggcagtgggacctaaggaggagaggatgggtgagggaaagcttgctctttctcctgaaggaggcatgcagccacttacatctgaattcttcttagcagatatcccttccacaagatattgtggtagaactgatgtcacagtgccctctgagtctgtccccagtgttcccaggtatgagtggctgatgtgccgggcaacccggtgtggaaaatttgaggtggattatcaattttgttcgattaagacttgttaacaatgaactcctccatgaagcaggcactgtttcaggcactgcaagagatgccattcttggccttcgcagtttgttgcataggcaggagagatggttacataagcagaatcttatgtaatcttatgcaggggccaaattgtagtaaatgttaaaaaccaagccctcttagggtttagtggagggggagtgattatttttgacgggagggctgaatcagaaaaggccttcgaggagatgacacttgagatcagtcccaggaaggagctgaaagtcaaataagagcagcagaaaagagaagaaagggtcagactcggaggagggagtaaagggaacaagtataccaaaatgagtaggaatgtgggcttttcaggggacaagcagtctgccagagcccagggtaggaaggtgggggcaggagatgaagcaggaaaggatcatgaggggatttggatttcaatctataggtcatggggagccaggaggcatcgatctgtgttttgaaaagatcgctggcagaactatggagaagggagaggctcaagccagggagaccccatagtaggttgtaattatttgtgtctgaaatagatcatgagcagtggggacagaaatgggagggtatattcaagagataattgtaacatcataggtctcacaaagaggagtcaaagataagcctggggtttctctgcttagggactatatggacgctgtccccttaactgccaagaacacagagaggcacatgtgtgtatgtgttcagtttgatgttgaagtggggtcatgaaataatttatcatctaacc

SEQ ID NO: 873 - DNA, 4001 bp, Homo sapiens
ggtaagataggtgtagagaggtggagagtgggcatcacccagcaggcagtagacagtgaagggcaaccagcaggcggcaaaggctccaagcaccacggccagtgtggcaatgcccttgcgggtggccacatagtgggaggcaggcagcaggtgccgctgaagggcaatctgctgggcatggcggcagacgatgcggcagatttgggcgtagagctgcagcatgatgccaaacaccatgaagaaggcaatggccagaactaccagatggttcttggagagtggataaaccacgccacatgtggtcaggccatccaggcagttccaggccagcacaggcagcagccccaggcccagggcacctccccacactaaggccagcatcacataggtccgtgtcactgttgtctctgaatagtaggtgagggcattgtacagagaaaggtagcggtcgacagtgatggccagtagactgccgatgctggcggtaaaggccattgccagcacgccaaccagcaccaggctcatctccgctgagccgatgcagaagacagcagcaaagtgcaggaccaggcccaggcctgccagcaggtctgccacggccaggctgcccaccagcaggaacatgggggcacggaaggcaggagtgcccacgatgatggccaccactagcgcattctcgcaggacaccagggtgcctgagatgcagagcaccacatcccaggccttaggcgagggcagtggtgcggctggacctgtgggcccctctgctgggcccacgctgcttacattcacgttgcctgagccagctgagagccaggccagagggctgcctgcaccccacatcatggtacctgcaggagaaaggccttgtgagaagctgaccaagctgggtgatgggagttggggtctggagggggtgaggtgcttctcaggatacgtggtgggagtctctcctcaggatacctgatagggtcccaatgccttatccccacattcatgccctggggctcttcccaggataccgctgtcccctccaatgcccccaggcctctaaacaggggtctcttcctggggatccctgtcctaggtcctgcaggtctctttttcccacgtgtgtgaccagaggagagacagaagaaggggtactataagtggaagagggccataggatccaggggatgcccccgaaggctcaagattggggtagggaaacatctaccccatcagggagactgagcagctccgctccctcccatcagagatgatgatgctagctcgtgcctgaggctcccagacccctcacgattttcagtactgccagccttagactccgcccccagggaatgcgcgtgaagctcccgccagccatcaccccgcactcccgcggtaacacctgggaactcagccccccaccccccaccctcccagacttctgttcctggctggacccttctttccgcctgaatctctaggtctctgggcagacccccctgctggaagactggatccctgagtcagatgcctccttctgcccggacacctggattttgggcctgactctgcctcctgcctggatacctggattcctaaattggacacctcctgctgttcggacccctgggtccctgccccagacgcctcctgccggcttaacctcagatgaccatcagtccctccagggcctcgggtccctgcaggaatgcttacccttcgccgggtcatccaactcaaccccagcactcgagcacttgggcccaagcctgctaacccagaatcgcctaaacccagaattcccacctcgaactcgaaccccggccggccactaggagccttccgccggcccagtgccccagcatcctgcgtgcccttcaggacccctggtgcccgcggcggggcccgctactcaccgctcaggaccaggcgcggccgggccgcggggaggctccgctcgggtcctggcggcgcagggcgtgcgtggaccccgagaagcccccgcggccgcgggagaagcggcgtgagtcaccccgccccgcccccggccaccggttcggtgacgtcagcggtccgatcagccaatgggcgcggcgcgctggggcgcagcgcgcgttgcgcggcatagtaataaggcctcgcaccgcccgctcccccattcataaaaagcgaccgtggctgcggccccgccccctcccgagtccgcccgcgctgtccttgacgcggcgccctctgcgggccgggggtttcagaggcgccggtgcgagagccttgaagtctcagagaggctgcagggaacgtggtggaagagtggaaagggggcccggctaggctgtggggtgatgggacccttgggtggcagagaggctgacgagatccaggtgacgaaggaagagcttgtgatggggctggttgggcttccctggtgagaatgacagggtttccaagatgatggggccctgaggtgacgatgacagggagcacgagggagcggggaggtgggtggcagtgacgacattagcatggtgacagaatcttggggtggggggtgatggccgtgggacgctaacggtagaggggaagccctcagggcaaccatggcagtgtcagggtgactatgcagcaggggggagttcagggaccccgggatggcagaggcagcggcctgggaacatggagtgtccaggtgacttcaggtcaccattaccctgtcagaatggctggggtactgaagcgacaatgctaagccatgaggactgtggggccctggaacgaagatagcaggtggctgtggtgagtgggctccagggtgaggggcacagggtagagggtctggactgacagtgaccaggcaggtaagttgctgccagggcaagtcccgtgatgccggggctgggataagagctgggtgacgtcactcatgtcagcccaatagcgccctcacagcaccggaggggtgggcctggcaagatttcaaaacctgaattatttattccagtatctagaaagccagcgtggagggggtgaggggtgcacttccctgaagcaggaggagatggggagccgggaagaacttggaagcagaaagcctggcagctcagtcctcagggcaggcccctctcagcctcctattttaggcatcctgatgggtggagcaaggagaaagagctccctcttccccaacgccatctgcccttagtccaggggaaccactctgggcagacttctccagatgtgacagatgtggccagtcctgcggcagggggactggctgctccttctccctgtgtctcttgccttgatgctccctggaatcatgcaggcctgtgggaggggaagatgaggttaagaggcctgaggatcccaggccccactggacacccccatcacagcaccatcactgcagcccccatggtcagcctccaccaggcaggttttgggtttgagtgtgaggcagcagaaggtcaagtggcagggaacatgggaggaggagggggtcggagctggagaagaggattcatttcaggttggatgtggtgagtttagggggcttagggggtggaagtgtccaatctcagtttctccatttcctagctgggtgactttggagagtttcttcagctctctgtgcctatttcctcatctaaaacacagggataatattagtaccggcctcatggggttgttgagtgggttctacttgccattggccatcaatgttacagctggataatgagggacacctgggaggtgtaggcatgcaggtggcaactgatgttttaggggtaaataatgtcacccaggggcgggagcagagagtgaggagtggcttcaggggctcctcctcctgggctcttgcacctgacccctctgacaacaacccttctcttcatccaggtctctgctcccgaattacttctgaaacaggctgctctgaactctcagatcgccactggcctccccatcactctccctccccttctcttgatttattcatttttggaggatga

SEQ ID NO: 874 - DNA, 4001 bp, Homo sapiens
gagccactgtgcctggcacagggtcttctttcagggtggagtaactttgtaccactgttagtcagtctccctgggttgggaaggacaggaaaggactgtacccactgctgagacacagggagtctgtccaactatgacatcatcattgttacatggtgaggtggggacagaccttggaataggacctgtgtccgtaatgctgatcctgagcccttctccggccaggcaagtcccccttgtcatgcagcatcattcacgaaggaacagcagcttcacagggagaccacagtcactccattacactccatgcagccaaaatttgaaagactgtttgcttattttgtcttacagagagagagagggtggccttgctgtgtcttgcataaatgcacacatcagtatgtttctgcagtgttttaagttgtctctctatgctctacatatcctttgacacccatggacttatcgtagacgctaccagaagtaagggcatagtggtatactttagaactgtgaaacaggccagctggaaggaccatctggtctacccgccctggttgggagataaagaaattggagaggtaatgcaacctgcccagtgacgcccagtatgtcagtggcagagctaagactagagccccccattagttccagtgcccagaaccaggtatccctttcagagaggatctaggaagttgctgatggaaatgacaacgataacaatgagaatcccagcagggagggaagaacggagcggtcttttgcttctggtgcttgtattctcatggagtggatgctgacttgatccagaggggtgtgaaggaaattgggctctcccttcaggcactccttcaggaggcaggagacggaggagcagcgaaggaagctgtgggagcagggcagcggcagggggtacagaggaaagaagaggagtcacaacaaaggacagaggtatcttgggtgggacaggggagaagggctgaggaagggagagggcagcttagggtctggagaaagtggcaaaggcctgccttgaggttgctcccgaagcagaagatcaggctggggctggaacccaggggccccacacacccgcctgtccccctggcctgcctacttctcttgagagcaaccagaaaccaataccgtatttgtctccttctccaaggtaaaggaggagcaagtcagagctccaagactcaggttttgcacacccacaaattccatttccaaagacctgatggagactttgagtcccttccctggattgcagcctcccagcagagctcaaacagaacacacactcacctccatgaagggcacggcacgacaagaaacgtcacccagtagcctctgcttggtgatctcgttgaagatgacaatagggaggcagaaaaagaggaccagaaaatcccagagggccaggctggcaaggatggagttccaggcactcttcaggtagtagctgtgccacacgatgcacatgaccgacaggttgcccacaatgcccaccgcaaacaccaccagcgccagaagcatgatggcataggcactgtaggagctctcggtcaccggatacagggggttctggatctgtagcctctgccctggtgctcctgtcagattgcccctcagttcctgcccactgtctggggtgcccccatccttgccggggttagggctggtggccaccaagggcttggttggctgcaggccagcagggtgaatgggccgggggtactccgcccactcctcaggcacatactgctgcacgcccttggcctcctcatcctcggtgcccctcttggatcggctctgctgctcctgggtctcggctctgtgcctgcccaggtgcaggggggcacccccagagaccctgcttagccccacagccaaaatcacagcaagagagacagccaggggccacagccaccgcatggctggatgagcaggagacagccagcccaggaagagcaggtgagtgcagggggcccaagagctgggctccagagaggcagctggccggctggatccgcctccagtcaggcgtctggcatcactcgcctgccctccctcccagcctccggccacaggccgggcagggccctctgctggacacatagcactctttgctgccctcacacatctcgtcctccacgacgccgcttctcaggccctacagcatgtcaggctgtggggccctaagagggcatctgcttcaggcccctgaaactagggaggaaatgtggcctgcctagggtgacacagggaggtggggcagaatgggaactggggcgcaggtctcctgattctaaggcagctcctccattcaaaactcagcaataaccatcactgtcacttactgaacacttactaggtgctagcactcagctggtttctcaattaacccttgattaatctcagatcacaaatctgaggtttgtagaggtcagtcacttgccacatagttgatacaaggcagagcaaggcccacaacccagatctgactccagagatttctaatttttttttttttttcggttgcccaggctggagtgcaatggcgcggtcttggctcactgcagcctccgcctcctgggttcaagtgattctcctgcctcagccccctgagtaactgggattacagttactgtagtgcccgccaccatacccggctaatttttgtatttttagtagagacagggtttcaccgtgttgaccaggctggtctcaaactcctaacctcaggtgatccgcctgcctcagcctcccaaagtgctgggagccaccgcacccggcctaaaacaccatattctgagccagacacaagatgtgtggacatttgcaataacacgtctttactgactacgtgttgtgttccagacactcagaatacaaaaatgtaaaggatctctgccaccaatgagctttcagtccagagaaggaagtaaatgtgtaagttcagcatgatagatgctatgaaaggcaaaggtcatgatgctgagggaacccaagaaaatctgggggggatctggaaggcctcccaagcgaggtgacatttgaatggatcccgagaaatggctgtgagcttgcctgacagactacgggaagggagggtgctctaggcagaagacacagcacacacaaaggctgggtgatgtggaagtgggtgatgttcccgcaagagagcaagtctgtcgaggggactagagtgcaagggaggtggggagagagcatgggcacttgggacaaagagcttggaaatatcagcagaggaggaactggactgtaaaggactttgtatgccaagccaaggagtttagattttatcccataagcaatggagaatatcacaggttgttaagtaggcaaacaatgactcaactaagttattttagaggggtccctgatgggcagctggggtcctagcaatctggaacaggaggatgcagagaccgggggttctgttgggaggcagtgggtgatggagagaagcccagagtcaaggaaaaccagcagctttgagcggctttggctgtgcatgggagggagaggtcgaggcagagcccaagcatggggtgggtagtgaatccactcagccacattagggaggcacagttctgaggacggaccacacgatgcctaggagaatccactggagaattaactcgaagacctgccccagagtgagtcagatcattccctcctcccaactcccacggcattatgctgctgtcattgaaacctaccaccttcaccagcccagacaacatggtgaaaccccatctctactaaaaatacaaaaattggacagatgtggcagtgcacacctgtaatcccagctactcgggaggctagggcatcagaatcacttgaacccaggaggcagaggttgcagtgatccgagatcatgccactgcactccagcctgggcaacagagcaagactctgtctcaaaaaaaaaaaaaaaaaaaaaaagggccagacgcagtggctcatgt

SEQ ID NO: 875 - DNA, 4001 bp, Homo sapiens
aggaaccagataaaaatgtttccaaaagccattaaaaatatttaataagctaccagattgctttgctggaagaaatacattatttaacatcatggatgctctatacagtagattctttcaatagctaagacacttctaaagtaaggtaccaatggatgcagatcaagaaaaagagagaaaaaaaacaggagactgttaggaaaccagggaaaagcaaatgtcattttacccagaagaaacaaaaatactgtttctatttgtttatagcagaaaaactgtgctgcagagaacattataaaaacacaagcaaaggggttgtttggcaaataataaaatgcaatgcttactgtgcatcctccatgaagagatcacttatggattatagattagtgtgattaaaggtacactttgatgcaaaagattatactttaccacatatataatatgtagcacttttctacaaagggcagtttatgtaagtaataacttccacaaagagtgagagaaacatagacaaaatgagaaagacagaggcagggtacagtcagacagaaagacagaaatgctgagccaaggggcttgctcatgtcctgcagaagatttgagatattctttttcatctcagtgcttaatttttcctattactgcacactaatactcacatgctataattatttcatgagctaaccctctatacatccttccctttagtttcttccatgaaaaagaaaaaaaaagagagaaacctttagtctcatacttcattttacagtcaactattcaagtaaatatttctctgatggcaaatttccagatgaatctagaatatgatccaaaaccactgtcagattacatttgatttactatgtagctctcttcaaatggagcaagaattagcccgtttcctaggtttgggttcttgtgcttcctgatccttcacacacatacaggatgtgcacattgtctcagacagtcttcggaggcctagccggaaaacgctgttggagaggctgtatattacacagttacaaaaactattacttattgcaagccaggttgttaagaaggacagagttggattgtccaagacccgggagctttctagaagaaagtaaattatataggggagccacagcatataaaatacactggttatcctaaacaaaaccatggcgtagcgacggtcagggctgtgtccagtctctctggaagaatctacctcatgactagggaatcgggctcttcggtcatttatctctttggtgtgctgacggcaaattttgaaaatgtggaagtaagtgaagcagacaacaaaggcagcaggagcataaagtaaacaaacaataaagccagtaaaataggcactggtgagccaagacgtggcacaccattcaaaaatgtcaccatggtaaccaggtttcccccagccaaaaaaggaaggcaagaaaattaggcaggagtagatccagatcaaaataatgcaaattctcaagcgacaaggggtgaccagttgattgtaggaaagaggcttggttattgcaagataacgatccacactgatgcaagcaagacatgccatagaaacactttttagaactgagatgatatatccaaaaacctggcaagtcaatgactcgtggacacctgtggagtagtggagaagtgacagagtaggaaccaagcagctaactccaacgaaaagatcagcatatgccatcgtctgaatgaaatagctggtagtataatgatgtaacagtggagcacaatgaaagacaaagataactgttagattcccagcaatgatcagaaatgtcagcaacacaataaccactgtctcgaagatgcagacatccaccacactgtagtggccaaatccaagtgggcaggagtgacgctcggacacattcacaatgccactgctcatgttcaggatcctccattcagtccacctggattcattcatggcttggaaatttaaagacacctgcagacttggctacagcaagcagatgccctgcccagcatctgttaaacaccgcacatgagtgtttcagaacctgcttcagtagacagtgtcagtgcttctgtcacagctgagagtcccagagagtgctcaagtctcttcaccagcctcagttcagcagtgacacacctcagctttcgggcgggggggtggggggggggcggtaaggggtggagagaaggggataagctagaaaggaggtgaaaagaggtcactaattagtttcctctggtgccctcaaagaactttttgcagacataaggcacttctagagaaaatagacttcttattatcttgcactatgaaaaattaaatctgtaaaaagaaaaaaaatgaattgccaaaggaagaaaagcttctgtgggctgttctcctaagagaggcagtttcttagggagcaactggaaagaatgagaaaagaaaaactctgaaactgtctcaggcttcctgctttatctatgatgaaaaatgcattcatattttagattttaaataatttaagatctcaaatttggttgaaaagctaagaaaaagttcattgtggcaaagagtgtctttgggcttagttcagggattgatgttggggggtcaaatttataacctatttctcatttttctaaaatctaagaaaaacaactctatcaaagttaatttgaaaagattcatctctacatgggcagaatagaggtaacaaacagactccagattgccctataactctcatgagaaaaaagtattttccaatagaaaagagaatatacaatgaattaatgaattaacacctggcaaaatgtaataaacttctgaagttttaattctgcatgcatttttaaagcatttagatgaaagcagttttaatccattacagttactggtggtactaacagcaacgtaacttatacctcttccttttcaaaatgaattatttttgctattaatttggcatctataacttaaaataacatttgttatttcatataccaccttccttataatggagcatgataataaaatatgtagctcacagttatttctcacctttgcaactgtatacccatatctcacatatatatgtaaatataaagttagacaataaaactttccaatatactccgagcttatttgaccagaaatgctgccattatttattacttaggtatttctaataggcttcatgttctatgttgctataccttttctattttcagtagatgatttaacacattaaatcattacttcaactatatcttctgaaagtggaaaattaccttgtttattacatttgcagttatgtagcagccatatgttaaaaaatgcctcttctatttttctgtactctattttgagcaagtgctcaattaacacaggggccattaggtaggttgcaagatagtcttattttaaaatacctctaaagtatcaagatgaactttaaatcctagagtttgaaacattgcaaggctgccaggatagaatccatccaaaatgcttccaaggtcattttgatatcaggttaacatttgccaaagtattttttaaaagtgaagtcatttcagagagtctcctgtcattctttgttatcctatcttttgaagaaataacatgcattagaaataacatttcctccaggaacaatgcagcagcttaacagaaagcattcttctgaaagttattttctggtgcaccaccaagtcattcaggcaagtccttcttcttttataatagccataggatatttcttcttctacattcctagtttcacttatcacaaaacagttctcttgttacaggaataaggtaatgcttctcacctacattcactcttatcagctgctaggctgggctgcttgattcagaagtccgatttactgtgatgcagctacaaggatgctgtcagtatattcttcacaatctctcagcatcaatgactccacctgagcccaagccctactcctcctcctcatcctgggctgatgca

SEQ ID NO: 876 - DNA, 4001 bp, Homo sapiens
tcccgtctggaaggaaactgggaggccagctcatccagcctccactgctcccaaagccggaagttgcttcaagctgcccttctccacccactcatgaactcttcaaggccactgtgcccctcttgtgggaaaggagctgctgccaacctcctgctccccagatccccaaatctctgatctctggagctgacccttggaggatccctgaccaagagccgcattggttctagacttactacagtcacagaacaagaagtagggaggagacactgaggttgctcagtttaaaaacccatcatttctatggctgcaataaagaggatcacatggcaagatgggccccactctcctccacagttatagccttacagtcacctttggtttttggtgtttccataaaccttacaccaatccaacttctaacatgctatgcatgcaataggtgctgaatacaattttgtgaattgaatcaaactcaaattggtagttgaatccctgccccctaggacaaactccaagaacactcagtcagccagctgtgtgccagccaagggactctcttgtggaaagggtagccggggttcctggacttgaggaagccctaactttgggcaactgcctagagacgtgcctctctctagggacacagaaagctcatttcacagttaagatgcccacagagacttagagtctgcagagaagttgaagagcgggcacaaaagtgagacatcagcttctcattagagtctaccaggaaaaatgcctgaaagaaatgctaggagaagcatccttccttcttactctccatgctctgatttacctatcccttctgtctgtgagtgaggcccagaggatgtggttcagagtccctccctggtggctgaaggaggagaggcccaccatgtctggatggacatcaagagtcccagacggagggaagcagacctggtttccacgtggagctggagggatgccacgaagccatgatggagccctgagcaagaaggcattggacattgctctttttcatagctccctcaagcttgccagtgtctccacagtgactcctaaatgccaggattccaatttacctcttaacagacagatcagtgtatctggctaatgggcactccctcactaatggactggggttatggaggggagggctgtggtgtaacagtttcataggtgaaacccagggagcctcactcctctcccaggtcatatcattatgcctactcccccaacagatgctttccttcccccactacttacttccaacagcacccctcttacctccaggaccttcagtacctagaaggctttgccactagggcctgaggtctgggcctctagcaggggcatggtcaagttacaggatgcaagatgtgcataagtgcccagcccaaggccacagaggtattgggattcacatgcacctgttttccagatccagagcttccatcccaaagacctgagcctggccttccttcagacaagagcgtgcccctcctaagctagggaagatttccagggagctacaacacctctcctcagcagagttgcccacgcccaggacacagttgcccatcagcctgtatgctgaagggcccattcctagaatgtgggagacccatgtccatgacatggagcaagacagatggagaatgctgtttgtctgcaggatgtgggtactcctgccggcaggagatgatcaaccccccagctctgggcttcagagatgcccacaccccaataccgcctttgggatacctgagagcccatctcctgatcaaactgctcaccggaatgtaggcagggctggtccttggaaagccacccttctgtggggataccttggcactcaccaccaggctctgggtctggcccccattcctggcctagtcggcaactcctacctttgctgagcagtcccggctcccatgtgatagctcctctcagctgatgcttctccaaggctgctgaagcctgaagcactgcagtgagcggtgagaggcagccggcaaagcagagtgctccgagagcctctgggtcctaatggcctcctgcttcccacccagcccctcagagtcacttctggagcaaaaaggtgggcaccaatgccccaggcaaggtgcctggcagtgagctcaactcctctcacttctctcaggctgctggattgcgtctcaaaaatttcgtggggccaggaaatgataggtaggggagaccctcttgaccagcctgatgaagtaaaaaaaaaagtacatggagtcagaaaatccaggtttaaggcctggctatggcacttactagccgtgtgaccttgggcaagttgcattttggccttgatttcttagcagttcaaagagaagataggagagatgcatggttctgtgtgacatcagaaccaaggtgctgatgcaggcaggtcagcgcagacccagggccccaaggcttaggccagggaggcggctgaggctccaggggatggtccaaggtttggcccctttggaagctgcctaatgcgtatgggggacaggtttaggagcagcactcaggtttgaagggcagctgaaggctttgtcttaaccctgcccttgcctcccaaaagcacattattattatttgcttagattgtatgtttattggaactggggctgtgagggctgatggagattggcagggagggggcgggaggatctaacatccccccgagccaccatgggaaccaccacaacactgcttcctgaaggagacagagtgggggccagggactcaggaatgctcacactgatctggatttgtgggactggacagagctaggtagcatcagccactgagcatcgcccatctgtggcatgatgggccttcagagacgcaatgaaggggcatggcctccctctagctatgaagaaaatgatcatttacccgggtacatgactgatacccaaggatagaatcctaacattgcaaagctgtaggacatcctacaggccaaggtatccatgtttctgagacccagagagataaagagattgctcaaagccacatagctccacatggcagagccatgagtctaaacagggaattcaggcatgatcccctactccagagcctgcttccctgagacttgcctatctagggactccttctgcctctaagaaggaaaaagggaattctggaattgtttaccagacccaacccaaagagccataagaacaatgagttacccaaggacctcactgggacaagttggctgccccaagccccaggtcaaaaacaaagaggccactgacaaaccaagagccgatgcagcaagtgccgctgtcaccagccaccactttttgagctgttatgagtgccaggccctttacatacagtttctttgatccccacaccaatctatgaggcagccatgacttgccctattttataagtgaggaaccgggtgctggaggagaagtgactttccccaaatcacacagctaataagtgcaagagctgatatttgaacccagatctgtttgaagtccaagtatttcctcctccttctcccttcgttccgtggcctctccagtggcctgacacaagactgtggactacagccctaaaagctatcttcatagaagtagtcactgccttccagaaagcctaaaacagacctcaaaattaggcatacctgcgtacaagaaattcaaatggaaataccaaattgaaaacctgtagacagcaaagtgatttttaggaagccctgtgctgttgtgttggcaagattaatttggcatcaagcagattgtctgggattaggtaaagcctgtccctgctcagcacccacattcttcctgcagggccccagcccagactggcatggccccttccgagggattcaataagaactggagcagacctgggcccactggaacaggattttagaaagagcgctagactggagtcagaaaaccttggttccagtttggcgccattctattggttggtgg

SEQ ID NO: 877 - DNA, 4001 bp, Homo sapiens
ccaaggacgtcggaagccggggatctccgcttccctcgggccccggctaggttaccagtgctggcccgcggcgcgggtgcccagttgcgcctgggacactgcgggcacggctgtggcggcaacggcagcggccgccgcgtcgccgacgcccggcaggactgagcgcacggagcggcggaactcctcgttcctccacgtgtagagcagcggattgagcgcggacagggcgcagcacaggagccagctggccgcctgcactccccagggcaccggcagcgagaagccgctggccaggctcacccacaccagtggctgcgtggccagcaggaagacgcagcagagcagcagcaccgacaggccgctgagacgccgctgtgcccgccgcgggtgcagcgcgggcggcaggggctgggcctgcgccgggtgcgcggcgccaccggggcccggcgcgtgctgggcgcccgggaaggcggcggcggcggcggcgcagccgggcaactggtgcagcaggtggaagttgagcacgctgacccgcttgacgctgacacgcacgcggcgcacgatgcccaggtagcagtgcagcagcagagctgtctgcgccagcagcgccgcggcggccagcagcgccgggtagtggactcgcggtggcgcggcgccgggccgcggtgcccagggcgggagcagcagcacgaggcccagggcgagcgcccaggacagcgccagcatgcccgccgtgtggcgcctctggtacagcgcctggtaggtggcgggcgcccgggtgatgagcaggtagcggttcagggccacgaggcagtgggagaggagggacaccgtgagtccgaggcccagcagcccaccccgtagcaggcggtagctgcccccagcgccgtcccagtctgcggggggctccgcagagccggtgggcaggagcccgagcaccgcctcctgcggcatccagagggcgcagacgctgaggtcggcggcgcagccgttcacgatgaaggcgttgctggtggtctgcagctttcggaaggacgacacgagatagatgaccatgccgttggccagcgtgcccccgatggccaggcccgaatacaggagtgacaccgggatgcgccggcccgcccacgactcctcttcctcgcagagcagcagcagcgagccaccggtggtggaggaggtggatgtggaggaggagttggtcattctggccaactcttcacacctccctcgctagcgtcggcttctggcagcgcggtccatcctgacactgtcctgcctgccagaagggcaaagacatcccttcagccctctgccactgacacaaaaggctgaagcagaataatgggctgggggagggggagaaagggagctcgaggaggaggacgggggtggcagatgacaggtgcctgcctcggaaatgtctccagagccaggggaaaggccactttgcattggattcagcaggtatcggggaagccctaggacagagcaatacctaaaacagtctcctcttctcccccaacacacacacacacacacagagagagagagagagagagagagagagagagagagagagatatgttgccagctggaggacctagttccaggagaaagcagagatatcccagctggggaaaatcccatgggaaagaggtgaaggttaccttgcgtttaggctggtccttagccggtgtctcagggggagggatgccgggaaatacctcctcagcaacagcatcagtggtccagaaatcaacaggagaaactcagctgggatcagtgccaggagcaagtgcccgcttctcccaagcagcatccacacacatggtcctgggcaggaactagcagctgcagggagacttctcagctggtatcagggctggagaaagtaaagtggcgggctgcaagcccaggcgggtgggcaggcaggcagcagcagcaagaatgcttggctgcaaaagcagaagctgagctcaagaggagagcaccctgtgctcagaagcaggagtggtggctgatgtggtgaacccactcgaagctctctcctgcttagttatacatcatccagggaaaagacagcctttccacgcttggcatgaattattcaatagcttccaacttgtaaaaggaagaaaaatatcttgctcagaaagtcctgtcgttaacaagtttctctgtcttttctctctcccaatcaccttatttttcatcctgtttcatttttctttccgtcctttttttccctcccttcaatattagaataaaatttaatataccctagagtatttcatctcagtctgatgcattttgtgggcaagatttttctgtgagataaatatattcccagtacccaggactgatctctttattcccacattttttaacgagaattactttatgcactacttgaaattcatttttctttggtaaagtggaacatagacaattatccacagaaaatctccattcctcaatttaaatcgtactttcagtgttttctcatcaacaaactcctttccggagtttgttttgtgttttagtaatgaaatggttagagggtaaaaatgaaatgggcaaaagatttaaagcagatgtcagtggtacatctagacaatggaatattattcagtgctaaaaagaaatgagctgtccagccatgaaaagacatgaaggaaccttaagtgtgtatcactaagtgacagaagccaactggaaaggactacatactgtatgctaccaactatgacattcttgagaaggcaaaactatggagacagttaaaaagaccagtggttgcccgagttagggggaaaggaggaatgaatagatgatcacggaagattcttaggacagtggaactactctgtatgataccataatagtggatctgtgtacttataaatttgcccaaagtggcagaatgtgaaacatcagtgtaagccatggactttggggaatgatgtgtcaacgtacattcaattgtaacagacgaaccactctggtgggggattttgataatgggagaggctatgtatgcgaggggcagggagtacatgggaaatctctgtatctttcactcaaatttgccatgaatctaaaattgctctaaaaaaataaagtcaattttaaaaaaatgtgtgtcagggggaaagcaagaaacctgaataatccacagtgtgaacaaagatgacttttcacttcagaactttttgtcttgtctgtcttggagatttgcagtctgatgttggcatcttctttggtgcaagtgttcatttatccattccatgtgggaattttttcagaaaaggagttctctcaattattcactggaaaagtcatgtatttgaaaatgtaactcaatatgggaatatggtaacatggcataatagaaaaaaatgttaggtggggttgcagcacacccagatactaagccgagcatccatcatgtagccttgcgatggattattttcatcttgtcaaataagttcacagtcagtcacttcaaaggccctttctgttaaaactttctgtgaatccctattcatgaatttagcatttcttctctctaattatgacacatggcatatacctcttctatctaacatgcattgcagttgtagttctgggtcatatgtccctaagagcaatgtttcaggagagaggtcaaaacacagcttctctgcttttctttttctatttcaaaatcaatatggttagttgatgacttcaagaactctgatgaggattaaggataagcatgacttgatagatttggtccagctaagctatatctgaatgaaattggttggggcaggggcaggggccggagggggaagtgaaagaaaagaaccagtgacttgctattcagagggttgaaggtttcgatatcaagtttactgatgtaaatgagatgagtatttgtcatcatctttttgcctattgccatttgtccttattgaggttttgagtgcattaagcacagcaagcctgcattt

SEQ ID NO: 878 - DNA, 4001 bp, Homo sapiens
gaaatggaaagctactttggttgtgggcagggtgtcaggtaagaccttcctaaagcgacatttttattaataccgaaaggatgataaagtagccacataaatatctgaacagagaacattccatgcaaaggaatctttgggtctttcttccacatttgtaaaaaccaggtttaacaattaattactgcatgtggatgcatgtgtgaagtgaaagtctatgattataaggcatacaaaattagaaagccacttcctcggttcaacgtatcaattatatccatgctaaaaatcgtagaggctgcaatgcaaagccaattttctactgacattcttatctttattctaaatgaaaagaaaagctaattaaatattgttatttttcttaaattggtactaaggctaaaaataaccctgagttgtcaccaagggcactgggtagtcttagaaaggttttaagcagaagagttacatgtctaggtttttttacattaatacatttgaatattatgcagccaataaaaacaatacttatgaaaactatagaaaaggtggtaaattttaaaaatgaaaaaactattgcattagagtggtaggattatggatggcttttccttctttcttattttcttaaatattgtaaacaagtttttgaagagaaaaggacaatgctccgctctacggagacgagtattaggatgaagcaatacaaaaacggaatcaaagaacacaaatttagttcactttaagcccccaaaggtaactgcttctgttatttgccgtttgagagaaagaacaagtaaaaacaaccacacacacacaaaatctttattggaaagatggggggaagaaggtcaacaggcagtctgagcttcacaaatattggccaacaattatttattgaatgcctgcacttggaagtggggatacagctatgaacaaggcaggatctcaaaaaacaaaatcagaaacacagacataaatgatgccagtgctatgatgaatgctaggaagaaacaataattaacaatagattacatggtaaaagcaagaggctaactagacgaaacttctattgagcagagacagtgtcttacatgtttttacgctcagagctttatataatggtcgataaatgtttgttgactgtacaaacaaatgaaggtggccaatggagaagaaatgagggtcagaaaaacatccggaaaaggtgggtaactaagcagaggataaaggacgaggtgtcagtgcaaaaacgaaaccttatactttcaagcacaggtattaccttatactgatactttgaagcagcaaatttctccacacccggattcaggatttgacatctaacagcaaagcctgcactgacgtgtcctcagtatccagtattggcgcgtcgcacaccgcgcgcccagaaccacacaggcttccccagtccaggatcagttggcgcagcccggaagcttcgaggagctcctagaaccgccgccttagctggcggcgccggctcttagcctggaggtcggcggaccgcttccaaaagtggaccgaaattccggggatggatgccgggtggggacgcggacggccgcaggccagtctcctgacagccggggctgagggaaccggccgcagcaaatcgcacaccctctctgggtgccagagtgactagcgcaggacgcgtaagagaggagcgagaccccggaccagcccgcaccgcggaggaccggagagggcgattcggtaaagggaggcggacgggtgtcggggcgggaggcggtgactcacctgggaggtaatcatgatgctggagtcgatgaggaaactcatggcgaagtgtaaggaaggctcctgcctccacttcccactccccgaggccacagcacgctggggccacaggccccctcacacggtctgccttctcccaggtgctgcagccgggactgcggctctccagcccgacgccatcaagctgcgccccagtcagccaatcagcgtctacatccacagccccgcctcgggctcggggtgggtggggcggacgctaggctcccgccgcggaggccccaggggcggggcttattaggggcggtgctaaaagcagcaatgcaaggtagcgttaacgtttctgaggctgaaggaggtagggcctgagagctaagtggtaattctgttttgtaatgatcctaagataataatggtaattatagtaagtcgggcattgtgtcctaaatgttataacttttacttgactcggcaaatatgactgtacaaagtgagggaagactggaaagtcagatgagatatgaacaaatataactaaccaaatacatttctgtgacaacaatgaaaagcacactgtctgtagcaatttagtgataatattgtactgcatatcagtcaggccacaggtggagtactgcactccatgtaccacactttgaagagattttacaggccgggccggctcacgcctgtaatcccagcacctggggagaccaaggcgggcggatcacctgaggtcgcaagttcaaaaccagcctgacaagcatggagaaaccctgtctctactaaaaatacaaaattagccgggcgtggtggtgcatgcctgtaatcccaactactagggaggctgaggcaggagaatcgcttgaacccgggaggggaggttgcggtgagccgagatcgcgccattgcactccagcctgggcaacaagagcgaaactccatctcaaaaaaaaaaaaaaagaaaagaaaaaagaagagagagattctacagagacatattggagctcgctcaaatgtgagccaccagataagggctgctggaaggaggcgaagaaagatgactcagaacatgacatctgtcttcatgtgaaagaatgggtagaactgatgtggcgctacgaattatctgtagggcaaaggactggaagttaaatgaagatagattttaattcaaaacaaggatcagttctttaagagtctgaagaagggttattttaggaagtagctgcctctgcccccttcccacctattgcagtggatcaaatatacactgaatcactacctcattcattcaacactcatttcatgaaggcttaacgcattgctgtggggcttactctgccgccgacctggggcctagctaggctttgtagtctatatagtctcatagtcctgcaaactggctccagcccaggaaatcaccctgtgtaggagtggctgcagtcaagacgcaggaagacaatcctgaggggacctgacatccagcatctgagttcagactactatagtttgaataagtgatctgcagattcattatacacaagggaacatgtcttccttttgttggattgaactctgtgataccaagcagtcaaaactacctgtcagatgtccaatccctgatccagaatttcaaggagctatggaggcagctgtacaatgggagtgtcataaaccagagaactttgtgtccaggctatatctattaggtaagcaggtagattcccacataacagcacctaactgacattcaagagtgtgtagagtgcagagtgctgaaagagactatcaaggcaagcagtttaccttggtggcttactggggtgcacagtggggatcagaatatcagtaacgaggaatagcagagaaaggtgtgcaatacctgctggcctaaggcctatgcaaagctttgggtgacactattcagaatgctccctactgtaccacttgtgtccaggtaaaggacaggcctaggtgattcaagcgactgctttatcccctgattttgattgaggaatgtctttagaaaccttcgcactgcatttagtatccaattgactctcctttcaaagcaagtctgtactgctggtggtggactctgacactaaaatggcttgtcctcccatctctactgctggtaatattctcccgatccactctagctgctgccatcctcttagaatagtgggatcttttggttctgcctccatggacag

SEQ ID NO: 879 - DNA, 4001 bp, Homo sapiens
ataaaacatggaaatgaggaagaaggcagccgaaatggaaagctactttggttgtgggcagggtgtcaggtaaaaccttcctaaagcgacatttttattaataccgaaaggatgataaagtagccacataaatatctgaacagagaacattccatgcaaaggaatctttgggtctttcttccacatttgtaaaaaccaggtttaacaattaattactgcatatggatacatgtgtgaagtgaaagtctatgattataaggcatacaaaattagaaagccacttccttggttcaacgtatcaattatatccatgctaaaaatcgtagaggctgcaatgcaaagccaattttctactgacattcttatctttattctaagtgaaaagaaaagctaattaaatattgttatttttcttaaattggtactaaggctaaaaataatcctgagttgtcaccaagggcactgggtagtcttagaaaggttttaagcagaagagttacatgtctaggtttttttacattaatacatttgaatactatgcagccaataaaaacaatacttatgaaaactatagaaaaggtggtaaattttaaaaatgaaaaactattgcattagagcggtaggattatggatggcttttccttctttcttattttcttaaatattgtaaacaagtttttgaagagaaaaggacaatgctccgctctacggagacgagtattaggatgaagcaatacaaaaactgaatcaaagaacacaaatttagttcactttaagcccccaaaggtaactgtttctgttatttgccgtttgagagaaagaacaagcaaaaacaaacacacacacacaaaatctttattggaaagatgaggggaagaaggtcaacaggcagtctgagcttcacaaatattggccaacaattatttattgaatgcctgcatttggaagtggggatacagctatgaacaaggcaggatctcaaaaaacaaaatcagaaacacagacataaatgatgccagtgctatgatgaatgctaggaagaaacaataattaacaatagattacatggtaaaagcaagaggctaactagacgaaacttctattgagcagagacagtgtcttacatgtttttacgctcagagctttatataatggtcgataaatgtttgttgactgtacaaacaaatgaaggtggccaatggagaagaaatgagggtcagaaaaacatccggaaaaggtgggtaactaagcagaggataaaggacgaggtgtcagtgcaaaaacgaaaccttatactttcaagcataggtattaccttatactgatactttgaagcagcaaatttctccacacccggattcaggatttgacatctaacagcaaagcctgcactgacgtgtcctcagtatccagtattggcgcgtcgcacaccgcgcgcccagaaccacacaggcttccccagtccaggatcagttggcgcagcccggaagcttcgaggagctcctagaaccgccgccttagctggcggcgccggctcttagcctggaggtcggcggaccgcttccaaaagtggaccgaaattccggggatggatgccgggtggggacgcggacggccgcaggccagcctcctgacagccggggctgagggaaccggccgcagcaaatcgcacaccctctctgtgtgccagagtgactggcgcaggccgcgtaagagaggagcgagaccccggaccagcccgcaccgcggaggaccggagagggcgattcggtgaagggaggcggacgggtgtcggggcgggaggcggtgactcacctgggaggtaatcatgatgctggagtcgatcaggaaactcatggcgaagtgtaaggaaggctcctgcctccacttcccactcccggaggccacagcacgctggggccacaggccccctcacacggtctgccttctcccaggtgctgcagccgggactgcggctctccagcccgacgccgtcaagctgcgccccagtcagccaatcagcggctacatccacagccccgcctcgggctcggggtgggtggggcggacgctaggcttccgccgcggaagccccaggggcggggcttattaggggcggtgctaaaagcagcaatgcaaggtagcgttaacgtttctgaggctgaaggaggtagggcctgagagctaagtggtaattctgttttgtaatgatcctaagataataatggtaattatagtaagtcgggcattgtgtcctaaatgttataacttttacttgactcggcaaatatgactgtacaaagtgagggaagactggaaagtcagatgagatatgaacaaatataactaaccaaatacatttctgtgacaacaatgaaaagcacactgtctgtagcaatttagtgataatattgtactgcatatcagtcaggccacaggtggagtactgcactccatgtaccacactttgaagagattttacaggccgggccggctcacacctgtaatcccagcacctggggagaccaaggcgggcggatcacctgaggtcgcaagttcaaaaccagcctgacaagcatggagaaaccctgtctctactaaaaatacaaaattagccgggcgtggtggtgcatgcctgtaatcccaactactagggaggctgaggcaggagaatcgcttgaacccgggaggggaggttgcggtgagccgagatcgcgccattgcactccagcctgggcaacaagagcgaaactccatctcaaaaaaaaaaaaagaaaagaaaaaagaagagagagattctacagagacatattggagctcgctcaaatgtgagccaccagataagggctgctggaaggaggcgaagaaagatgactcagaacatgacatctgtcttcatgtgaaagaatgggtagaactgatgtggcactacgaattatctgtagggcaaaggactggaagttaattgaagatagattttaattcaaaacaaggatcagttctttaagagtctgaagaagggttattttaggaagtagctgcctctgcccccttcccacctgttgcagtggatcaaatatacactgaatcactacctcattcattcaacactcatttcatgaaggcttaacgcattgctgtggggcttactctgccgccgacctggggcctagctaggctttgtagtctatatagtctcatagtcctgcaaactggctccagcccaggaaatcaccctgtgtaggagtggctgcagtcaagacgcaggaagacaatcctgaggggacctgacatccagcatctgagttcagactactatagtttgaataagtgacctgcagattcattacacacaagggaacatgtcttccttttgttggattgaactctgtgataccaagcagtcaaaactacctgtcagatgtccaatccctgatccagaatttcaaggagctgtggaggcagctgtacaatgggagtgtcataaaccagagaactttgtgtccaggctatgtctattaggtaagcaggtagattcccacataacagcacctaactgacattcaagagtgtgtagagtgcagagtgctgaaagagactatcaaggcaagcagtttaccttggtggcttactggggtgcacagtggggatcagaatatcagtaacgaggaatagcagagaaaggtgtgcaatacctgctggcctaaggcctatgcaaagctttgggtgacactattcagaattctccctactgtaccacttgtgtccaggtaaaggacaggcctaggtgattcaagcgactgctttatcccctgattttgattgaggaatgtctttagaaaccttcgcacagcatttagtatccaattgactctcctttcaaagcaagtctcttctgctggtggtggactctgacactaaaatggcttgtcctcccatctctaccgctggtaatattctcccgatccactctagctgctgccatcctcttagaatagtgg

SEQ ID NO: 880 - DNA, 4001 bp, Homo sapiens
cacagcagagatttaaacagacacacagaagcaatacagcatgtgctttgggatcaggccatgatttgaatctcggcacagtgacttattagttatatgatcttacgctaaactctcagttggtgtgggcataatgacacttacctaaaatgtgctgtgataattacagacatgatttataaagcacctgacccagcacctggctctgatacataacaaaagtactcaacatagtgctgtagtaataacagtaactgttattataaaatagacatatttaatatatattcaaataaatttagaataacctaaatctatgtcagattttccattttaaaattccagagaactaattacaaatttctaaagatagatcttagaaatattttatgtttatgaaaaggtcatttttaaaactactatatcttatcactgttttaattagtctagtaagcaagtctcagatctatattaaaatatgtttgtaacaccgaatatctgatttaagaatgtaagaaaatacaattaaactgcttatctggccagagaggattttggagacatgcctctacaacaacatcacacaactttttactttgaaaccgctccaatacttaaattataagtaatagcctgggaaatagcttgcgaaaacgactccgtggtagttgtaaagagaagtaggtgtgagaccacccctaatccctgaggcccccctctccttacacacaccatgtcaaccaacagtgatctaccctttttaatgttgtttattcacttctaaacaatcaactaaagctgctcctgaatagtgagaacccaatcaaaagtggtatttatcagaagcaatcacaccggctattatcaggccagaaatcttcggtacacccttctaaagtggcagcttgaaaactcagctctgttggtcctgctgacttccaacacaccccacgaacgctccaatgcaaacccgatagaaaggaaagccaagaacctacttcgtttaattctacggtgtggttaaattatgcattaaggccaataaaatttccatccttactcgttttctttaacagagttcaaatgctactagttcaaatgctctaactggttactattaaaacaaggaaattacagatttttttttattcgaaggtattctatagatttcaggaaagagttttcttaacgttttatgtttacttactctttttgcagcaactaccaatttctatggtaaatcgaccagttggtgcccaaaagttcactaatttaagcacggtcaaggcaggtatttgccataaactgcctggtttaggtaggacgcgcccgactccaagtgattgcaatcagcctcggaatgaattccacggggattcgggctttgattcacaatttgttactcacattcagagtggtaagaagtcgctggactctagtatagtttttatcttaaaaaaaaaaaaagactcaggagtgaggctcttaacgctttactctcatttgaagaccttccgacaaaaaagcagcaactcctcaagccgagtttctggtttcttgagcatcgacgccgcgtccccgcagcgcccacaggtcccgcaagcccccagcccgcctcctgcccaaaacaaaggacgtcacccccagacctctggacacagaagccccacacgcacgcacacgcacccctccctgtcacctccctccgagagcccctcaaacgcctcagaacccgcgtcgcggaagcgctcacctcccgcgggcgggcgggtcccgggtacgcggtgaaggtgcagcggcggccgcctcgggcgacagacgggtggtcacggcccctccccaaggcaggggcaccgcaggaggccggcgcgccccctgctcccgcccccggcaggtcacgtgggccagagctcgtagcgcccctcgctttcccggagcgtccctccgccacctaggggtcccgccgctccgccggtctcaacaccgccctcctctgcgcctgcgccccggctccaggcgctctcattcaaaccgacaacgccccgcgtctttcggaccggccaatggcgggcggcgcagcggggcggggcggggcgctggttgcccccctcttcgcagtcctggggaaccgtctgcgtgtcaaggtgacagggggcttgggagcttggtcctcctctgctccgggacgtgtcctcaaccctcagactgaagtttctttcctgtcctcttctttcttcttcagacactaaaaagtagagcaataaatattgtctagagttggccgggcgctgtgacggacggctataatcccagcactttgggaggccgaggcgggcggatcacctgaggtcgggagttcgagaccagcctgaccaacatggagaaaccccgtctctactaaaaatacaaaattagctgggagtggtggcgcatgcctttaatcccagctactcaggaggctgaggcaggagaatcgcttgaatccgggaggcggaggttgccgtgagtggagatcgcaccattgcactccagcctgggcaacaagagcgaaattccatctcaaaaacaaaacaaaacaaacaaacaaaaaacatcgtacagagttcagatagaggctggcctagatccctttaaaaaaggagcgcaaaaccagcgccgcctttttggaagacttggtgctgcgctacagaatgagtgtcccaagcggcagatgcgggatatagaagaaaaagaggcctctgtggaaggaacagagggaccgtgtgaaagtctgaacaaggcagcctcagttcttgaggctgtgcccaaccctggcgtttccagctgttggaaaagcaaacttctgttgactacagaatcgctggttcccaggaaaattgggtggcagttttactcagtttcactcagtttcagcgcctacattctaaagacactgggaagaataagttttatttccattcacctctcctccatgtcaaggtgaccccaaaatagtagtcaccttatagtttgttcttcacaaaataccggccgggcgcggtggttcacatctgtaataccagcaactttgggaggccgaggcggggggatcacctgagttggagaccagcctggtcaaaatggtgaaaccccgtctctactaaaaatacaaaaattagccgtgcctggtggtgggcgcctgcaatcccagctattcgggaggctgaggcaggagaattgcttgaacccaggaggcggaggttgcagtgagccgagatcgcgccactgcactccagcctcggcgacagagcgagactccgtctcaaacaacaacaaaaaccaaaataccaagaccagagtctctctggggtaaagcatctgatgaatttacttagattatttttcaaatagatatttctcttctgaaatgaagtttaaatgtttctacagggtaaaggctatgttaaagaaaactccgggttcagtatctccgtgaatgatggccataaccagtgatccaagcaacatttcccattaggtgcatgttatggcaaattgcttaaaggaacagctttatcatcaaactagacctgggtttgagttccaattctgctacttacttgctgattgaccttgaatgagttatcttctttagtcttagtttccccacctgtaaaacataataaagcctcttctaataagggttgctatgatgcttctgtgaggtaaggttgttaagtggttgacatagggcctgacacatagaaactgctccatacttgatacctattatcgttacaaccatctttaatatcaggttcttgtaaataacaatggaattggttggctgtactgtttcagaggtaggtattaattccttcttaattataaattcttttaaagtatggatactgtgaaagccacaaaggaaattttatatatatagagagagagacaggacctccctctgtcacccaggctggagatcactgcacagcagcctcaacctcccagggccaagt

SEQ ID NO: 881 - DNA, 4001 bp, Homo sapiens
aatgtttgcaggtgaaggaatgagcatattgcccaagcagcaagcctagcctgggttaactcagcaccaattacagcttttctggactccctgttccctggtttactgctgaacttggcaactaagagcatagactctggagctggactgtctgggttcaaattcttactgtcttactagctgtgtgaccttgttctatttttgtcttagcacttactactactaggaattacctcgtgcatttctcagttccttgtttattgtctttcttctccttaccccatgtaagctccatttagtggaaatgtatctgttttgttcaccactgtatccccagggcctgacctagtatctagttagtatacagtaggtgttcaataatgaacaacgaattaataagtagcagagctggtcagacgctaaacctggggctctctggtgagctgccctagagagaacaggaggcctgaattggagcgggccctgttcttggttctttgcccagagttctaaatgaagttcctgctgggatccaccaaacacaggtgcaaagcactctacagtttactaagtgcatccacgccttcatctgatttgaaactcacgacactctgggggacaatcaagcagggattactgtccccaagactcccagcataatcgaaaatttcaaggcttatagagtactggtcttcactaaagatggtgttgctcccaggagaaaaatgttgacatctatttttgtgtggttcatccaaaactggacgctggcccacctgttcattagatttcaactccccagccatttcacaccagtccccaggtccatcctgaagaggtccactctgggagttcttcactgcacataatgtgacatgcaggcctctcaatgtagtgttcaaggtcccgcctgctcccttgccagtcgtttcagcctcatcttccaccactcgtagcctccagctttagactctttgaagcacaacagctggaactcctggccccgcgcccccccacccccttcttgctgtttgcttcttagtcttgctaaaatccactcgtattcaaagactcaacccagatacccttcctctccgaagtcttctctgagcttagattccctcttggtaatgagggggcaattagcctggatgactcttatgtgtgcccctgagctgccatctaaggacttggcctagagaggaccccggatgtggcggtggggttctcttccaggccccgtctttctagtgtagtgtgaccttgtgcgaatgcctgccctctctgggcctttgtgccctctcccagggatgatccgtgtgaggtctccgtgcatctgaaataactctctctctgccctgcacattgatctccacagtgttcttcactggactccgaatcagccactccccgttccagatgcagaaaatgaggacgggagagggaaaggccgcacgatgctacggttacttttttcacccgtgaatggcaaaggctgggcagtggtgcccggcctcccggcgaaggtctggaccccgctgcccaaaggtgccggtagcgaagtgggcgccgactgcgagcgcttcgggttcctccgcgccaaggccgtgccacgtagccgcgggccgggccgggccgggcgcgggatgggggcgccgcgccagaggtcacggccgagcggggcgggggccggggtttggcggccgcgcggctggagcgtcctcggagccacaccgcgcgggggaccgggctgcggggcgtccccagcaggccccgccagggcgaggccgggcccagcggcgccgccagaccccgcgcactcaccgatccgcggtacttctccagcgacaccagtttgccccggatgttgaccgccttgaagtcgtagaagtcctgctcctgctgcgcgcaggccgcagcccacaggagcagccacgccgctgccaccgtcgccgccaccatggcttgttccggaggtggcggcgtcgcgagggcaaagacggggcggggggatctagcgcggggggcgggaggaggcggctctggcgccgctcggcccgcaaggcaggacgcgccgcgttctcgttccctccgcaggcggtggatgtccggctctggacctcagtttcaccgtctgtcctgaggcagcgcacccctgccccggaccccagagccagggtttcaggattctgtcccctgagaccggagttcgtttcagtgaggctccctcttgtcccaggaaacagcgacttggcagggacagggaggcaaaaatctgagagctcagcttctcattagtgcagcggccttaggctggcctggtcacgcccccactccgacctcagtttctccacatgttaagtggagctagtcggtataggatggaagtaatagaaaaacggatgcgaaacactttaacagttgaatggtgcctgcaaacttcaggtgaatgaatgcatgttccctgaaagtgatggctgggagaagaagagaggaccgtgggcctgttgcaggttaggttcctggaagcagattctgagatggagattggagtgcaggatgtttatgagggagcacccttgggatcaacaggcgtgggaaggatgggagggaacaggagtggcacagggggaaagtagtgagctccatgcaggccccaagacagttttagctgactcgacagggactctagagctagagtagcccatcagatgagctaagatggccaggtcatcctgcctttatcagtccttggatgtggggccacctggcaagtggggcaacaagggccaagatggccctgtctgtggagaagctgacattaaaggctttgtgctaacagcactcctagcagctggtgtctgtcctaagtcctcagtgatgggggatctgggcagcacatcacaatgtctccccctgctcagaaaacccctgttgagcccatgaaatgtcaaacatggagctggatcctgtactcacaggctgtgagttttttctggaaactcacagactggtgtgagagaaaccaggtaaactgcagattttatgtaatgtggtaagggctaagcactcctgtggtcatcaacaaaaacttcctgagcaccttttctatgccaagttttgctttaggtgattcttaggcagggatgaacaggagggcattatctctatccagggagacacaggaattaaataatttataaatagctctaaaattactgttgtggtgagtaccacctaaactagcctggagggccatggagggctttccagaaaaagggagatttgagctgagctctgaagaatgaggagaaattggtcaggatgaagcaacatacaagtgcaaaggtcctggggggaaaggaacatggtgcattgagtaacaaagaagcctcatttggttggaacagagaggacaaaggatgagagggaaaggtggagaggcaggagggagtgagatcacacagagcctagtaggccacagtagggactgtggtctttaaaccaagaaatgaaggttctttttagcagggaggtatcacaatgagtcttttgttgtagaaagatctctttcgacagggcccggtggctcacacctgtaatcccaatactttgggaagccaagactggaggattgcttgaggccaggcgttcaagaccagcctgggcaacctagcaagaactgtctcttcaaaaaattaaaaaattaggccaggcgcgatggcttacgcctgtaatcccagcactttgggaggcctaggcaggcagatcgcaaggtcaggagaacgagaccatcctggttaatgcagtgaaaccccatctctactaaaaatacaaaaaattagccaggtgtggtggcacacgcctgtagtcccagctacttgggaggctgaggcaggagaatcacttgaacccgggaggcagaggttgcagtgagcagagattgtgccactgtactccagcctgggtgatagagcgagactccatctaaaaaaataaaa

SEQ ID NO: 882 - DNA, 4001 bp, Homo sapiens
tttatttataaaagattgacaaatgctcacaatcatacaaaacaactctttaccaatagaatgtagttgggtcgattaacttatatttatttgcacagatcagttctttacagtttctttctgatgtaaaaggaaaaaaaatttatctataaagttaaaatgccttctcccaaatataatattcacttgccatgtctatactttgacacgatttcaaaaagcacccagttaaatcattcagatcagtcgatgggcaaaaactatgaagttttcctgactctatggtagagctaagcatgcatttcctttaatgacagaaagaacatgttcatctgataagaaacaaaaaacaaacaaacaaaaaaaggtcgatataaattctccactgtgatatacaacacaaatacctttcttataactttcttatcttccttggtcgggcacatgtcttgggacaaaggctaccttgaaagctaagcacggctgaatggtgagtcgattgcgaattatcagtgaatggtttggatatgatcgactaagactccactgggaagagtgctgtttagacgaaaggtaaggtatttgattgcccctgcacctgctgcagagccattctctggctgtactggagtcccaatctgttccactgcagaaaaagcgcttttcatagggattcagagccacatgaataccagccagcccttgaagactgcaaagcaagaccaattttttaactgacttcttgcagtcccctctggcttttcccaggaaagactgaactcattaagcaatgctaatttaatcacaagtcatcaaggggtggggagttatataactatctttaaaatttcaaatcaaacatgataaaatctcaggaaatagatttttttaacaaaacccacacctcaaaataaaaaaaaaaaagaaatagaagtttatgagttttaggatcaaataaaataaaatcaaacatcaatattttcttacaactatcacatctactagatagttccaattcatgactttttaatgtagtaatatgtgagatcctggaactgaacgtgcctggcgtgcagaatacaaatgcatttttaaactcgtaagacaatgtagaaataagtcaggtacacaggaaggatcactgacaatcacgttaaaaaataactacctcccttctctcttctccttcaaccacagcgtagtgataatagtgatatttccctcatgaggcgggtgcaccttggccatatgctttaaaaaatcaaaactctgccgaagtccgctgtggttcctattcctgtagggaggatattaacctggtaggtaggtgggagaggttcgtagcccgctttctaacaattggatggtgtttgcctcgctatagtcatgattagaatggcggtcaccaagaggtatttattggtgggatgacaacatattggtattgacgttatttaaaagagaaagaaagagcgatcacggtcaagtttgaaggtccttatgttacacccacgcataattcaataggtgaataaaccttgtggcccccagacacacgccaacagcttgaattacccggggtgaaaccggcgagacgtccactcagggctttcggtcctgaccagccacggaacaaacaacgtcaattcattctaagtgcctggtgaaggtagaaatcagaaaccgtgtctgtgtcacgttagtcgtgacaagctgcgtacctgcaatgacgtgatggaagcctcctcctcgggtcccttctctctctctctctccctctccctctgccttctctgagttctctagtccacagcggggtctaagtttggtctcccgccgccgctttcagttcgaccgcagccagactgcagcagacgcccataagagaagcgcgccggctgagggtgcaggagaggcgagagcgcgccccgcgccgcgcggtcccaggctggctgctcctgcagatgtgaaaggagcccggagacttagctctgaatcctctcggcgctgcatggggatattatcagagtctgggatttctattggctctgaacaccaaacaaatcacaccagccaccccccttctctgtttcactcagcgcttgtttctcatctaacccacaaacattgcagccacaccacacacttcagtcgcttgcaatgtttctcttttcctccttccagtcagtggatttacaaccctgtggtcagctctaacattttttttagcagacttccaattctaaccttcttgtttatgtagagaaattctccctccatcccctaaaccagaaaaaaacaaaaaacaaaaaaaaaacactcattcccttcagatcttcttccttttgctgatgggtttccaatgtgaagaatgtagaaagcctgtgtgtgatatgtctgacattctcatacacgtgcgcttacacacacacacacacacacacacacacacacaccaggctccttttgtttgcagtaactgaggccagtgaaataaaaagcaagctgagcctaataacctaagtgagagcttaactaataaaatcttgaatgaattcagtgcaaaacacccattgcttgaatttgttttctgttccaaatagtactttggtcattattatcctgatttttgtttattgaatgcagaggtttctaatgcaaatcagactcttcaacatccagagaacataaaacaatgacgccagaccaattcttgtgctccatcggcttggtgcgttataccagaagcgtattgtgacgcctaagtgcttgctcttttcattattttttgaacttctcaccactgatcatctcaggactgagactcccttagtgtgattcaccagccaaagacgactattcagactctgctgatagaggttcctggatgaaaattttttatctgtatgtgtcaatagagataaacctttggccccttggcagggaaagggcccaagaaaaatctgagatcttacaaacttggctggggaaattcagaataaaataaagtttcagtgtgtcttataaaacagaccctcccttagacttttccccaaaatcaatttcactggtgcttatggaaattttaatgacagttattcttgacaagaagccattgcttctgaaatctctgagctctgttttgatttttgacttgaattttttttttgcagtgttatcccttttgtatgctatttggtatttgatattctagttccaactcaactcacagcacattgggttgcaaattcacaggaaataacaattagttcttgaaatatactatcaccaaacagactacctgccttctttcttacgtgggcacattacaggaattgtgaaatgcagccttattctcagaatgggcctgcctgaaatcagctgaaattgacaaaggaaatacaaaacaaaaccacgtttagcagttggttcctgctaaccacagtctaacctcaaatggcatatccttattgcttcaacaactccagttcattccctttctttaggtaggcagctaaaaacaaaatactgtcataaatctttgaaagtgtagaatgtatttcttctaaagatctcaacagtcttcgaaaaaaaaaggagttataggtatgatattccagattttccaggtggagaaacagagtggaggaatgataaagtgacttgctgaaggcagacagcaaatagagctgggagagtggatgactgccctgtttgttcatacaaactgtttgactcaaaggaaagcaaagggttaacacagctgactctcattcctgcctgcctttgcacagaagagctaacaattcatgaaatcatctgtccaacttggtaaatagtcatttatgttatttcagaacgggtcatgttattttcagataagttaccaataatttgccttcgaattgcctttctagaaaagagagaaacagttactgagaaaaccaagtagatcattgtattttgtgcttgttattttcagggctcattatagctcttca

SEQ ID NO: 883 - DNA, 4001 bp, Homo sapiens
caagtcccacttttgccactatatcaaggcctggccagagttggccattccatgagggcccaagctgtaagctatggccagtcctcttaacttggcactttttaggagaatgtcgaggccgcagaagcaacagcagctcagaacttgcaagccaagcgccgggtgccctccccttaccagtaggggcagctgagcccccaggctctgccactgtaatctcaaatggtggcttggagtccgcctgcaattactcagcaggcaactggcttccctcaccccaccccaaactgagaagcctcaactgtcagcggatctgacttcaaatccaaaccattagggaggagaaaagcaagaaacctttctgttcaagtaacccagcttcagaacacataccccctaacgtgcagtaatgaatagattctgtctgtagcctccgcagttttagccagcaaatttaagtgggatggagacacatgtcaagatttttttgcgcgttcaaagtatggaaaaatagcaagaggtttgggaatgctcattgattggttagttctacatgaaatgacaatggtgttactggtgtgttctccaccagccttaaaagcaatcactattctaaaattgtcaaatcctctaacaaccccatgaggtggatactactgttggccactatttacagatgaggattaagggacttgctcaacatcacacagctataagtgctagagctgggacttgaacccaggtgtcagtaccaatgctcctgctcttattctcattgcggtccaattgtcaatacattgtcaaccccgggaaattcattcaaaagaaatgtgcctgttaacccaagtgattgtgctgtgaacatgaagagctgaagggctagctagaacatagaatccggtctgcagtcaggacctagcactgctgtctgcccacagatcttcaagttcttaaaagtctgttgaggagcagttagaaaaaagatggtacaatccttgcctctgcccactcacctctgagggtggcaggaaaaggagagcctgtgtttaaaggattctggcttctcctgccagctccctgaacccaatctaaagcagcccagatcccagcctcaccctaccttctctaaggtctggaccccaagaaggacatcatggtgaagatcagcatcagtcagtcaggatcttaaatctcagatgtgggcaggaaggcacatgcatcctcccagccaaaagaggtgacctaccaaaaatcacttctcatcttccccagccttagaactgcctctgaatgagaggaaccacattttactgaacgcatcttcagaccatagctttatgctaagcattttacagcatttatcacacttaactctttccagaattctacaaagcattcttgtacccattttccagatgaggaaaatgaagcccagaaaaattgaatgtcttgtctgagatcacccagggacagagcctggatttgaacttaggtcaagcccactacaaagagtacacatgcttaaccaccacactgtaaccttcccacttgggactgttccaacccagcaaacaagtccctttagagaaacccaactctctgcctaagacagctcttagaactaccttaaagaagttccttttggcaagaagatagaaagcctcgatgggattggggtcgtctgatttccaaggccccttcagaggatcaaaaagtggtgccagaaaccttcacagtttcagtcttgtgtttccctgcctggctcgaaactgctcagcaaagagaatgagaaaaactattttcccagggaaacactcacctctagcttgagactggggcttgccttgacacgccaaagtaagatcgtcagcccattcatttacccttacaaattgctctgtgaatcccggtgccggcctccccgctcttccccctccaggaaaccccatccagcctccacgctctgagagcggcaggtatccaccgatgtttactcactcaagttcattcgacatcttcctgctcccaagctccgacgatcagcactgaggctctgctgaccgcttgtctctaattcttgcctgacacagacattctctgcccgggaaagtgtttgatttatgttgaggtttgggtgtcgagattttgctgacaggtaggttcccagcagcgctggcgctgattggctacaggtacaggtgccggcgactggaggtatacctcaacaggtgcagctgttaactcttagcccgccgaggagggcggagctatgggggactggctgggtggagctggccaattccttccttggtgagggggtggggggtggagatgagggaggagggatggagaagaaaatgttggaaagaagcaagataactagaggaaaagtacagggacaaacagataacttggcttaaaggaaaacttgattcctgtttctagtcattgtcccagatacccagaaacatccccacccccaaatttctttgccccctccttctgtaccactggggaattctcaaaggagagagcaacttttcccaggtagatctttgtataagttccctttttttcagtttcccctttaaggtaatatttttgaataatcttttgcagttactcaagtgacttcttttggttcttaaagtaacctaccgtggtagatttattatcgcttcccccttcctcttcaacacatattttacagatgagggaggaaatggaggccagagaggcaaagtgccttgcccaagggcacagctagcgaggtcccagcccagatccaatctgcagtcatctcactccaagtctggctgccccttgggctgaagtcagtggcctcaattcagtagacattcattgagcacccgttgtgtgccagaccctactctgggttctggagaaactgaggccagaaaaaacaggggttactgttctaaaggagtttacaatctggggggtgtgtgttggtggcagggggtgggggagtaaaggagaacaggcttttattgggtgtgaagggggtgtgggcaagccacatacctctggtcagcacagaagggatagaaaagttgaaggctcctctgaagcctcagccagctggtcatttcacaggctccaagtgcttcgttctgtattgggaacttgggagaaattcaatgcctgtcagatgaagtaattgtggagtaattgctgtgagctgtctactataaagaacaagcttggtaaaccccagaatatccacaaacacaaacaggagaatgtaagagctttttaaagagcttcttccaggattagtttgaaattaaatctaagccagagatcttggcatctttttttccctctctctctttctattctcccctcccccacccttccccttttggcaaattatctctttgctgtgtcttcctggaaacctcaacttggcccactcctctctctcttctctgggaacggcaagtgaggtttcagctacccctgccaatttatggaggtttttcagggtaaagtcagaattcaaaggagccctcttggggtggggtcagggctctggagagggggtactgggtttgagaactctcagagattggtttctccctggaggctgtgttgggggaagcccaggggaccctaataaataatagtaaataattgctaataaagccacctcctcagagcagccctcttcagtcacccttgttaataaagtagacattcaatcactctggatcacactactttttgttctctgcagagcccttatgacttatgatacaatgtaatatgacctatgatatttttctaatcgtttattgtctttctccccttcctctggaatgtaaattccataagagcaaagactttgtgtcgctcactgtggaatctccagtgtctggcacctagtaggtgcttcatataccacaggcaccgggcattgtgcgcctttgcatacattgtgtcgcctaatccttacagcaaccctgggagatagacat

SEQ ID NO: 884 - DNA, 4001 bp, Homo sapiens
caattactcagcaggcaactggcttccctcaccccaccccaaactgagaagcctcaactgtcagcggatctgacttcaaatccaaaccattagggaggagaaaagcaagaaacctttctgttcaagtaacccagcttcagaacacataccccctaacgtgcagtaatgaatagattctgtctgtagcctccgcagttttagccagcaaatttaagtgggatggagacacatgtcaagatttttttgcgcgttcaaagtatggaaaaatagcaagaggtttgggaatgctcattgattggttagttctacatgaaatgacaatggtgttactggtgtgttctccaccagccttaaaagcaatcactattctaaaattgtcaaatcctctaacaaccccatgaggtggatactactgttggccactatttacagatgaggattaagggacttgctcaacatcacacagctataagtgctagagctgggacttgaacccaggtgtcagtaccaatgctcctgctcttattctcattgcggtccaattgtcaatacattgtcaaccccgggaaattcattcaaaagaaatgtgcctgttaacccaagtgattgtgctgtgaacatgaagagctgaagggctagctagaacatagaatccggtctgcagtcaggacctagcactgctgtctgcccacagatcttcaagttcttaaaagtctgttgaggagcagttagaaaaaagatggtacaatccttgcctctgcccactcacctctgagggtggcaggaaaaggagagcctgtgtttaaaggattctggcttctcctgccagctccctgaacccaatctaaagcagcccagatcccagcctcaccctaccttctctaaggtctggaccccaagaaggacatcatggtgaagatcagcatcagtcagtcaggatcttaaatctcagatgtgggcaggaaggcacatgcatcctcccagccaaaagaggtgacctaccaaaaatcacttctcatcttccccagccttagaactgcctctgaatgagaggaaccacattttactgaacgcatcttcagaccatagctttatgctaagcattttacagcatttatcacacttaactctttccagaattctacaaagcattcttgtacccattttccagatgaggaaaatgaagcccagaaaaattgaatgtcttgtctgagatcacccagggacagagcctggatttgaacttaggtcaagcccactacaaagagtacacatgcttaaccaccacactgtaaccttcccacttgggactgttccaacccagcaaacaagtccctttagagaaacccaactctctgcctaagacagctcttagaactaccttaaagaagttccttttggcaagaagatagaaagcctcgatgggattggggtcgtctgatttccaaggccccttcagaggatcaaaaagtggtgccagaaaccttcacagtttcagtcttgtgtttccctgcctggctcgaaactgctcagcaaagagaatgagaaaaactattttcccagggaaacactcacctctagcttgagactggggcttgccttgacacgccaaagtaagatcgtcagcccattcatttacccttacaaattgctctgtgaatcccggtgccggcctccccgctcttccccctccaggaaaccccatccagcctccacgctctgagagcggcaggtatccaccgatgtttactcactcaagttcattcgacatcttcctgctcccaagctccgacgatcagcactgaggctctgctgaccgcttgtctctaattcttgcctgacacagacattctctgcccgggaaagtgtttgatttatgttgaggtttgggtgtcgagattttgctgacaggtaggttcccagcagcgctggcgctgattggctacaggtacaggtgccggcgactggaggtatacctcaacaggtgcagctgttaactcttagcccgccgaggagggcggagctatgggggactggctgggtggagctggccaattccttccttggtgagggggtggggggtggagatgagggaggagggatggagaagaaaatgttggaaagaagcaagataactagaggaaaagtacagggacaaacagataacttggcttaaaggaaaacttgattcctgtttctagtcattgtcccagatacccagaaacatccccacccccaaatttctttgccccctccttctgtaccactggggaattctcaaaggagagagcaacttttcccaggtagatctttgtataagttccctttttttcagtttcccctttaaggtaatatttttgaataatcttttgcagttactcaagtgacttcttttggttcttaaagtaacctaccgtggtagatttattatcgcttcccccttcctcttcaacacatattttacagatgagggaggaaatggaggccagagaggcaaagtgccttgcccaagggcacagctagcgaggtcccagcccagatccaatctgcagtcatctcactccaagtctggctgccccttgggctgaagtcagtggcctcaattcagtagacattcattgagcacccgttgtgtgccagaccctactctgggttctggagaaactgaggccagaaaaaacaggggttactgttctaaaggagtttacaatctggggggtgtgtgttggtggcagggggtgggggagtaaaggagaacaggcttttattgggtgtgaagggggtgtgggcaagccacatacctctggtcagcacagaagggatagaaaagttgaaggctcctctgaagcctcagccagctggtcatttcacaggctccaagtgcttcgttctgtattgggaacttgggagaaattcaatgcctgtcagatgaagtaattgtggagtaattgctgtgagctgtctactataaagaacaagcttggtaaaccccagaatatccacaaacacaaacaggagaatgtaagagctttttaaagagcttcttccaggattagtttgaaattaaatctaagccagagatcttggcatctttttttccctctctctctttctattctcccctcccccacccttccccttttggcaaattatctctttgctgtgtcttcctggaaacctcaacttggcccactcctctctctcttctctgggaacggcaagtgaggtttcagctacccctgccaatttatggaggtttttcagggtaaagtcagaattcaaaggagccctcttggggtggggtcagggctctggagagggggtactgggtttgagaactctcagagattggtttctccctggaggctgtgttgggggaagcccaggggaccctaataaataatagtaaataattgctaataaagccacctcctcagagcagccctcttcagtcacccttgttaataaagtagacattcaatcactctggatcacactactttttgttctctgcagagcccttatgacttatgatacaatgtaatatgacctatgatatttttctaatcgtttattgtctttctccccttcctctggaatgtaaattccataagagcaaagactttgtgtcgctcactgtggaatctccagtgtctggcacctagtaggtgcttcatataccacaggcaccgggcattgtgcgcctttgcatacattgtgtcgcctaatccttacagcaaccctgggagatagacatttttgatacccccattttatagatgaggaaactgaggtacagaatactgaagtaaactactcaagctgcagagctaggcagtggtagagctagagctgggatttaatccgagagcagagcctgggtgcccaaccacttcacagagcttattggtggctgaagggctatttggtgccaactgtaactgcaaagcttattgcagtccaaaggatggcacactcctctgtatgtacctgtctgccca

SEQ ID NO: 885 - DNA, 4001 bp, Homo sapiens
ttttccagtcagccccacacacgatgttccctgggcacgacaggggcgccccagggttctcgtgcctgccagtggcccatctggttttctgggtgtacagattgtgaaatgtgcctcgtcacatgggctgggggctcatttgggggcctcaatggggaaatggcagagtgtagggcatggctctgtaatgactccagtttgcatgaggcagtatgaactcatcgttatgggagtgggcccagagctttgcagacctgggttccaggtccagctctgctacttactgggtgactttaagcaagcaacctgacatctctgtgcctgttttcttacctgcaaaatgtgaggcaatgagaatgctaacctcacagaattgctatgagagctaccgttcattgagggattaccaagtaccgggtgctggctaacaacttctagtcattgtctttgttttttacaactttgtgaagtattactgttggaagatgcaatgaggtaatgcaggtaaagcgatcagcatagtgccagcacataacaatgtgaactacttttattattattactaatactttgtggggtagtccccagcaaactgcacaattcacagccttttccagcctatgaatcgggatatctcttcctagctggcagaatcatcctgatgcttggagatttccacttaagaggaacacgcactaccagcttcatcgtcaggacccaggtgggcaagttgacggtggtcaggctgcagcagacacttttagttgcatgtaaattatctaggtgccctttcctaattagagaagaaagtgagtttctgctattttaaaaattcttccctgtatgggaatttttctttcatgctatattctcctcttggtgtcttgtctaattttccttttctccccccatctattgttcaactgaggtgtgaaagaagttgaaatccacctgtaaacccgggggtgccacatcccttcatttattcactcactgattcactcaacaaacattcactgaggattactctgtaaatggccacgtactgggtgctgaggacaaaaaaggtgaaggccactgccattcatgtggctacactgttctgtcccctttcggtccctgcccttgaaagttcccaattcttgctgacctcctggaaaagcctagagaaataccatcaaataacggagagataatttcccttcaagactttcactaggtcagttgttctaacctttttaggaggcaaaaggaatagagagggggaggcagccagccaggattatttgcggcattttagataggaaagctgagttccagagaggggagggaaggcaagagagggaaaggaactcaattatttcatagagtcaggccttgtgcctttttattctcatacatgccttgtgaggtgggtatttttatcatcattttacatgggcaaaaactgacacttaggttaaggagctcatccaagtcacccaatctataggtggcagagctgggcttaaaacacaggtgtgatcttggaactaagctctcagcctgctgactcagcaactacactgcaggtcagtagtggatttgggaacctcctgcttcccagtcctctgcctggtcttctaggccaacagttttacaacttggacacgcatcagaatcacctggagggcctgtgaaaacacataacgctgagccatacccccagtttctgattcagtaggtctagggtggggctgagaatttgcatttttaactagttcccaggtgatgatgatgatgatgatggtccacggaccacagtttgagaacactgttctaggtgttctctttcaaaataatgactccctctcttccccttaacgactccaaaggtaacataggtttgtaaaatacaacaaatatataacatgtagaacctacagaaaaataggaagaatggaattcatccacattcttctgctcagaaataaccactcttaacagtttggcacatctcctctgtcttcttttcagaggctaagcacagaggaagcggggtggcctatggctgctcggctaagacccggttaagatcccagtgcttccgtgagaccttgggcaagcctgaaccaggtctgggtcccctcttcggcaaaactgcatttacactcccatcccgcattagtttgttgggagggtttaaagaagagcgtgtatttatcaagcactcgacacaatgtcagatgcggagtcagcgctccataaatgttggctgtcatttttgttctaacgtaagagaaagctggatgatcccatctgggtttcagccccgttttccctcttcactcctccggtgggtcagtgggagctctgccgaccgcctggctgcggccactcactgctgggactgcgcagcctgcccgctcccagcagctggcggagccgcaggacccccgcgccgcccgggccgccgccgttagggttggctcaagcctctcggcccagtccgccagttttacagcccgaactcaaagagggcttttaacttttcattcagcagcagcgtagctccgacttttaataacacacctcgtgcacgacaaaaatttgctcctggcaatcatggtttcgaccacaaaaccacagcggggaggcgttcctgattaactctttcagcgctccaggcagtctggagccggcgctcctggagatcagatagaacggcggcggcggccgcggtcaggactgcgacggttctagtccccttcccccaaccgagtcgcgtctctgcgaggctgaggggagactccaggcggcagcggtggggcccagagagcagggagcgaggccgcgggggacgctcctgcctcggtgccttagacctactgtgtgccaagcccctttgcggcgaaactctcccttcctgggctgtcaacggggcctgcctggagcgccggccggccctccagaggggaacaacaggtcaccggggaggtcgcctgcggctccagctccccgggggccccgacgcaccttcaggaaaacccgacgctgggcagctcgcgggcgccggctgttttcctgcgagacccaggcggtcggcggcgacttccggcgccctcggccgcagcccaggatcccttgcgccctgcggtagcccggggctgcccagggctgcgggctccaggcacccagagcgctgcgaccacatgaaaggcccggcgctcagcacccgccagccacctccagctggtttctaactacaccgccggggcctccatgcttctcagagaccagccttcgaagtgccgccttacacccggggcctggccaccgggcgggcgcggatggagctctggtccacatttgggagctcacagttgttcctgccaggtaggtgttacagacagatgagcagactgagggtcagggaggacaaacaaattcaccaggatcctgctgttggtaagtggcagaatttagagtgacaggcaagtcccacttttgccactatatcaaggcctggccagagttggccattccatgagggcccaagctgtaagctatggccagtcctcttaacttggcactttttaggagaatgtcgaggccgcagaagcaacagcagctcagaacttgcaagccaagcgccgggtgccctccccttaccagtaggggcagctgagcccccaggctctgccactgtaatctcaaatggtggcttggagtccgcctgcaattactcagcaggcaactggcttccctcaccccaccccaaactgagaagcctcaactgtcagcggatctgacttcaaatccaaaccattagggaggagaaaagcaagaaacctttctgttcaagtaacccagcttcagaacacataccccctaacgtgcagtaatgaatagattctgtctgtagcctccgcagttttagccagcaaatttaagtgggatggagacacatgtcaagatttttttgcgcgttcaaagtatggaaaaatagcaagaggtttggg

SEQ ID NO: 886 - DNA, 4001 bp, Homo sapiens
gcccttacggtagcctgtccttctgggcctccaaagacttccatccctgaggctgggctgggagcacacccatcccacccctgtggaagaaggatcaaggaaaagggaactgcaatccgtgcgatgggcaaatagcaccctctcagtccccccacctttttccccaaggacaccctacgacgcaggcccccaaaaaagcagagggaaggagacagggaataaaggaagtgctggtccattactggggggggaaggggaggcttcctgcccctggaatggtgccaggctgggcttggggcaggcaaaggcacagagatagaagacatttcggttgtcaggagcaaccaggctgggctgcaaagggttaagcctgaccataagggttgtccccagtgtcccctcccgtgcctggcctcctctgcctccggtgctggtgtttgcctgccagggtcctgggcatggaccgaaagatctcagcgtgggcagagctgaggactgtgctctgccccatccagatggtgttcaagagggtccggctcccgggcggccgcccaggaggagacccacccgctgggtttctgaccgcctcctaggaaaatctcaagtacggaaaccaagcccgacaccggttccggcacctctttcacgccgctggcagcccaaggtccgccctgaagaagagctgtagaggaggaaggtggccctggctcggcggagtccggctcgcctggtgccaggcgctggtgctggcgccgagtgaacccaggcggcccaggtgtccggcctggtggcgggcgcagggcctgcggtgatggaggctccgtcttagcccggccaggcccagccctgccggtcgtcggcccgggacatgcgcggcgctcaggcctgcagggtgccttgggcggccacaacaaagttaaagaccggagtaagagtctccggcgagaagagacgcggagaagccggagccccggaaagccgcgcgcagccccgccagccgccgccagctgcggaggaattcgggctaactttaaaaaccgctggcgtccctgggccgcctgcccgggccgcactgggcggcctccatcgtcccttccctctacctgcactgccccaggcgggagagaggccttggccccgagggaccagctgcagcgggcagcggggtcctgctcccccaacccccgccccatggcacggggctgaaccggtaccaccgaggccaagggcgaccaccaggagagaagaccggctgccctcgtcatgcgaatctgtgccctgcgacctcgctgcggctgctcgagctatgccagaggtggggacgaagggcccgcggggagtgaggtgggcagaggagagaagttggcgccttccccagggtccccactctgcggagaagcccgatcgcagaactcggtcggctgcggttcatgctggcagtcaccgcgaaatgcgccctcgactcgggatcgcactggaaaccttcgccacactgtgccaggtctgacctcccaggagcgcgccaagggcccctcgcccactgcggcccggcggcctcctccccaataagtaaggcccgtgaccccgactctggaactttgtcctcacagggaggagctcctggtggtcaccgatcggctcagcagctcggagagaggttaggaaaatctctccggaacgcgttgggaggccccctcattcccgccccctcccgggcgcacggagacccccggctccagggagcgcttaccgatccggatgacgtggggcatcccgcgcgagtccgggatccagaaggcgcacacgaggagcccggcccagtattcccaaaccagactccggaggcgccgccagggagcggtcatcgttgggcgccgccgagcgtgcccggggcgcggccgtggcgggctccctggggcggcagctctaggcgcgggcgcgcagcagccccgaaggcgccgcctggcccagccgcccggctcccgagcgccgctgcaagtggggggcgccccgcggcgccgcgcacatcttactggggggccgccccgccggcgcccgccccgcctggctgccgcccacgggctgcccgcgagcgaggctcctgggctccgcccggactccgctcggactcggctccggctccgactcgcgtcggctcggctcccgcgcgggctcccacctgccccggctgccgggctctggcgggcgggctgcacgcgtctccggccgctcctcctccagccgccgccgatgctatcgcccgggctcgcacaaagccccggagtggagttgcacgcgcgcacactctccctcccagccccctcccctgcgccctgcctcccgcctcccgcgccgcccgccgcccgcgctccctccgcgcactcccccgcgcacacacacttcacactcacacttgccgaggcgcacactcgcgcgctcacacctgcgcggggggcggggaaggggaccctggccccattgtagggggacgcccggagaacgaggactctcctcgcttcccagacgtccccacccgccccgccggccccagtcccttctactgcgagggcacggagcccgggagccaggcgtggagcgcgagagctggcaccgcgagctgggagacggcggcagcccagcggccggaccagctggaggagacgcgcccgccgggagcagcgagaccgggagcccgccgtctgcggagcctggcctcgcggctcccacgcggcgggcgctggctggacggcggtggcagcgggagactgacccgggaaccggcttccctccccaaccccattcctcctggcagcagagttggggctgggggttcggagaggcagaattcaaagcgaattgtctacgctgggccaggggagctgagggagttggtagaggtgggagagcccaagtcagaccccctgctgtgggaagctggacttgaccgcgcacaggtcctggggctgcggaggaggaagaccgctcacgccttagatgtaggggggcgtgggcgccgggcccgctccctctcagccctctcccgtaactgtgcaggaagggctggtgccccctccctcattctcctgagaaagaataaagagaaactgtaatttgtcgtgggatggagtaggatccgtgggggagcaagctaaaggggttaaaaagaaaaacaacgttgtttattagcaataataattttttttcaagtggcgctgggtgtgagggaagggaaaggctgtggagcgaggctggagcaggaggctgcgaattactcagttaggcgagtttaatgacctttttgacagagacaaagcggtgccgatacagtagataaataaacggatctgtcaccgggcagcggctaggctgtgtgtgaatttatttttctcatttaaataatttgatctattctatcatttccaatctttcccatttgccagctgtctggtaagagcatggcccccaacatctgaagagcaaatctttaattttcttacaaatattctatgagccgagctctcacccgcctgttaatttccctcttttttcccctccctgtctgggtgcagaggcccgtggcattgtgtggggatgtgaatatctcagtgtggccaatcctgccaattaggaagggacgccctcccacctgaggtggaggccactgtggctgtgggaggaggagagactccctgggctcctcacaaaagaacacagaggggtgcgcccgtcctgaggacatcctcaaaaatccagcaaacaaactgaggttattgagtgtctgtctctgccaaagttgggcctccctcgccctggagcaggagcggctggtttcccaagcagccactggaaaatgttgcccgagggatcggagggaaggacacgcagaccaaagctagggaagcagcagctgccacctcttgataaaaagtaagggctccagtgggcgccagtaaggaggaagtgcaggagagggcagcagagggcgcggcctcccggatata

SEQ ID NO: 887 - DNA, 4001 bp, Homo sapiens
actgcctctgagctgtctgttatgaaaatgcgcagatccctgtgcatgtcaatgacagcactcagaaaactgttgaggagaagatgcaattcgagggtgccattacattcctgagtcttctacttgagtctgcatattctaggagcaggcaggtgatgtgaactggctgacagaaatgacccaggacagaagtcagaggccagagctgatgaaggagattctgaacacaaactttaccatacaggaactgaatttctaccctgggatgcctggatcgtgtcctaaggttggtgggaattgcctctgcttttgttgacatgacattggagtcgtgagaataactgctgatagtatgggaaagcacttggaggatgaatggtaccagggacttaagaccagtgtgtgcaggaatgcaagagtcctggccccaaatccaaactctgtcagatgcagctcactggggacactcacaaattctggattgtagcagatcatgcccagctgcatatggttgtccatggtctggttctccaaaatgtccacacgaatcttctcctcttctgtctccccacctgccacccacaaaacacagactcaatctcagcatcacagcccagccaaggaggaggccaccttccccccacacattgcagccacccacactcacacaggttgtgcttgcgggcaatgtagcacaagatggcgttgctctgggtgatcttgtgagccccatcaatcaagtagggcagctggatggatgggaaaccggcgaagctcagttgggccaccaggctccccagcatccccttcccataagcaagagcagagaggagaccgggcactcactgtgcctgctcatggcaggactgaaataagaatactgtcacatgaacgaatgcaggtggacacagaacatcatggaaggactgtttagacagccaggagtgagaggaattgggcagaagactcctgatcttaacacctctaagctggggagaggagatgcagtcagagacacgttgcactttcccccaaaaccgccccttcccctgcacctacattgggaaagtccaggcccagcttgaatttttcattcagccactggcttctgtcataatcaggagctgtggtggggaagaagaagtgaaaacaaacctccccagagcccagccctccttcccggggaccctcccacggagccagtggcaagatccctgagacaggtggatctagaatctgaccactcagtcccacatcccagggttcagggacaaagaatcccgctgagggctctggaccccacacagctaaggcttccagggtttaggcaagccctgagggacacccgtcccaattagacagggggcccagcatcccaccccagcattctgccttgcaaggccagagggctccctcaccggggctcagggaagagacagcctgcagctccagcaggggaggcctgcagaggcagccacaggtggccaccatgggttgcttggtgccaacttagcgtgagtgggcagagcccgaacacgagggtgccattaccgtcccccatcgtgtacttcttttcctcatagcttgagtctgtgtattccaggagcaggcggatggcgtgggccagctgggagagatggcccgcaggtcgcgtcagagatggagggtccctgactttgtctgcaccagggaagcccccagtttacactgcacgtacccgttgcctcctctacccgcccacacccccaacacacacacagcggcatgcacaggcccttctgaggcgggcagccctgaagaggaacggtccctagagtccgtcccgcagctgcttcgcacttccctcccctgcgccctcgtcccaccgtccagcggaccctcgctcaccccgcggatgtcccagtaccccagtatcatgggcatggtgctggttggtgcggattccgcagacaggcctaaaccgagcagggctcagagtataagagctccggagaggggacaggcggggccttgctgcgaccccgcccctcggcccgccacaacccgaaaggcgccattctggaggcccgggagagggcgcctggggctgcactcagtaagacttcctcccgcctcccaggcccgagggttccgggagcgaagtcagggcgcccagaagcccaaggcggggctcggcctcgccagcttccctacccagccctgaggctccacgagtccatccagcccttgctaggtccacagcgacttggctgtgcgcttgagacaccagccagatcctaacggagcaaagctcttctcccttctcctccctgcccgcggtgtccctcagccttctctccgctgccgagttcccaagggctctgggagactccggctgcaggggtcagactaaaaagtggtggccccaacctgggaatttaattcagcccctgtcactgtaagagcaggacttcctctgatccgaaagctactcccagggcttagtctcccctctagccccgcctacacaggaacagtgtcagtggtataggaaggacccccaggaaaagggccagagtaaaggaaatgtggtctgtgttttctgttaggggccctcgggtactgagtccttcggtcatctggctaagtactgtgtaaattagccacttcgtattttggcacaatttatgaatcgaaatccaaggatcagatccagcaagttggtgaggtatctgaggtgccccctagaaatgtccagccagtccactaggtgaacctcacagagaccggaacagcaacagcaacagtgagtgcagtggccacagagagcaggcgagggaggatggaagaacttcccggaccaaactgagggtccggctgctatttctctaggcccaataacgagatgcagatcaaatggggaggaagagaggttttatttctgcaaccggtaacagggagaaggcctagaaattaccaccagaccaactcaatattacaaagttttccagagcatatataccttctaaggtatatgtctacaagtaagtgtgcattcatctaaagacataagtgattaacttctttaatctgtaactgaggtctgggtcctgaggaccttattctggagcctcagtctatttatttaatctaaatgggtccaggtgcgggggatgattacccttatcttgtctcctgctaaatcacggaggtttggggagttccttcagacgcccaataaacttgtttgtggaggcctggggagtttcttcagactcacaataaaacttgtttaattctaaataggtcctgttaagaattccttcattgttttgtcatgctttaaggcccaggaaaggcctaagcaaaactcttggtgggcttttgttacatccagcctctgtataaaggtactggcttttttcagcttttaatatttaacttcaccactcagtcagtactgaaacagttgttatggaggcctgtgttagtgacgcctggcctgccacagaacctgtccctcagagaagccagaaccctgtcctgctgaggagggaggtcagaggatggtggccagagaggagcctgagggctccccacaggaccacaggcagggaccctcccctctccagatccaccattccggacctggacctggctcctgacccatgtgtgttcttcagtatgagacggtggctccagtggcctttgaagtcacaccgtgatatgtgacccatggtacaacctccacgagaacaatgtccaacctgccaactttcttctttcaaggtagaaggaagactttcaaaagagttgtgcaatggattagcctggggttgactgctttaaaggatattgcaaataataatggacatatggaaatagatgatagacctttaatgagaaatcattttgcaatgtaaaccaggctgttgtgctgcaaaaaaagtagtttttttgttttgttttgttttgttttgttttgttttgttttttgtaaattagctaaaacattgttagga

SEQ ID NO: 888 - DNA, 4001 bp, Homo sapiens
tcactcgtcaccataaatcctgctgttgctcactctttgggtttgaactacctttatgagctataacattcactatgaaggtctgcagcttcactcctgaagccagccagaccatgaacccaccaagaggaataaacaactccagacgcgccacctttaagagctgtagcactcactgcgaaggtctgcggcttcacccctgaagtcagcaagaccacaaacccaccggaaggaagaaactgcggacacatctgaacatctgaaggaacaaactccggacacaccatctttaagaactgtaacactcaccgtgtaggaccgcggcttcattcttagagtcagcaagaccaagaactcaccagaaggaatcaattttggacacaaactctgcagggaaaggggagactgggagtagggaaggggagactgggagtggggtggggggacttacaaaatctgggtcatagcagagtttggccagctgcatacggctgtccataaactggttctccaaaatgtcttcgcgaatctgctccttttctgattccccgcctaccctcgtaaagcagattcactctcagcctcacagcccagccaagccgaggaggaggccacggtccctccccgcatcttgcaaccaaatctactcacacaggttgtgcttgcgggcaatgtaccgcaggatggcgttgctctgggtgatcttgtgagtcccatcaatcaagtagggcagctggatagatgggaaaccggggaagctcagttgggccaccaggctccccagcatccccttcccatatgcaagggcaaagaggagaccagggcctgctcatggcaggcctgagatagaaatactgtcacactaataaatgagctgggacacagaacatcatgcaagggctgtgtagacagccaagagtgagaggaattgggcagaagactcctgatcttaacacctctaagctggggagaggagatgcagtcagagacacgtcgcactttcccccaaaaccgccccttcccctgcacctacattgggaaagtccaggcccagcttgaatttttcattcagccactggcttctgtcataatcaggagctgtggtggggaagatgaagtgaaaacaaacctccccaaagcccagccctccttcctggggaccctcccaaggagccagtggcaagacccctgagacaggtggatctagaatctgaccactcagtcccacatcccaggattcagagaaaaagaattccagtgagggctctggaccccacacagctaaggcttccagggtttaggcaagccctgagggacacccatcataattacccagacgggggcccagcatcccgccccagcattctgccttgcaaggagctccctcaccagggctcagggaagggacagcctgcagttccagcaagggaggcctgcagagtcagccacaggtggccactatcggttgcttggtgccaacttagtgtgagggggcagggcccagactcgagggtgccattaccgtcccccatcgtgtacttcttttcctcgtagcttgagtctgtgtattccaggagcaggcggatggaatgggccagctgggagagatggcccacagctcgggtcagagatggagggtccctgactttgtgacgactctgcacaaggggagccccatctcctcctctcgttcctgcctcacccgcccccaccccgcacgcccagccacacgcacagacagcggcaagcacagaccccgctgtcagggacagccctgaagaggaaccgtccctagagcccgtcctgcagctgctccacacttccccgcccccacgcacccccgtcccaccgcccagcggaccctggctcaccccgcggatgttccagtaccccagtgtcatgggcatggtgctggttgctgtggattctgcagacaggcctcagcggggcggggctcagcgtttgtgagaggcccagagagggtagaggggaagccttgctgcgaccccgccccacggcccgccctgcccccgaaacgggccaatctggaggcctggagcgcgctcatggggctaggagtaggatctcctcccacctcccagccccgtgggtttcaggagagagatcaggacgcccagaagcccagggcgggggagaactggttgagtccaggggttcaagactgaactgagctatgatcgcgccgctgcactctaggttaggcaagaaagaaaggctctctctaaaacagagagattctgaataaagtaataatagcctaataaagaaaaataacacaaaagaacatttggtgctcagggattcactggataagttttcaaaacttttcaatgtatgatagagattgttataaactgcggacatacgtggcatgacagacctaacgtgggaaggacaacacaggcaaggatgattataactcactgtcacttatcagcctaaatccaaacgtcaggaataccgcctcagagaaaagaaaatgatgtttttgtcataagtggtgctgtgctcctagggagcttgctgggtgggaagagagacagaaaggtggggagcaggggctggtggacttggggagggaggagaaagcccatgtggaaacgttagaatctggggtaatcagaggtctttgtattcattcgttttgtaaatttctcaaactctcatgttaaatcaaaataaaaagttaaaaaaaaaaaactaccaggacagacatacacaaatattattaactgaaataaatgttccatcaaaaaggacttaccttaactacatgagttatattatgatttctattattattattattattattttaatattagtatccatccagcacaccactggtcttcaagtggaggtaactttgcccctcaggggacatgtaggtctgtctggagactttgttaattgtcaccactgggaagcgcccatggcatctagtgggtagagtttgcgtaggatgctgaacaccctgcaatgctcaggacagtgccccacaacaaatgattttgccctccaaaatgacagtactgctgaggtgaagaaaccctagtctaaaacccagccaacgtggtgaaatcccgactgtactaaaaatgcaaaaaaattagccaggcctggtggcgggtgcctgtaatcccagctactcaggaagctgaggcaggagaatcgcttgaaccagggaggtggaggttgtagtgagctgaggttgcaccactgcactccagcctgagcgacagagtaagactccgtctcaaaaaaaagaaaaagaaacccaggaatgggtcaaaagttgcagtgggagaaacaaggtcctcaaaattctggtggcaggaagcaggccaaaggacccacttccctggacaccagctggcagaagggaggacctagagacaatctcagctggcacagtccctgcaggcatcaagctgcacatcaggaatgagagaaggagaattgggcagggaaatggtctaccaggtggacaggctgggcagccttgatctttcagggtacagggtagggagtatgggactctctctgccagtcagacagcaggcctaccctgcagctctgagcacattattccagagacaggcagcctgagcccagcaccagagtgggtaattcctctagagctgctggggcaaggctaggcaggatgaactgaacttatttttgaaaagtatccacccagcctgggaagcatggtgaaacattgtctaccaaatatacgaaaattagctggccatggtggccctttacctgtggtcccagctacttgagaggctgaggtgggaggatcattggagcctgagaagtcgaggctgcaatgagccgtgatcacaccactgcactccagcctgggtgacagaatgagaccctgtctcaaaaaaaagtaataacaagtcaaatttaaaaagaaggtatctacctgactatcgtgtgtagaaaggtcccaaaagtcaatgccaatt

SEQ ID NO: 889 - DNA, 4001 bp, Homo sapiens
tgagcctgggaggttgaggctgcagtgagctgtgattgcgccactgcactccagcctgagcgacagagtgagacactgtctcaaaacaaaagaacaagaaacacacaaaaaagaaaatacctgatttctactagtgacaaagtgacagacatggctaataaccaatgtcacttattgtctctcttcacaataaaaggaaataacttttgctagtggttaatgggaatgaaaatacatatccatccagttcaaggacccctgaattctatttattctatccgggttaagatcccctattttgcatccttctgtaccaggcaggagagaggcaaggatggatatacttgaaggctttcccttctgcccgccacctctactaaagccacttacattaggaaagtccaggtctagcttgaatttcacatccagccattggcttcgatcatagtcaggagctgtaagagacggaattaagtgggacccaacctccttaataccccacctgacaagagcaaaagatctaaagaaatgacttggtcccaatacctcaaattcccaggccccaaaagcataaccattgagcctctgagccctatttggttaagcattaagacgggtttgggctatgttaaaaagagaacccccagttccagataaaggatgtgtctctattcacccagattggggcaaacgtcccacccggccttggcgcgacgccaccaccctctgggcgtaagaagaccagggcaggtggagggccagcttggctgcacgggcacgcggagcggcattaccttccccgcacgtgtaccgtttctcctcataagaggtatccgtgaactccaggagcaggcggatggcgtgcgccagctggggaagacagcggttcagcgactgcgcagctcccacccattcccaacccccgcccgctaacgttccccggcccggggctgccgagtccctgcgtcctgccggggcggtggttaagcggcccctaggcccggctccggcgtggtctcctccgcccctccccacagggcccgcgatcccagaggctgggcaggggtcgacatccgtggctcggcagctcgaaaaggctcccgcgtagagctgctcctgctggagatcgcggacccagagacccgccctctccgcgtcagtctctttgaccgagcggctctaccgttgagacggcactcaccccacgaatatcccagtacccgagaaccatagacgactcgcacgacatggtgacgggcttccgagccttcgaggactagggaaactgtgagcgggaggggctttatacccgacataagggggcggggcccacgcgcgggcgccctgactccgcctccgccccgttctccgtcccttgcctccgcggctccacagggccgtgcgcaggcgcgactaatgccggcgttggggttcagggcctggcgaccccgaggcgggacccgggcaggagtgctgcaggagagcaaaggacccgaggttgaggctcctcccttccccgcgggtgggagccagacttcattcattaatggtgccagtgaagacgcgaaaagcaccactagccaggcagtggggaccctagttacccagggagagcgagattcgcgccgtttttaccgagccagccggggctggatgaaggataggaagactggggcaaggccggagagtcagaccagcctctgaccacacagagcagaagattccccacagaccaagctcccctctctgtcagtcaaggacctctgcaacctgaccccaacgtgcttttccagtcctgtctctccctcagcccgtcacaacttcataagccagcccaacccaacaatacttgctgttccttctacacacacttgcatttcccaccttggagtgtttgctctgtgatcctcctacctgcatcctaatttccacagcctatccttcctcagcagccttgctgaaatgtctgcctattccttgaagccttctcagaaccaacctctatcctggccagaagaggtctcttatcttgaatgtttcctacctttgttttatgggcttaagtaatttatggattccttattataatttcctcctccaatccctcccacttcctaatgctcacgcatttagggaaattaatcttgcctctttgtgtaggatggactggaggaggaaaggtactaccatttttcattcactcattcatctgtccaacaatgtttaacatgcctgttatggacaggcactgttttaggtgctggggatacagaactgaactcaacagacaaaatccctgccctcaggaagtttacattctaatggggaagaaataaactaatatatagtaaatagctagtaagtcaggtggtgatacacatcctatggagagaaataaaatcgagaagagagatagggggtctcagggtgggaactgggggagtcccagtaggaaggggatttatgtttttaaaggttatgttcatagaaggcctcatggagaagttaatctttaaacaaagacctgaaggaggtgagagatcaagccactctgctgtgggggccaccatgggctgatataaatataaaacagaataattgctgttccttttacaagcatgtttgctctgctcctgcctgcaccctaatgtccatggcctagccttcctcaagtagccgtgctcaaatgctcacttcttccttgaagccttctcagaatcaccctctatcctggccagaagagttctctccctctcttatctcgaatcacttcctacctgcaggaggcagagagaactccaggaaaagggaaacagcaagtacaggagtgatcactctgtgtttgaaaccagagactagatgagatcaccatgggagcacgagtagcagagatgaggtctaagggtttgaggtgctctggcatatcaacatgtaaaggttagggaaaaatgagagcaaaccagcaaaggagtctgaaaaggagtggccagggaggtaggaggaaaacaaaaggtcccagaagccatgtgaagatgtttaaagggagaagtgatcaactatgtcaagtgtggctgatcaagtaagatgaagatggagaatcaatggttgaatttaggaaagtaggggttttgaccttgacagagcaagagacctgcccgaggcccctatagtcatgggaagaactaagcttctgaatttcggcagggcccatgcaaatgaaaaggggcacagatttgcaacagggtcaactcgggagacataggattctagttgaatgtggaggagtgacagaggaaggagtccggagctgctctgagggttctggccaggcctctgcagcacagctctcagggcagtctgagagcctagatcccctagctcaggtgtgggaaatcacatttgcccatcagttcaactgaagcaaggttgggactttttaaaagggcattttgctaaacagaagaaaggaagagtacaaaccacatggacaggtgaaatttataatgcctgtgtctctcctcccaagaaagcaaaaggccagtcacaaattcacctgaggtataagattaacatttattgagcacctatcatatgccaggcaatatctaagtgtttacgtatgttagctaatttattccaatttaagcttcacaacaactttaggaagtaggtgttatgcccattttcttttctttttctttttttttttttgcagtttttgcattactttcttttttttaaattttattattattacactttaagtttcagggtatatgtgcacaatgtgcaggtttgttacatatgtatacatgtgccatgttggtgtgctgcacccattaactcctcatttaacactaggtatatctcctaatgctatccctcccccctccccccaccccacaacagtccctggagtgtgatgttccccttcctgtgtccatgtgttctcattgttcagttcccacctatgagtgagaacatgcggtgtttggtttttt

SEQ ID NO: 890 - DNA, 4001 bp, Homo sapiens
tgctagctttcataggacttcctatgattggtggggactgatttcaagtttttattttataagtttaatgatatgacagtcactctgctacagtacagggaaccctcagaggatcaatagcagtgaggagttcaaattgtgaataggaccagagtagatgggaatacaagcctggcttctggtccagaccagggagggactcacaaagtcagggctgtagcagactctggccagctgattggagacgtccatagcctggttctccaaaatgtccacacgaatcttctcctcttctgtctccccacctgccacccacaaaacacagactcactctgagcatagcaccccaatccagccaaggaggatgccaccttccccccacacactgcagccaaccacactcacacaggttgtgcttgcgggcaatgtagcacaggatggcgttgctctgggtgatcttgtgagccccatcaatcaagtagggcagctggatagatgggaaaccggggaagctcagttgggccagcaggctccccagcatccccttcccatatgcaagggcagaggggagaccaggcactcactgtgcccgctcatggcaggcctgacatagaaatactgtcacatgaacaaatgagctgggacacagaacatcatgcaggggctgtgtagacaaccaggagtgagaggaattgggcagaagactcctgatccgaacacctctaatctggggagaggagatgcagtcagagacacgtcgcactttcccccaaaaccgccccttcccctgcacctacattgggaaagtccaggcccagcttgaatttttcattcagccactggcttctgtcatagtcaggagctgccgtggggaagaagaagtgaaaacaaacctccccagagcccagccctccttcccggggaccctcccaaggaaccagtggcaagatccctgagacaggtggatctagaatctgaccactcagtcccacatcccagggttcagggacaaagaatcccgctgagggctctggaccccacacggctaaggcttccagggtttagggaagctctgagggacacccaacccaattaaacagggggcccagcatcccgccccagcattctgccttgcaaggccacaggactccctcaccggggctcagggaagggacagcctgcagctccagcaggggaggcctgcagaggtagccacaggtggccaccatgggttgcttggtgccaactcagcgtgagtgggcagagcccggacacaagggtgtcattaccgtcccccatcgtatacttcttttcctcgtagcttgagtctgtgtattccaggagcaggcggatggcgtgggccagctggaagagatggcccgcaggtcgtgtcagagatggagggtccctgacttggtgactttctctgcaccaggtgagcccctagtctacactgcactgcaccccccccccaccccggcgcacgcacacacacacacacacacacacacacacacacacacacaggcatgcacaggccctcctgtgagagatagccctaaggagggaaccgtccctagagccggtccccagccgctcggcacttcccgcccacgcgcccggtcccacagtgcagcggaccctcactcaccccgcggatgtcccagtaccccagtgtcatggacatgatgctggttggtgtcgattctgcagacaggcctcagctgggctgaactgcgacctcctctggggttcccggcacgcaggggctggacctagcgccagacccgccccctcggccccgctgcgcccgccgatcttcaaggtcgtcacttccaaccggccgatcttcaaggtcgtcacttccaaccaacaggcgcgggaggcacggagcaggttgctggatcctcactggctggaaggagtaagatccaccgccacctccgagtgttcagggagcaaggtccggaagcactaggaggggctcggcctcgccagcttccgtagccccgccccgccccgctccgcttcggacctctgctgggtccccagggactcggctgtgcgcgtgagagtaaagccagatcgtaagagaaaagttcttcccccgtttcttcttctccggacgtcgcccagccttctgcctctcggctgccgagttcccacaggctctgggagactgaggctgccagggtcagactaaagagaggtctcagagagtttaattcaacacttcttggctactaagtcttagaagtctgatggtgtgctctctctgctgagttggggagcgtgaatggaggctatgtcaccgaagctgatagagctcagtctctgttgcagatgctcccgacccttttgcattgggccagttccccagctctgagactgggtccaggctcaggaagtggcctatgtgtcaaggtggattcccatgtaggtttgcctacagcaagacgatagcaccatgcacacacaagtgcttggacttctgaatagttatacttctcattatacattaagacattaagaatgtgtcattctgagtcttttttttttttttttttttggaacggggactcgctgtgttgcccaggctggagtgcagtagggcgatctcggttcattgcaacctccgcctcccgggctcaagcgattctcctgcctcagcctcccgagcagctgggattacagacgagcgccacgacgccctgctaacttttttgtattttctgtagagatgggatttcaccgtgttgaccagactggtcttgaactcctggtctcaagtgatccacccgcctccgcctcccaaagtgctgggattacaggcatgagccacggtgcctggcctgtcattctgagtttatccatcttgagctgggaaagataaaatgtctaggtccaattgtgaagatgattttttaagaaagctaacacttatgagaataattatgaaagaaacagaattgatattgttacattagtattcacccatttggtcattcctttattgaaacaacagttgttgagatcctaccatattccaggcactgggaataaaacaatccttcaaaaacactgtactttggccacctacgactagaagtcaggtgggaactacaggggagagattttgaaaatacgggacacttcttactgtttttgcacactgagaggcagtggagtgggagaggggttgagtgtaggagagagaagcggtgcctgctgttgcaaggactctgaggagccaggaagacggggcccaggtcccaggtggcttcttcagaaggaggagtacggctctgcggaaggcgggaagaactggaccagcaggatctccaaagtaggggccacagtggccacgaggatcacaccagggcgggaagtgggtctgtggacagggatcgggagcagtggggatgagggaggcggaagtggtgccctggggaagaatgtgcacgctgttgtcaggttattttctgcatgcctgtgagatctaaccggttcattgtgtgttcacattctgcatttccttacttaccttccgtctcagcctttccataattgaaagaggggttttagagcctcccattgttaatgtagaactgtctatttctcccttcaattctgtcaaattttgctgcatatatcttgttttattcctactatgggaattgcatcttgtatgagagaaatcaattatccttcctggatggtccaccagattatctgtgctttcctcattttagaagcttctgggtatccttccttccttccttccttccttccttccttccttccttcccttccttccttccttccttccttccttccttccttctttctttctttctttcctttctttctttcttttctttctttcctttctttctttctttctttctttctttctttctttctttctttctttcttttctttctttctttctttctttctttctttctttctttctttcttttctttctttctttctttc

SEQ ID NO: 891 - DNA, 4001 bp, Homo sapiens
catctaggaattgaatttccaccgtgggatgcctggatcgtgtcctaagattggtgggaattgcctctgcttttgttgacatgacattggagtcgtgagaataactgctgatagtatgggaaagcacttggaggatgagtggtaccaaggacttaagaaaagaccagtgcgtgcaggaatgcaagagtcctggccccaaatccaaactctgccaggtgcagctcactggggagactcacaaactctgggtggtagcagatcatgaccagttgcatccagttgtccgtggtctggttctccaaaatgtccacaagaatcttcagaagaggagaagattcgtgtggacattttggagaaccaggttatagacgtctccagtcagctggccggagtctgctacagacctgactttggaagtccctccctggtctgggccaaaaggcagggaaatgggtgactgggagtggggtgtgggactcacaaaatctgggtcatagcacagtctgaccagctccatgtggttatccataacctggttctccaaaatgtccacacgaatcttctcctcttctgtctccccacctgccacccacaaaacacagactcaatctcagcatcacagcccagccaaggaggaggtcaccttccccccgcacattgcagccacccacactcacacaggttgtgcttgcgggcaatgtagcgcaggatggcattgctctgggtgatcttgtgagccccatcaatcaagtagggcagctggatagatgggaaaccggggaagctcagttgggccaccaggctccccagcatccccttcccatatgcaagggcagagaggagaccagggcctgctcatggcaggcctgagatagaaatactgtcacactaataaatgagctgggacacagaacatcatgcaagggctgtgtagacagccaagagtgagaggaattgggcagaagactcctgatcttaacacctctaaggtggggagaggagatgcagtcagagacacgtcgcactttcccccaaaaccgccccttcccctgcacctacattgggaaagtccaggcccagcttgaatttttcattcagccactggcttctgtcatagtcaggagctgtggtggggaagaagtgaaaacaaacctccccagagcccagccctccttcccggggaccctcccaaggagccagtggcaagatccctgagacaggtggatctagaatctgaccactcagtcccacatcccagggttcagggagaaagaatcccactgagggctctggaccccacaacggctaaggcttccagggtttagggaagctctgagggacacccaacccaattagacagggtgtccagcatcccgccccagcattctgccttgcaaggccagagggctcactcacgggagctcagggaagggacagcctgcagctccagcaggggaggcctgcagaggcagccacaggtggccaccatgggttgcttggtgccaactcagcgtgagtgggcagggcccggacacgagggtgccattaccgtcccccagcgtgtacttcttttccacatagcttgagtctgtgtattccaggagcaagcggatggcgtgggccagctgggagagatggcccgcggctcgggtcagagatggagggtccctgacttggtgactttctctgcaccaggccagcccctagtctatactgcacgtacccgtcgcctcctctacccgcccccacccccaaacacacacacagcgtcatgcacaggcccttctgaggcgggcagccctgaagaggaacggtccctagagccagtcctgcagctactccacacatccccgcctccgccccctgtcccacccaccagaggaccctcgcttaccccacggatgtcccagtaccccagagtcatgggcatggtgctggttggtgcggattctgcagacaggcatcagcggagcggggctcagactttgagaggcccaggaggggacaggcggggccttgctgcgaccccgcccctcggcccgccacaaccccgaaacacgccattctgtaggcccccgagcgagcgcccggggctggaatcaataagccccctcccgcctcccagtccccagggttccgggagcgaggtcagggcgcccagaagcccaaagcggggctcggcctcgccagcttccccaacccgccctgaggctccatgagtccatccagcccttgctaggtccacagcgacttggctgtgcgcttgagacaccagccagatcctaacggagcaaagctcttctcccttctcctccctgcccgcagaatccctcagccttctctccgctgccgagttcccaagggctctgggagactccggctgcaggggtcagactaaaaagtggtggtcccaacctgggaatttaattcagcccctgtcactgtaagagcaggacttcctctgatccgaaagctactccgagggcttagtctcccctctagccccgcctacacaggaacagtgtcagtggtataggaaggacccccaggaaaagggccagagtaaaggaaatgtggtctgtgttttctgttaggggcctttggatactgagtccttcggtcatctggctaagtactatgtaaattagccacttcgtattttggcacaatttatgaatcgaaatccaaggatcagatccagcaagttggtgaggtatctgaggtgccccctagaaatgtccagccagtccactaggtgaacctcacagagaccggaacagcaacagcaacagtgagtgcagtggccacagagagcaggcgagggaggatggaagaacttcccggaccaaactgagggtccggctgctatttctctaggcccaataacgagatgcagatcaaatggggaggaagagaggttttatttctgcaaccagttacagggagaaggcctggaaattactaccagaccaactcaaaattaaagttttccagagcatatataccttctaaggtatatgtctacaagtaagtgtgcattcatctaaagacataagtgattaacttctttaatctgtaactgaggtctgggtcctgaggaccttactctggagcctcagtctatttacttaatctaaatgggtccaggtgcgggggatgattgcccttatcttgtctcctgctaaatcatggaggtttggggagttccttcagatgcccagtaaacttgtttgtggaggcctggggagtttcttcagactcacaataaaacttgtttaattctaaataggtcctgttaagaattccttcgttgttttgtcatgctttaaggcccaggaaaggcctaagcaaaactcttggtgggcttttgttacatccagcctctgtataaaggtactggcttttttcagcttttaatatttaatttcatcactcagtcagtactgaaacagttgttatggaggcctgtgttagtgacacctggtctgccacagaacctgtccctcagagaagccagaaccctgtcctgctgaggagggaggtcagaggatggtggccagagaggagcctgagggctccccacaggatcacaggcagggactctcccctctccagatccaccatgccggacctggacctggctcctgacccatgtgtgttcttcagtatgagacggtggctccagtggcctttgaagtcacaccgtgatatgtgacccatggtacaacctccgcaagaacaatgtccaacctgccaactttcttctttcaaggtagaaggaagactttcaaaagagttgtgcaatggattagcctggggttgactgctttttttaaaggatattacaaataataatggatatatggaaatagatgatagacctttaatgagaaatcattttgcaatgtaaaccaggctgttgtgctgcaaaaaaagtagttttttgttttttgtttttgtttttgtttttttgtaaattagctaaaacattgttaggactc

SEQ ID NO: 892 - DNA, 4001 bp, Homo sapiens
ttacatttgaactcagaacatttgtactcctctgtgaggacaccagccagtttcatggcctagtgacaatacaccttcctgagggaaaaacatgcaaaaggtagaaatattatatttaggctgggcgcagtggctcatgcctgttaccacagcactttggtaggccaaagccggaggactgcttggacccaggagttcaggaccagcctgggcaatgtaactaggccttgtctccacaaaaataaaaattaataaaatttaaaaataaaaaaattagccaggcacgtggtgtgtacctatggtcccagctactcagaaggctgaggtgggaggatcacttgaactggggaggtcatggctgcagtgagccatgatcgtgccacctacacttcagcccaggcctgttccataaaataaaaaatactgcatttaactttctttgttgtcactgatagaaaaacttgagcaataactgctatgatacataaattgcacatatctagaaaaaaatttcagacttaaaaagccatgatagaattaaaaaaaaaaaaagccatggtagaattttaagtcgtatttgagtgatctggggagcccaagttttccatttacctacaaggaggccttacccgacagaacaacacccagatagaatgactgagcatccaatccaagaatcagaatcagtaaacaagagtgtcactggctttatgagttctgttcaaacagtatattagctaaagctgcctcccaccccaaattccttttctaatcataaaatgtaagtcttggcagttaccagaaaaggctattttgtaaaaatggctttcactgtgaaattaaccaattccacagatgatagcagggtcagaaaaatagtgccagagttccagaagctgtagaattaatttgatactttcaacacaggattagttaaccaaaggccaggtgtggataacaggaaacaggttgtcttagactctacactctaacacgactcttggaaaagtcaacattggcatgactcagtttacacttatgcaaaaatactaatatctacctcacagtggtaatgagagacataattagggtctgcaagcatttttcaggtcacaagattaaaggctgtttctgagggtactgcatgcatttcctgtagatatgagtacactgcattcttaaatatatactaaaaagcgacctcccagcacatataactaattttctttggcaagattttcttcagaagtacacaggcaacgatatttgtaaacaaatcctttagcagggaactaatcaactcttccgatggctctagcttccacttccgaggcccgctgtgatggtaaccaaccaggttccatctggcttaccaatgctgacgttcccaacttcctagctgtcagatcgataggaacctgaaactaactgtttcccgttcctttgaaaaggagaaattacggaccctcgggttgtttgggccgtagatgaaaaaaacaagcgggggggggggcgcgggggaggagaggagggagggtgggaagaagagaaaataaagggagattgaaatattgggaaaagatacgagggcaaggactggggacacagtagcccaccaggacccacatagggtgatatctacataagactccagggcaataacgtcaacagctcggtaacccctgcgacaccctgacagtcctgccgtctggaagtgcctttgtcccggcccgtcggccagtcccgccgcttctctcccatacccctaggcgctcagccctacgaggctgcccggaggccgcctaaaagccggcggcgctcgcgcccgcccctcagctcgccgggctcggcgggacatactaaccggctggtagacgccatcttcacggcgactgcggtgcccgcaacaagacacaacagacacaccgaaagcaggaagcgaatgtggcgaagagacgcgcagagatgagtttttatagacgactcacccacgcagtcgtagcagagcagggctacgggtcgggagaagggccaagaacagtgagatcccatacgtcacgtgctttgcgatttcttacgttcttactccgtttctgtaatttgctatgttgctaagcgagtcaacgtaactacctaggaaaagtctcatgggaaccctgcaaaggggctacaacagagctactctcaatctgacagttaaaacacaaagaaaaccctggcttcgtagtggtgccaaagcctgcatccctaatagtttaaccaccccttcctctcccaccttctcacggctaccttctcacggccaccacctaccccgcccccagccccccaccccgcgtcaggcactcccatttgagccagttcttacgtgccccaagggtgattctttctaagaaatttgaaataaaaggagaaactcacttaggtcatccagaacaggtgtctgttcaggatctgtcatcagctagcatgttgtcttcttaggcacgtcctttatacaggtcatgtaagtttatataggttatggtatcttgccttgcatacccttttagaattggcagaagatgaaacaaaactacgtgaaaccaatgtgtacacaagaggcacgacgatatgggccatgctctgatcatttttttttcacggcctttgtaacgttggctgatagctacatatagaaaacttgcgagaacatctagatattgcaaaatatccctagatttattaattagccaaactaacgtcaaaattgtaataccactattactaacaacaataacagttaccggtggagagtattcacgttcttggcgttttgaacaaagaactggacacaacgcacaaactaaggaaagaatgaaggaataaaggcagagatttattgaaaacgaaaaggtaataccagctcaagactccttttgcagaattttcgggggtttaaataccctctagaggtttcccattggttacatggtgtacaccctatgtaaatgaagtagtggctccacaatcagtctgattggttgtggaaagcaaccaatcagaggctaaagtgaagttacaaagttacactcctatgcaagcgtctgattggttgcagaaagcaacgaatcagagatactttcaatttcacatctgccacacggctaaagtgtgtgtgtgtgtgtgtgtgtgtgtgtgtgtggttgtgtagtggggagggggttgcaaagggagtaacgtctggttcttttgttacttaggtgtggaaagttggggttttccttttttttttttttttttgagacggagtcttgctctgtcgcccaggctggagtgcagtggcgcgatctgggctcactgcaagctccgcctgccaggttcacgccattctcctgcctcagcctcccgagtagctgggactacaggagcctgccaccacgcccggctaattttgtttttgtatttttagtagagacggggtttcaccctgttagccaggatggtcttgatctcctgacctcgtcatccgcccgccttggcctcccaaagtgctgggattacaggcgtgagccaccgcgcccggccggggttttccatttgatttagttctaggaaatcagtgtgaatctgccttaggttccctgccttcagacagtattctcctgcggcaacactttgctgacaactattcttgaaaatacggggattggtattttcatggtggttttcatggggctgagaacttagaagataatgactgcttccttcatctggggatgggatttaaatgtaatggagcactcactgttttcttgagaaggtgggagatactagcttccttagaaagaaaaaggggtgcgagaggcaggattttaggaactcaaatctaggtgggaaccggggagcatgatttcttttttctttcccaatcccaatcttctattttgtaattctgtaattttaaaaacttgactgtactcttgtgggggttttttcctccctcaatatttttgtcaagt

SEQ ID NO: 893 - DNA, 4001 bp, Homo sapiens
gtggcagggaaggacagtgttggggcgaggcctccagtcacccagttcctccccgggctgctcctcccgactggaccagggtaggttgagctgctgggagtggagtatcatgggtggccctttctgcaggagaaaagagcttccctgctgcggaggggaggcaggcagtgggcaagcccccctagcatccggtacaggcagcgtaggcacagatttcacatgtgcccgggtcctcagcgatttcctctgcacaacagagatggagcctcgtgagaaccagcatttcctcgcgaggcccctgccgcccttggcccagagcttgtacgtcaccacccagccccaggagaatctcagcaggcccgtactctgacctactgggcttttcgccccaaaccagggcacacagaccactcaaaccaaccaatcaaagcagagattccaccagaaagagaggaaactaagaccagatgaatggtcttagttcccaaacctcagcagttacaacttggaattgaagtgggcatggaacagacccaccaatcagagccaagctccctagttccaccagtcagagctgagcccttcctccaaatcccaccaatcagagcacatctcttcctcaagtgccaccacagtattcccgaaccccaccaatcagagaggaaggaggctgctcacccagcctctgaagtatctcctgggcattgggctccttgcagagaggcttgagttcttctggaaagttcgggttgctacagaggatgggaaccacaggttcaccagggatgggtgcaaagttcctgagtttcccaaccctgggctcctggggctcctggaggtctttgagcttcttcactgactccagagaaaaggagaaatttccatcctggaagagagaagcccagagcatgaggccaggctgcagcctgcttcctggctgtgccccccgtgctggccccggtccagcccagtggtgctcacaggcagtgttcgtggcatatgggagccaggcgatccacagtggggcactgtgaggggcagagttcaggccccacgtcctggcttggctccgtgatgctggacactctggaacccgcaaattctgcatgttgtatggggaatggagaaaatgggtgtgaagctccaggaacaccataggtgcctaatgagtaggagccagtgtgctgatttttagggagaggcaaaggaccagcacccaggcatcgtagttccacgtggccaagcccaggctgtctttcccctgcctgagagcggtgcggctgattactgggcccccagctccagcctgcagcctggttttggtttgagaagcaataaaaggcctcccggaatctggctttgatagagatcagggcccccgctaggtgccagcttggcctgtcgccagcattggcactggtaggcatacccatctgtcaggacctccagggtgtccatgtggttcctgggacccactgaggagtaaggtctggatttaaatccagctcctgcacttcccacagccatgtgcccatggcctgttacagaacctttgtgaggctcagttttcccctctgtaaaatgggactaatgatccctttcttccaggttgatagtggagccacagtgaggggctggggaaggagccggcacataggacactcagtaaattggccaactccccgccttccccatatggttattcctcttccctccactgggtttctttctcctccaaagttgaagggaaaggtgtgtgtgtggctggactgagcaggagctcctcgaagaaggccaagcctgggacacacaccctcaatccagccccaaagaggaggtactctctcaggggaccagacctgggcactaggggcagggagccagctgggccggggtagggacacaggactcacctgcacggtgacccctcctgccaaggcggcccaggccccaaggaggcacagtgcggagagcaggaaggcattcatggcagcagtgcccgagagaggggtggctgttctggatgccagggggaagcggcgggacttttaaagagggcaggttactgagtaacctggaagcctctgtcagtctcatctgctcacctgtcaggccttatcagataaggctcgagacagccctaggagataagagccaggcagggggggccccggcccctccctgagcacctactttgacccacagccgggctgggtcctgcattcattcaccaacaaggcacattcactcacgactgccctgtgctgctgtgtggggccggcagaccctgcccttgaggaggggggcccagcccgacagtgaaacgcagggcgattagggtggggtgatcctaggatgaggtgacggggctgcactgggggctgagctctggagaatgggtggaagttttcccagagaagggactgaggacagaaggccatttcatgccaaagggacagccaggaggtgagacgggcctggaatattcagggaaatgtgagaaattccacgggggaggctgcagggcaagtcagggtctgggtttgattgccgcgacctcaaggaagccctccgcacagcctgggttccgttccacctactgcccagttgtgaggcgtgtgaacttgggccaatgctttcccctctctgagtctcgttgtcccttgtgtcccctgtgggaaccaaaaataatacctacctcatggggtaggtgtgtggtaggcattactgtttggagaatcaagtgaggttttaaaaacatttagctcaatgcctggcacacagaaggtgctcagcagaggtccattcccatattattagcagccacagcagctcctggtcctccctggcccctctggtgacctcctgcctgtctgagtcacaggctgtccccatcctgtgctggtccccatcctgtcctgcctgccctgcagcctcagggtgtcctcgaatgagctcctccccaatccgcccgccccccttgcccctgcagatacagtcccctttccgcggatctcactggggaattgcttgggtgtgcccgcgcccctatagactctgaccccattcagactgcgccctcagggcagcgtgcattcactgtgtgctgttgtgagcaggaatccccaggacacaggagaaagggtagccctgggattgtcatctttctactcagccaacctggcccgatgccaggacagccctagggcgggaggttgggcaggaattcctgggtggggagagtcaacactgaagagggaattggagagagcagggcctgaccaggagggaactgcagggacaaggccctcagggaggggcaggtagctcctggcccagctcccagggcagtcctcacagctgcactggatttcccacccctttctggtgagtgtgtgtgtgtgtgtgtgtgtgtgtgtgttaagggggggtgtgtctgcggagatgtgtatgtctgtgtatgccaaggtgtctgtatataccctgatgggtgtgtgtagccaaggtgtgtttgtatgtgtgcttgtgctgaaggtgtgtgtgtgctgaggcatgtgtgtacactgaggagtgtatgtgtatatatgctgaggtgtatgtgtgtgtatgctgaggggtatatgtgtgtccgtgtacaccaaggtatctgtgtctgtgcaaggaggtgtgcatatatacatcgaggtgtgtgtgtgtcagtgtgtatatacacaggcgcgtgtgtgtacaccgaggtgtgtgtgtttgctgggatgtgtgtctgctggggtgtctgctggggtgtgtgtatgtgcactgaggtatgtgtgtgtgtatgctcatgtgtgtatatgcactgagatatgtgtgtgtatgtgcactgaggtgtgtgtgtgtatgctgagctgagtgcatctgctgtgttgtgcgtgtgtgtgccgaggtgtgtgtatacactgaggtgcatgtatgcgctgaggtgtgtgtgtgctgacgtgtgtgagtgctgacgtgtgtgtata

SEQ ID NO: 894 - DNA, 4001 bp, Homo sapiens
gtctagaggtggagtgagggcttgggttcaagtcccagatgctctccttcctagcggccactgggcaagtcactcacactccctgtgcctgagatttcttgtttgctaaatggacagggtcactgtgaggagataatgcaggaccgacaagtcccggcacacagtaggtgctcagtaagtgctagctagttgctacattctcgtgcctggctctgcacgatccctcaggtttcagcttggctgacacctcctcttggaagcctttcacacccctgtcccatcgcagatgtcagccagctctcctctctgctccacgcagccattgtctgttgatgggtctgtgcctggcgtggactaaggggacgaagcaggttccaggcatgcctgactcacagtgcccaaaccggggagtcctgggagccagtgggacagggcctgagttacttgaatctccccatcctcagccgctgggtgcttaagagaaacaacccaggtggaggagcctgggcgtgggaggagacagagcgaggttctgcagggagcgggggcacttactcagggtcttgaagatgctggaagcctcctgcgaggcgcagacaggctgaaggtcctgaggcagagcagggtggtggcacacggcgggcaggaggctctgggcctgcaggcgggggctgggtgcccactgtgcctccaggtcactcagcttcttcatggattccagctggacccggaagccttggtactacagacaggggagaggagataggagcaggtcaagacctggtccaggggcaggcactgccatgacacccagggttgctcaaaccctgcagatcctccagagccttccccgtctctatgggaagtccagggccacactggaaagagccgctgcggtgagaggtgtgaggaagaagcagcggggctgtggagcacagtggttcgaggctttagagacagacaagccctggttcaaatcccacctctgcccatgaccggctgcctgtctgttccccactcagcctcagttccctcatctgacatctcccgtgggggcctggtaccagggcacaatcactaactgagtacgcctgcctgagctcacatggcagagtgatggcagccccaagtagctggtctctgaggccagggctgttggggaggccaagtctcctgcacccctctctgggacccactttgttcttcccaaggagaccatgcccagagtcagggatgtgacacccagggccacagacgtctctgctatgctgggcgaggccagcagcatcccctgtgacgtggcagacaggccctgctgtgacgactactgccactctcccatgccccctggaagggcactggaacccccatagtcttctatctggtctttgcacatgctgtgccccttggcctggaacagtttccccatcatctgtgtctggcaacctcctgttcatcttgcaatgccagctcaagggttacttctcaggaaaatttttctggagcctgtcctcctccacctacatgtgggtgaatatacggaactgtgggagcataacagggtgtctccttccctttctggcctcctcccatgcaaggaggagccttctgttccacaccctgacctctgtgaccagcacgggcctttgaggggagcagcgctgaatcagtttggtgttgtcattgccatcatcactgccatcaacatctggctgcccccacccaccagctgccttggtctctgggctgtgatgggtgttgggctgagccccgggccccgtgctcccccggtgcccctctgaattcccagtacaccctctccagcctagcctcccaccatggggcccttcaggcaaagggaacgctggccaagggactcacctggatgtagactgactgtgtgctctgcagcagcagcaggaggaccacggccactcctggcaggagccctgatgcagccctgcagcccatcgcgctccctgggttccccctgccgctgtccaccgtctcccatctgtgtccctgcctagcacctccttataggtcaggctcaggagtcctggtcactcattaactggccagctggggtggggttgacagctagctggctctctgacaagccggggctggttcctaggaagggggttgggggcgaggagggcaggagcccagagtctatgggaacacagtgcttgaacaccgagtgcctgccatgtgccgggctctccatgggggccttggagcacaccatcattcactcctcaagacacctgtgtgggtgtgatgacggggaggccattttacagacaggaaaagtgaggctcaggagggagggtggctttccccaggtcacggagctagttaatgtcagagaaggggctccagccaggtgtccttggcccaggtcagcccatggtcctttctctgggggaaggatacagacagagaggctggtccagggcaaagtgggcagacactgctgatttcagggttctcaagaccccactcccccaagacccacatctctctcactccctctcctcagtgctatttaacgactatctttcagaccagtcctggccccacgttttgaacctgcctctgcttgccatctcccacctgtgcctgggtgcttcaggccatgtttgacccatctcacctgtctgtgctttcagaagccaatagcctaatccagcatggaggaaaaggcagtagtgttggaggcagattgacccgcattcaaatcctagtcctgctgcagctgtgtgatttaggatacgtcacatcaattctaatggaatcttagttttctcttccatcaaatgggcatgatacaacccctctcgtaaggttgctgtgagggccccggcccacctgaggttgcccttatctcctgggtaatgcatccatagcagcccctgaatcttacagttgccttctaggcaatgcataacctactgccccagtggttgaaggttgggtcagagagaagagggcaaagtctctaagggtgatatcaccactgccataccaggcagctgtaaacagtgcgtgtgccagggctcagctctgccaggcacagactctggcatgtggcaggctcccctgacattgagcctgaacgttggattgaagccctgatagctcaccttggcatttaagatgccactcccaaaagtggctaaaatctgatgtcatcgtgcttccccataccaaccctatttgcacaggtctaatcccatctcatgtctttgcctactcattccacctgcctgaaatgccatcttcctttttcttatctcagactgaaatgaagaagaagctcaagtgaactttggaatttcttatgtattgctttgaatccagacttcagcctttgctctttagagtctatggaaatgaagggaatcttacatgccctctaatctgtaaaatgaaaacaaccatctgggaataatagctctcatttcttgaatactgtgcacaaagctatgttatagtcgtaatcccattgaatcctaaaggataggcataatggttattcccattttacagatgagtaacctgaggcccaatgaagcaccatgtttgttgtcactgtgggagcaagaggggtaagcagattttctacctggaattcttgcctttgctcagcctgtggtgttatagaaaaaggaactgaggacttagagatgaggagagctgggttcaaacccgaatgacagcacttaccagctgtgtgatctttggtacattacttagcttctctgagcctccgcttcttcatcagtaaagtagagaaaatagtaataataatttttaaaaagacctcatagtggttgttgtaaggaaaaactgaacgatacctgtcccaggagagcctgtgactctccctaaaaccaaccatttccccagcatgtgcctggcttatgggggatgcgtcatgaaggggggtttccctgcctctccttatgtaactcccatgacaagccccatctctc

SEQ ID NO: 895 - DNA, 4001 bp, Homo sapiens
agacatctgaggacccctcaagtgctgccaagtgcctgagccagacaccatttctcacactgtcctcactgatggagatacgagactgctgggttccagtggggagttgggagttggtggtgatggggtggggactggagaccaacaggttctgggggaaggtggtgggggaactggagaccgtcaggttacagaggggacgatgtggtggggtgactggagaccactgggttgcacggcaaggggcgggggtgctgttgggaagggggtcccttgtcttgaatcaggcaggcagagtagccctttttaccaggactccagaagacagctcaaaagtgctgataagtgccgagtccaggacagggctggggacagcagcactgtggccgcctccaaggtgggaggaagacagccccaggccttggccggcctctcacactgtacccaaggaaggcgacaccacgctgtggcgctgacaccctgattgagttcaccggcccttggaggcaaggacccatctcacagattagggattgatgggggcaggagacgggcagcacagccaacacagctgcagggcccagcagccctgcccacactgggggtgctccagccatagggccccaccccactcacctttgccgttctcctcgccgggcctcgggttcctcgtggtatctagcagagagacctgtcacccatcgggggctgctcggagcccaatgccccacccagcgtttcccttgcagtcccgacagcacttgagccccaggatgcaggcagccagtgaagcacaccactgggaaggcgcaggagcctacaaggcgagggttctcccagaaagaaacactgtggcccagttatcagtactcaacagacccagggaagggagacacaggcacgcaggacagcaggagtgtgataacctcaggttctgtgtgggggggagtgtgcaagagttcggacagtctgcagggtgggtgtgcctgttgggtttgggctcctggcctgctcacggtgctaggactactcagcagccttgaggtctacgcacccctccacgagagccctggactcacgggacacgctgaagccaaagatgccgctgtgctcctggagcagcctcttcagcagggtgctcttcccagctcccgaaggcccgctcagcaccacaggcctggggcccgacatgcctgggggtgagaagagaggctgtggatagcagtgcggcctctagtccccatctgctgagctgcctctgccttcctgaattcatggcaggaaagggctgacccagggatggagacattggcctgagagtctcctgagagcctgggtgttcttccccctgagctctgccacgttggaagggccggcatgcacagggcggccctcagaccaggctctgggcacacgggagacgaatggaaggccggctttactgggttctcagcaggggagccccccaactgaaacccactgaccctgtcagcctccccaggggtccctagcaagcaatgctgtctactctgatgacaccctacctgggagctgccgtccccacctggtggagtcacctccaagccctctgggagcctgctctgagacccccaccccacccaggagtccagccatttgctcccatgcatggtgctgagtgctgggctgctaggtctggaatggaagtgtccctgtccccgcctctgtcctctggtaccttgccctgcagatatggtcttgtaaagatctactgaatctacacctattccaggaacttctcataggacttgggactcctatctgtgatgctggtaatgccagagggggttggaggcctccctcccagcccccaagggaaaggcaaacaggatcctagcttggacacgtggcaggtgagggcccgggagctggcctttgcctggtgggaatcctccccaagaacagggcctacctgtttgctgaggtgcagcctctgtagtcagcctggggtgggtctgtctgctggactgagagctgggggtgctgagtccctaatccccactacgcctgcttctggccccacccttctaagccacgaataaatccccagggggcctggccctgggcccttgcagggaagcagccccatccacctgctctgcggctgtgcaggaaggaaaagacagctccagctcttgccccaagacctgcacctgccctgccctcccagtccacatgagctgcacacacagggccagggcagcgtcttcgagttgggatggggagcagagctgaggagtggggccgtgcactgcagctgtgttcaggggctgggctagagggaagcggatggacccctggccacacgcacaccttggacacaactcaggcgaggcgtgaatggcctcctcctgtttagggcacagccgcctgtgggcagacgagcagacagtgggaaggacctgaggatgccctcctaatccccaatttaggccaccgaggtaatctcacaaatgcaccacggctgcaactccatcatgcacagcgacacccaccacacacatgccactcccaggcacaaaggtatgcaggatgtgtgcacaaacctaccacaaacacacacacatgcatgcacacacaaacacacacacaaatgcacgcacaccaagcaaatgcacacacaccacacatgtgtacctgcaaaggtacacatgcacacgcatacatgtcattgatcacaaacacaccggacccccagttaaaaagactcaagaggaagggaactgcaggacacccacccagaagtccatgtgctctccataagggatagactcctccctccttactgcctcttctgggctttttgtcacaagcacacatcgttttcatctcaccatgcaccccatgccctcctggctctcccacccgcagaatttgcccctgcgcttagctcgggcctccccactaacctggctcctgctgctcacccagccctgccacctcctctacgtgccagccaaccatcagcacgcactgcagtggccagggttctttatccattcagcttctcccagccagcgagccctgcaacctccacagcctggttcccataatgcactagctaggagccccccagagtctcccacaatcaatgagccatgccacttgtgtgaatttctggcccctgcttctcgccagggtggaaggggtacagttctcaggacacatccagcaattgctacacacctacttgaagcactgagatcacagaaattatgacttgatggtattatggtgacttttctaatacgaaggagaaaaagtaaagctaaatcatgtgcttcgaaggacccgatatgggagagctactcaaatggtcctgtgggctggaccccatgtgagcttctgtcctgttgctccactgagctggcccttcttaaggtcactctgccctgccaacccacaaccagcatggcactggtgggcctgacagggctgccccaaggccggtcctgccctgttccccccagcccctggctccaagctcttcgggtctgaacctagatgctacgtgactataaacccacacagaaggaaacacagtggtgacctccactgaccaggcctcccctcctccctcctgagggagcgctaagctagtgaagtgaagctgggcccacaggcagaagacaccagttcgcccagctgctgccaggcaggggtccaggctccagccttgccaagggcgtcgtctgcacagctgtgcctacactcgcccagcacagggcacaaggcacacgtggcacatcaatcgccaaaaactctgggagtttttgcgtcctcagaagggggagagccacaccttctgaggatcccaccaaactaccacaagaccctggtctccatcccctcctcggccccaaaccccatccccgatgcccaggaattggggagctcgtgcctcacttccaactcccaggaatggggggtgctggagtcccacctctggctcctgggttggg

SEQ ID NO: 896 - DNA, 4001 bp, Homo sapiens
cggtcaccaaagccaccttccatggagcacacccaagggagaaaactgtggcccaggcctcaaggctcctgcaatcttgcggtggaaaccacggagcctttgccctgaccagaacacatgcgccaaaggtgtcttcctgtgggcagagggaagcattccagcaaacattctgtgctctccactctcaccaacccacagtcgcaaactccaatcagctgcctggcaagaagccacacaacccacaactgtaaggacctgccaggcacgtggtctccacaggagctccgagatggaaggtctcctgggagccgccggcgcagatccatgttccggaatggtctctgccagaacgctccctggactgggctcccatgctgccccagcagccgctttcctggaaaggcactccctgctgtggcggcataatctcctccttctggcttccagccatcctaaggactgaacagagtcaccaccttgcccccggcccactgttcgaggagatgctaacagagggcttgaccttctgagaaccgagagaattcagcccccgcctggcctctcgtaagacacaaaccaccagacgtgggcctgggctctgggctgggccaggtggatgaaggggaggctggtggtccaggcggctgctcttggctgcagggtttctgggcacacatccgggtagcacgcatcctggccttcagcaacctcgttttaaatgggaccacaccaggagcagccagggcgctttcattttcactttctttccccgggggggacaggaacattcctttacctcctgaggaaatcgggctcttccagagccacagaggagtgaaggccccagcccttcacgatgctgcgcggctatgtttgggtctgtccatcagggagaaagaaaaaccggccgagtcttgcacagggtcctcgacagcaaccccaggtaaagagcagagcaagcctgagacaggaaggggccatgagcccaaagacagcagagcaggacccagcccggggcctcaggaccgacctctttcatgcaaagacgaaaccgaggcccaccacacgcagggtcaaaatcaactttgaggcacctgcttcccacaccagtccttactggggcatacttctaaggcgacgctcaagaatggcagcagggcagcttcaagaaccccaacccggactctggctttggagaatccgaaccccaaatgccacacccatgcgtcgggaaggcctgctgtttccccaagtccccgtctctgcgccgtgccgcggagtaggcagaatcctgggagccccggaatagccggctccatccgcccaggaccccaaggcttgcagggtgaggtgggaaccggagcgcacaccgcgccgggccagcggtagggactcccagctgctctctttggcggcgcgcccaggtgtcgggaagacaccgagcgctcctatacgcccggggagcagctcgacactgcgataactgccggcctgcccagctcctgaggagcgccccgccctccgggacccgggctccgctgcgttgccagcccgtccgccctccagagctcccccgttctcagggcccacagttgaatgcggcacagggcgtctcggctaggaggagatccggaggcggcgtggactgggcgaccgcaaagcgcagggaccgctgccgcctcgacccgagtcaccctcgcgatcgcgcttgtcgtactcaccgtccggtggggcccggcccagggcggccgcagccagcccggccagcgggcgccgcagcatccggggccacctcttccgcccactgaacctacgtgacagcgccgcaccggcccacctccgcccgcgcgcgagactgacgtcatgaggcgactgccccgcccatgtctcactcgttcttccccgccccttagggaagtacttacctcagtgcctcgctagccccgcctccacctgcgctggcctgtcgcgaccgcaggggcgttcagcacagcgccctcccagcccgtcttctcccgctgcgtcacagcgccacgccggcccgcctccacacagcgcgaactaacatcacgacccgccggccccgcccacggcgtacttgtcccgcttgtcactcagagaagtacctcagtgcagcgcgggcccggctttcatctgctacgtcacagcgctgcctcagcccgcctcctcccgcttatgtcacagcgccgtttccgtcctccatctacactgcagggacctaactaacgaacgactccgctagcccgttccaaaccggccactctccaaaaaccattaattggggaatgtggccgggcgcgtggttcacgtctgtgatcccagctctttgggagtccgagccgggaggaccgcttgaggccaggaattggagaccagcctggggatcatagggaaaccccttctgtaccaaaaaatttaaaaacttttttgtgcctgtagtccttgctactcgggaggctgacgtgggacggtcgcttgagcctgggcagtcgaggctgcagtgagcggtgttcgtgtcactgcactccagtctgtgtgacagagcgagaccctatttctttctttttttattttttgagacggagtttcgctcttgtcacccaggctggagttcagtgacgccatctctgctcactgcaacctgggcctcctaggttcaagcgattctcctgcctcagcctcccgagtagctgggattacaggcgcccgccaccacgcccagctaatttttgtatttttagtagagacagggtttcaccatgttggccaggctggtcttgaactcctaacctcaggtaatccaccaaccttggcctcccaaagtgctgggattacaggcgtgagccactgcacctggccacgggactctatttctaaaaattattttaaatttttaaaaaagatttattgaaggctgggtgcagtggctcacacctgtaatgccagcactttgggagtccgaggcaggcagatcacctgaggccaggagtttgggactagcctggccaaaatggtgaaactctgtctctactaaaaatacaaaatcagctgggtgtggtcgtgggcccctgtaattccagctactggggtggctgaggcaggaggatcacttgaacctgggaggtggaggttgcagtgagccgagatcaagccacggcactccagcctagacgacagaatgagactccgtctcaaaaaaaaaaaaaaaaagtattgaatgtgaactgcaggagagcaagaaaaaaagtaaaactttaaaaaatacaacttcaaaaaaatgtgttggggctgggcaccatggctcatgcctgcagtcccagcacttttggaggccaaggcggatggatcacttgccccggagttggagaccagcctgggcaacatggcaaagccttgtctctattttttttaaatactaataataaaacagtttgttggacaagggattgtaacctggaatacatgtgctatgtcataccataggtgctgcattgggggaggtgggcaaggagaagctttttaggcaaaaaaaggggaagttcactgtcagaggcaaaattatgtcatatgtattcataggtctcgctggcttttattcgtgattcatgaattgaggcagccttcattctacaaaatagaataaaagcccctgcctgaattagccaggtgtggtggcgggcacctgtagtcccagctacgcaggaggctgaggcaggagaatggcgtggacccgggaggtggagcttgcagtgagctgagatgcgccactgcactccagcttgggcgacagagcgcgaccatctcaaaaaaaaaaaaaaaaaaaaaaaaagcccctgcctgggcgatagcagaaccatgggttttgtaaggtgaggagaacgaggaaacaagatagaaaaataacagattgataaccttagcttacttcaggttactcttttgtaagggttagagagaagaagggacttccttattatgcc

SEQ ID NO: 897 - DNA, 4001 bp, Homo sapiens
ctgggggccctggccagccagagagtgcagagggcagacagtgagtggatgcgggccttgcagaagcacagccacaccaccaccgctggagacagggcggaggcacaggctgcctgcctgcctggggagagaccagtggcagggcggtcaccaaagccaccttccatggagcacacccaagggagaaaactgtggcccaggcctcaaggctcctgcaatcttgcggtggaaaccacggagcctttgccctgaccagaacacatgcgccaaaggtgtcttcctgtgggcagagggaagcattccagcaaacattctgtgctctccactctcaccaacccacagtcgcaaactccaatcagctgcctggcaagaagccacacaacccacaactgtaaggacctgccaggcacgtggtctccacaggagctccgagatggaaggtctcctgggagccgccggcgcagatccatgttccggaatggtctctgccagaacgctccctggactgggctcccatgctgccccagcagccgctttcctggaaaggcactccctgctgtggcggcataatctcctccttctggcttccagccatcctaaggactgaacagagtcaccaccttgcccccggcccactgttcgaggagatgctaacagagggcttgaccttctgagaaccgagagaattcagcccccgcctggcctctcgtaagacacaaaccaccagacgtgggcctgggctctgggctgggccaggtggatgaaggggaggctggtggtccaggcggctgctcttggctgcagggtttctgggcacacatccgggtagcacgcatcctggccttcagcaacctcgttttaaatgggaccacaccaggagcagccagggcgctttcattttcactttctttccccgggggggacaggaacattcctttacctcctgaggaaatcgggctcttccagagccacagaggagtgaaggccccagcccttcacgatgctgcgcggctatgtttgggtctgtccatcagggagaaagaaaaaccggccgagtcttgcacagggtcctcgacagcaaccccaggtaaagagcagagcaagcctgagacaggaaggggccatgagcccaaagacagcagagcaggacccagcccggggcctcaggaccgacctctttcatgcaaagacgaaaccgaggcccaccacacgcagggtcaaaatcaactttgaggcacctgcttcccacaccagtccttactggggcatacttctaaggcgacgctcaagaatggcagcagggcagcttcaagaaccccaacccggactctggctttggagaatccgaaccccaaatgccacacccatgcgtcgggaaggcctgctgtttccccaagtccccgtctctgcgccgtgccgcggagtaggcagaatcctgggagccccggaatagccggctccatccgcccaggaccccaaggcttgcagggtgaggtgggaaccggagcgcacaccgcgccgggccagcggtagggactcccagctgctctctttggcggcgcgcccaggtgtcgggaagacaccgagcgctcctatacgcccggggagcagctcgacactgcgataactgccggcctgcccagctcctgaggagcgccccgccctccgggacccgggctccgctgcgttgccagcccgtccgccctccagagctcccccgttctcagggcccacagttgaatgcggcacagggcgtctcggctaggaggagatccggaggcggcgtggactgggcgaccgcaaagcgcagggaccgctgccgcctcgacccgagtcaccctcgcgatcgcgcttgtcgtactcaccgtccggtggggcccggcccagggcggccgcagccagcccggccagcgggcgccgcagcatccggggccacctcttccgcccactgaacctacgtgacagcgccgcaccggcccacctccgcccgcgcgcgagactgacgtcatgaggcgactgccccgcccatgtctcactcgttcttccccgccccttagggaagtacttacctcagtgcctcgctagccccgcctccacctgcgctggcctgtcgcgaccgcaggggcgttcagcacagcgccctcccagcccgtcttctcccgctgcgtcacagcgccacgccggcccgcctccacacagcgcgaactaacatcacgacccgccggccccgcccacggcgtacttgtcccgcttgtcactcagagaagtacctcagtgcagcgcgggcccggctttcatctgctacgtcacagcgctgcctcagcccgcctcctcccgcttatgtcacagcgccgtttccgtcctccatctacactgcagggacctaactaacgaacgactccgctagcccgttccaaaccggccactctccaaaaaccattaattggggaatgtggccgggcgcgtggttcacgtctgtgatcccagctctttgggagtccgagccgggaggaccgcttgaggccaggaattggagaccagcctggggatcatagggaaaccccttctgtaccaaaaaatttaaaaacttttttgtgcctgtagtccttgctactcgggaggctgacgtgggacggtcgcttgagcctgggcagtcgaggctgcagtgagcggtgttcgtgtcactgcactccagtctgtgtgacagagcgagaccctatttctttctttttttattttttgagacggagtttcgctcttgtcacccaggctggagttcagtgacgccatctctgctcactgcaacctgggcctcctaggttcaagcgattctcctgcctcagcctcccgagtagctgggattacaggcgcccgccaccacgcccagctaatttttgtatttttagtagagacagggtttcaccatgttggccaggctggtcttgaactcctaacctcaggtaatccaccaaccttggcctcccaaagtgctgggattacaggcgtgagccactgcacctggccacgggactctatttctaaaaattattttaaatttttaaaaaagatttattgaaggctgggtgcagtggctcacacctgtaatgccagcactttgggagtccgaggcaggcagatcacctgaggccaggagtttgggactagcctggccaaaatggtgaaactctgtctctactaaaaatacaaaatcagctgggtgtggtcgtgggcccctgtaattccagctactggggtggctgaggcaggaggatcacttgaacctgggaggtggaggttgcagtgagccgagatcaagccacggcactccagcctagacgacagaatgagactccgtctcaaaaaaaaaaaaaaaaagtattgaatgtgaactgcaggagagcaagaaaaaaagtaaaactttaaaaaatacaacttcaaaaaaatgtgttggggctgggcaccatggctcatgcctgcagtcccagcacttttggaggccaaggcggatggatcacttgccccggagttggagaccagcctgggcaacatggcaaagccttgtctctattttttttaaatactaataataaaacagtttgttggacaagggattgtaacctggaatacatgtgctatgtcataccataggtgctgcattgggggaggtgggcaaggagaagctttttaggcaaaaaaaggggaagttcactgtcagaggcaaaattatgtcatatgtattcataggtctcgctggcttttattcgtgattcatgaattgaggcagccttcattctacaaaatagaataaaagcccctgcctgaattagccaggtgtggtggcgggcacctgtagtcccagctacgcaggaggctgaggcaggagaatggcgtggacccgggaggtggagcttgcagtgagctgagatgcgccactgcactccagcttgggcgacagagcgcgaccatctcaaaaaaaaaaaaaaaaaaaaaaaaagcccctg

SEQ ID NO: 898 - DNA, 4001 bp, Homo sapiens
tccaggtaagattatggcttcaaagttaaacgttttcaataaaacctaatacttaactttatatataaatgatcatacagtacatttatttaagcagtagttaagtgttcaaatgaaaaaaaaaagtttctctaaagcaaaaagttttcctgttatccatctttttgttaaattatgtggatacatacaagagagactttgtcccatttttttcctgttttttaatacctgtaacgatgaggtttcttcacccctccagtagagggcgcactcttgcgagcggcttttgtagccagttgcttcctgggtgctttaccaccggtcgatttgcgggcagtctgctttgtacgagccatggtacagagacctccttacttacctaccagcattgaaaaatcaaaaatcaccatatgcaactaccaaacatacaacttttcctgccacgatcaccccctccccaaatctggaaattatgatcagtataaaaaataatgttcgtattgttatataatttgaaagggtgaagattacgtctacccaaaatctcttcttgaaacaaactagagtactagaaaattgttagcagtatcaatcacctctcaaaatgccaattctgagcgacaaacggcaaaacaaaaatacctcgaacggcctttgatccaatttatttaattaaagcagtaattagaaatgtctgtaaacattccatccacaaacaagtcaaaagaaaaaaggcacaaaccactggaaggtcgagtcaaattacagcaaaaaaaaggtcttactcccccccactttggctgcccccccttcgtctgactgttgatggattgctgtaaatatctgaaaatattcttggttttgcatctttacagttatgttgacaaaaaggcgtctcgaaaaaacaagagaggaacaacagctaccaccagcgagcattctacaaagccccgtcctcgcgtccagtcctcacaggcttcgcagtgaaataaaaagtgccccgcacccaggctttaattaacgcacgacatccgccgaccggtccaccccaagcaccacataaacttttggttttgcctccttcgggtccctcggcacagggtcccccaacctgcccgcctcgctcccagcgcctcgagcaggaaccaactcggctccccgaccagaacaaaatggaaacaatcgcaaaacgtatccgattccgttccaaagagacaaaacaccaaatcgctcgaaaatacccctatcccctgccacgtgccgccctccaaaatgcaaaagttttttttgcatttcaaatgcatcaagtttccgcctctccaaaaaagggaaaaaaacgtccctcttttaaaaattcttgcttttttgaaatggggaagagagaaacgggggaaaaaatatggtcggtgaccagagaagagagacaagatggtgaagcttagcaacaactgtggggaggcagcaaaaagcgagttaccccagggtgcgaagcggcggcgatttccacccctttcccgctcgaaaactgggggctggggcccgggggcggtagttaagaggcccgcgcgggtcatggtgaaggtttggggtccggggaaggggcggcgggcgggatttcaccgaagaaagaggagccaggggcgcggggaggaggagggagagcaggctcggcgccgcggcggttgctgctgttgggctgaggcggcgagagacgggggagccgccgccgccagagggaacagggaaactcgctcctcacctccatttctgggccaaaaagtttgtgggctaagccggaggggctatgggtcccctcccggcaccgccagggcccggctcggggctgacggcaagcggggctcggttccggggaagcgggcagacggggaaacttaccccccttctccttcggctggagctcggcgagcgagaggcggcgctggcgttggagagcgacggcggcgcggcggcggctgcgaacacaattgaaagatggctgacaccgaggctatcccccaacacacgccgccccgcccccgcgccgcgcgccagccaatcacacacaatggagggaaggctcggccccgcccccatagctcctctcgcgccccgcccccgcccttccccccgcgcgcccgttcgctggcgcgcgctcgcccctcccccgcgcgccgcccgctccctcctccaggccgcctcgcgccgtgtgtgtacaaacacaaaagacacgctgaggggccgccggctcccgccgagactgccgcccgcacccggccagcccccgcccccggccctgcactcccatcccgctccgtgtgcgcacggcgtcgaacccccgaagcccgggtttggggcgcccggagggaagtggggggaggggaaggcgggcggaggcgcggcgggtgaacgcccggcctgcgggcgtctcgggccgcggcggggaggggagggaggggctgcccccgcgcgggccccggcgcgcgcccccgaggagacccgggcggcagtgggggaggaggacgcggtcggccgggtcgccgcgccccattggaaaacgctccccagcaggaagctggcaaataggaatccagcgtcccgcgcccgctgtcggacctggccgctgcggcagcgggaggggcggaccgacggcctccttcccgcctgcgcgctcggccaagtgcggccgggtcctgcgggaccggcccgagtccgccgtagacaacttgatccgctaagactcctgggccggccgcctgcgtgcagggcagcccctcgccggtgttggcctccgggatcaggggacggggctcgctctcctcccgggcccgggcccccgacgcaagatggctgtgtcgcgtcggcctctaaacaatgtgtggagcgcgcagctcctgcaccagggcctggtggcttgtcctgcccgcccgtgggggccgtgtgatctgttttcggtaggattgctttggaaaggaattgccgaatatagatagtcaaatgtccgcagcttctgcatagtttagaagaggctgaaaacggcagaaagaaggcaaacgtggtttgggaattagtacatatacctgttttccaattctcagtagcataggaaacggacttttcatggcccaagttatcctcacgacttgtcagttgattggctttggaacctctgaaccgtccctagatggtattgacgcttcacaactgtgtgtaaaggttttcaatggaagggtcatgcaaatatcccgtagggtagtgaaggaggaaaatttcataaatgaagggcagtaattatttgtaatctgaagatctcacaaagcggcttagtgataaacattatcccgaaacagatacatggaaatcagatacgagggaagaaatggatttgtccaaggtcacttaagtgaggaagagacctaggagaaacaaacagacaaaaatccaggcctcccgtttcattattatttcatgaatgttaagtgtccatggttgctgtgcagaacacatgcaatctctaatcctatcctaaaagcacatatgcaatcagcttggaccgagctgccagcaaagaatttcctataattcaagccaagatgagttattttgcttgttttttgttttgttttcaggaaaccgaaatatttattgttggatttatccaggaaggctgttctgcattagttaaatgcatcatatcttcaagaaatgttaaatgacatgggtaatgttttctttgtatgctggatttttcaatagcttctacttcttggctttaaaaaatatttctaaccaagggtcagaccattttaggtagagtaattatgatcttagatgatttgaactaactcagctgtctgtccatttgtgaaatgggaataataatatttatctctatgaagttaggccacaaattctttctagtaggttcaagtatttaagcacctggagaggtgactggttaccctcctagtggcttcaggaagttttctcactgaatgaatatt

SEQ ID NO: 899 - DNA, 4001 bp, Homo sapiens
gaaactgtcaagccacaaagcctggaccctcagtcacgatgctaaacagcttcctttgtcaagcagaagaaggaagcattggggtccaaggacctgggctcaagaccactgcctaacttcgtgatctaattaagtcagctaattaggccaggcacagtggctcatgcctataatcccggcactctgggaggccaaggcaggaggatcacttgagcccaggacttccagaccagcctgggcaacacagcgagacccccatctctacaaaaaatatttaaaaactagctgggcgtggtggcacatgtctgtagtctcagctactcaggaggctgaggactgcttgagcccgagaggtccaggctgcagtgagccatgatcgcaccactgcactccagcctggtgacagagcaagatcctgtctcaaaaaaagtaaataaataaaataaataaataaatcagctaattaaatcagggagatgccctccacctttccataagggtgggtaggtgattagagccttagcatccacatttcttcatctacaaaacagggcaaataccatcaacccaaggtgggggtggggggaggggcagtgaagactgagatgatacatttgacaaaaatgctatacaaatgttaattaattaattaaatgcaaagttcctcctggcccccaagggtagtataccattgctctcaggaaaaacattgtgaacctccctcctctcctggggctacagagccaggccctgcagacagcactggagaaccaaccctggttcctaactcaacactcccgactagtctggaagcagcaggaggaaggctggcttggtcatcctccctgctgccctgacagggaaagaagcaggcccagagaagcccagttaagtcaaagtcagggacagggggaccccagcctctggagcagaggcacccacggctccaacacatctcctgggctccaagcctcctcctcatgctgcacggctctgcttcagaaggttttcttctgaagcacttctcccctctgcctccttgcctgctctgagaggaatgggctgtgaaataaaccttccgaaattacatacttgaagttagccaaagagcatggaagtagccttccaaaagcttatccaactacgaatcacttctgctcaaaaaattaacaaatcaatgagaaaatctttagtgaaaagtttgagcagctgtaaggggagggggcattacactgggaacccgaatgtgtggtggctcttgcctgcgccctgcctctaaacaaccacataaccttaaacaagtcatttagcctggctgggcctcagtttcctcatcgaggaaatgggagggtgagataaaggatctgtgtgatcttttagtgtccctaagtcctgttttccgaggaaaggtgatccgcaccctattatccgggaactgccctccacttttctataaggcaaatgagtgcttcgagccttgacctctgcagccaggcagggaaacagagaactaaaatatgaagccaagagctgagaactgtgcgtcattcagcagttaagacaaaaactcttgaagctatgacttacgtgtgtggaggatgcaatttcatttacaattcttatttaagatacttgccagaaatacactcactacgaaacaaaatgctgtgggggcatcctgtagggaggtggaaaaggccttcttctgatggctcatcttagagccagggcggactgcaggcacgtgaacccagtcctgggcacccttcactgtctccaactctaatcctgagaggctcctacgagtcatcctgggagagacttaccagttaaaaggctctgctaacatcccagaaggtgggggccagggggtttggatcagaatccaggttccggcctttgttctcacacaagcggaagaggcgtgcagctgtccccatacagacccggcacagcagacccagcctgtgctgaagctctagccgcagagcgttttctggtaaaccacaggaggaagcagttctaatcctctatgcccagcagacaaggggtgggagagaggagcgggaggtaaaggtcaatgtctgctgctgccctgttccctttcccagcttttgacgttaccttctgtgcgccaggcaggaggaagggaaattttcttcaaatcatgacccatgagtttggaattttttaaaaagaacatgtgggagtaaaacaaaagttcaaactaaagatcatttgaaactaaagcacaaggtgatgtgcctagtctttttacaatagccaacccaaggtttttgtttttgttgttttttgtctgttttttgcaatcttcctgttctggtccatttatgctgaacccatcaatgcagataaaaatcaagcctgctatcaatgacctctgatctgcattcactgccctaagggccagaatggggacaaaagcttccagatcgggctctggggtccttgttcctctctcatctcagagaatcctcatcccatctttaggcacctgtcctgtaatcccagcactttgggagactgagacgggaggactacttgagcccaggagattgagaccagcctgggcaacatggcaaaaacccgtttctactaaaaatacaaaagttagctgggtgtggtggcgggtgcctgtaatcccagctacttgggaggctgaggcagaataattgcttgaacccaggaggcggaggctgcagtgagcagagattgcaccactgcactccagcctgggtgacagagtgagactctgtctcaaaaaaaaaaaccattaaattaaaaagaaaggtaataaatactcaaaactcattacttcctaatcatctgactacatttcactaatatctatgctcttgatattatttatatccactgcatctatgaggtgaagatattctattatagtgtatttgaagttggccaacgtcagaatatttacaccacagatataggcaaaggctataaatcaggttccccactaccaaccccacccctcacagagtcagttggtaaacattaccagcacacaactgcctatccgtccaagtctttatttacagcccgaacttcccctaaactccagactcatgcagtcaattgctattctgagagcatgagtgggatgtttgccagacttaatatgtacaaaactgaactgatttctctcccaatctgcttccaatgtagctttccccattatcagtaaatgacaactctatctttccaggtgttcagacccagaaaccttgaggtcatcgtatctgtcagcaaatcctgtagtttctatcttcaaaatttatctagaatacaactgcttctcaccaccttccaccactccactccagtgccagccaccgtcatctccgtctggattactacaggaacttcctaattggcctcctctgtctacctggaccctctatggctgagcctcaacacggcagtcagagtgacctttttatagctccagctggatcatgccattcctctgtgcagatgtctgcagagtctacacattctggcctcccacccattacctctttgatctcttctcttaccatcctgcctgtctaggctctggccgcccagcctcctgcctcagggcctttgcacttgttctctccgcctggccaactcccccatgtcccccaccaggtccacgtggtttactccctcactaatttttctttgctaaaatgtcatcttctcagtgaggcttactcagaccactctaaaattgtaaaccgcccacccccatcctcctctcctgctttatttctccccacagtacatcgctttctaatatactgtatgataattacattcattttgcctattgtctgccattccttttcccaagagtgtgcgtgccaatgaggacagggacttttgtttgttttgttctccgcagtacctccagtatccaaaacaaggcctggcatacagaaggcgctctataaatatctgctaaatgaaca

SEQ ID NO: 900 - DNA, 4001 bp, Homo sapiens
gttatttaacctctctgtacctcaaccacagaatgggaaaacaaatcgatgggaagcatgtaaggtacttagcacaatgcctggcatacagtaagcacccaagaaatcctagctgcttttttttttttttttttttaaggagaagtctagctttgtcacccaggctggagtgcagtggcacgatcttggttcactgcaacctccgtcaccggaggcagggcggttcaagcgattttcctgccttagcctccccagcagctgggattacaggcatccgctgcccccatgcccagcaaatttttgtatttttagtagagacggggtttcaccatgttggcaaggctggtcttgaactcttcaagtgacctgcccgccctggcctccgaaagtgttgggattacaggcgtgagccactgggcccggccagaaatgttagtttctatcattaaaccattagcttcacgaatgaagtccttcttgctagcttcttgaactgctgttaaaaccaactaaccagctgggcgcggtggttcatgcctgtaatcccagcactttgggaggccgaggtggtggatcacctgaggtcagcagttcaagacaagcctggataacatagtgaaaccctgtttctactaaaaaatacataaaattagccgggtgtggtggcacgcgcctgtaatcccagccactcaggaggctgaggtggaagaatcgcttgaaccaggaggagaaggttgcagtgggccgagatcgcgccattgcactccagcttgggcaacaactaaccatcaaccacagaaaaatgccaaggaaaaactcagacagcttttcatgatcttccaatcataatgatgaaaaattaaagggatatgatgcataatttaaaatacgctgtctgggcgtggtgcttcacacctgtaatcccaacacttcgtaaggcttaagcaggaggatcgcttgagcccaggagttcgagaccagccagggcaacatagtgagaccactgtctctacaaaaggtttaaaaattagccaggcgtggtggtgtgcgcctgtggtcccagctaccccggaggctgaggcaggacgatggcctgagcccaagaggtggaggctgcagggaaccgtgtttgtgccactgtactccagcctgggcaaccaagcaagaccccatcttttataagtaaaagattttttacttttatataaaaaagtaaaaagataaaataaaaaatatgcccatttgacaccagttttccctcatctgctgcctttcatgagccatgggcctgttgtgggtgcagggggagtgggcaaggacacttctttccagaagttctcacttctggctaagcattcaaggttgggtgagctgattttcagagatccagagaggtttgcccctggaaaaccgttcactagatccgggtacgggaaacgctatgtgaaacccgagggccaatcaatgccaaagattaagcaggtcccgggggaaatctcggagttccccctctcctggaactcagttccgggaagcccagggaaaggacagctcggccgctcggggcgaccctggagggagcctggccgcctcctgagcagttccaaagccgccagccccaggctccgtggggctggcagcgcaggctccggggctcggcgcggcctcgggcccggcggcagcgcgggttggaggcgccggggccggggcggcggcggggccggcggggggcgcttacttcctctcgcgcggcggcgcaggccgctcctccgggacacggccggggcggcgctgagggccgggcccgctcccgagggctcccctgcgccctgggccgcacctcctcttccgcagggcccgtcactccgacaagtgcgcgtgtcacgcggccacgcgccgcacgacactccgataccgcccgcggagcccgcggcggccgcaggggaaggcgcgaggccaaggccagcccggccgccaccccgccccaggcctcaggcctcaggcctccaccgccttgcgctcagcaagactggggcccgggccgggggcgcgcgcggcgggggcgcgcgcggcgggggcgggggcggggcgggggcgccggcgaggccacgccctccgctggcggccgccggggcggggcctcggagcttccggggcgaggcggtgggtcagctccgagcctccgcccccgcccttcccttcggccccctggtggccgtgcgtcctagagctgtcctgccgcgtccgagacgcgcgcgggacccagaagtggccgagggacgtggttgtgtcgtggaggggacccggggtgctggctgctccctacgatctggcacccgctctgggactcctcaggcctcgcttttccccatctgtagaatgagcggctcggtctttcccgtcttcaatatccagagtagggatttagaagtcggagcgcacacgctggccacgcctccgcgcacagcttcagatctctgccaccccttatcacttgtgtgaccctgagttcagtttcttcatctgtacagtggggacaatgggagtacctgcctccggggttgtctggcacttgggtgcttagtaagcggaagcttggacccgtgtggcaaatagaagacttttgctaagacattgctaagaaagacagcaaatggaatcagggcttctctgtagggtgagaggtatttaagtgagaaaacgggatcagctgcctctcagagcactcagtccccttcctgtcccccaccattatcaggcagtaggtggccctcaccatgctccccaacctgctccccactttttcttttttctttcttttcttttctttttttcttttttttttttttttttttttttgagacagggtctcgctctgtcacccatgctggagtgcagtggcgctatcacagctcactgcagcctccgcctcccaggctcaagtgatcctcccgcctcagcctcccaagtaactgggatcacagatgttcgccaccactcctgactaatttttcaactttttgtagagacggggtctcactttgttgcccaggctggtctcgaactcctgggcccaagtgattctcccacgttggcctcccaaagtgctgggaggagattctgacctgagagagaaactgtgctgcagctttttatttcccgatggttccattagaggtgggagcgtctggaactagcagtggcaacttggcagtggccggcaggactgaatggggccaacaggcatgattaccacacaggatgttaggcaaggggttccgggaaggctgggaactgaggggagctgggcctcaccgtcaccaaggccagaggccatccgggcgcccgcagagggctgccaagcctcggcaaggatttaggtcacactgagtgggcctggcagaggggggagccagggagccaggcactctctgggctacctccacagctggaagtgagcaggagggcttagggcaggagcgggccagagcagactcgaatgatgccgggactcttggcctagagcccttcccatgttctgtggccctgagtgtgtcaggcacccacatagctctgaaaaccagggcccaggaaggcacagatagaagtgggcaggtgtccagaggcatgaccgggggttcgtttcccagatctccatgtggccatcagagggtgatctgctaccttgagggcttcttataaatagccccaggtcaggcgtagtggctcatgcctgtaatcacagcactttgggaggccgaggcaggtggatcccctgaggtcagtagttcgagaccagcctggccaacatgatgaaatcccatctctactaataatacaaaaaaaaaaaaaaaagccaagcgtggtggcgtgcctgtagtcctagctactcagatggctgaggcacgagaatcgcttgaatccaggatgcagaggttgcagtgagccaagatcgcgccattgcactccagccagggcaacagggtgaaactgtgtcaaaa

SEQ ID NO: 901 - DNA, 4001 bp, Homo sapiens
gtctacggcaactacccagactgtgtttctgaaggccattgctttccaccgatcaactgtgcccaaggaactaatgactgagggagtcagtggagtagagaagacagactatattataagctttggcacttggcaaacataggctgaaatctcagctctactactggctcaccacggttctgtgcaaaatttatttgttaaaggagaatattaacatccatcccatagggctgccatgaggactaagcagtatggcccctttgaaatttctagaacagtgccttgtatagactagattgttaataaaggcagctccatgttcattattcctcctgttgatgacatgtgtgatttcatctgaggctctggaagtggaaagctgcttcaggatttgagtatttctgtcatagtataatttaaaccctctgtcagatttactcattagtttatccaagaaggtttattgacacacactctcagccagggtggcggaggcatatactgctccccacatgcttaacatttcgctgttgcttaaatacaggcatggctctgtgactagttcttctggccaatggcctgggagtgggaatagcaggtgtgaattctaggccaaggattgaagagctggtatgtgaccctccagctttgtttcctcctctacagcgatcctccatcctcaagaaggcaaagctgtaagagaaaggccacttggattcccaaaacgccatttggaaaagggtagccctggagatcagctgatattgtgtaaggaagaaataaatatttatgtgttatctcactaagttgttaaggtttattctttactataacatagcctgatttaacataatatatcaaagtattatgctaaacactagagatatggggggggacctttatcacatcagtttctgctctcaagaagcttacagtcgaagaagacagactttcatagctcatcatttgatagctgatacgatttagagtacaacaggagtccctttgaggggagagttacctgggaatttggcaatattcccattacctctcaaatgatataccacaagtgatgttccactcaatctattctagacaagctccaattctcatctatctttaaattaggttattactgtctatctcatagggatcttgtgagaattgaaggatcttgtaaaatgcagaatatagtagtagttaagaataaaagtttgcggattttgcttcctgctaatggacgctttattctgttccattgatctgttatctatctttataccagtacctccctgtcttcattagcgttcttggcagttctccgcaggttgatctgtagattcaacttaacacaatcagaggctcttcattagtgggactttgtaacccatttgttccaaataagcttattgctcaaaggaactacattgtttgagacacattaacttctttacttttttaggagcatagccatgtcactgttttcttttgcttgtggccgggaagcagtggtcagaatactaaatatatccctgaaggcaatagcaataccttttaggttttcagaacgctgtcaagtgaaaacattttaacccatttttcctcctatggacacccacgaatattccaccatacaattctaagactcaacttcctagacttaaccttctctgtctgtatcctttttgaaaccaaatcttcctttgcccatgccctctgagttccctaacacctgtctccctaggaccatctttgccaaggtccttgccttgcaaactcatagttggcttccacgatatcttccattcccatcctatctggcacttcatcacccttctcagttccaagcacacagaacacactcaatgacaaaccttattctaatgtcttccagtcctcagggaaagaagtgtttagacgcagccactcaaagcctggctcactgccggaggtgttaggaaacacaccacatcactacccacagttcaggctaaagaagaggctgaagtctcaaagttaatcttttaatgaaaacatccagcttagcagtaaataagcaactaggccagagcaaggttgactttgaaagaattttgctgactttgcaaatttacttcaaaattaagtgaagtttattacaaaattaaacttcaaagtgaagttgtaatttcctacctgaaatcacccattccctacctctaaattcaaacttgatgttgtcctctgctcatcacagattgttagaggtagggagtggatgatttcaggtaggaaattacaaaagtccccgggttggaggaggggctttttgtggtgatggggttggggtgggagaagagcaagcacagcctgggagcccatgggcaggacagcagtggggacccaggccaggacggtccgagctttggggattttggagggtgcatagtgtagagccctccctgcccacagaactgttctggggaagtaattatgtctagattaatatgggagtcagggagaaccagtgaaatttttgagtggaaaattattcaggaatgtagaagaaatgctaggaaaagcaaacttaaaagtacatggaaaaatagaattaatttctccagaagagttctgtaggggtcccagaaaggtcactaatttgtccaggtctgttcgtctccactcctcccccagctcttgccactgctccttagtattgccacagctcacgtgtgtgatgcgcttacgacgtgccagacacactacacgcattacttcatttgatcttcacggaaggtcaatcttttcaagattgtctctttttcagaagagaaaatgagattaacgaacatgcccaaagcctttcagcagtaaagagcagaattgggatttgaacctagcctgtagccaacacacggagcagaggaggccgaaatcctgagctgtaccgatgaccatagcagtggggtttgcctttcctttagaacctgtagttagagagcaaaatgatgaatttaccactgacttgtcataccatctccactcaaggctcattggctatttatttggagggtaatccctacctgctatctagccactagaggacagtattacctcaaaaatgctttcaaaagtagccaaaatctgggttctggaaatttcttttccatagcaattttcacaatctccataatcagcctctaggccatgtcctcggtcagctctcacaacacctggcctgctcacagtcccctgatccagaccctcccttgctgttttccagactccgactctgtctctcccttccagaaggaagcctggtgatgagcacacactggaacatggtgctcaagctccaaactgcagccactcactcactaacatccacatgttacttaaattctctgtgcctcagtttcctcataatacctcccacactgtaatgagaagtaagtgagttaatacttaaaagatgctggcagtagatagaaagaacagtagagcttctcatgagagattctcaagtttgaaataatgaccttcttggagaccttttaaatctgatgattgcactgagttaaagaacatcatctctacaaggtaacacactctaatatcagcctctaatgtttgcacctaagtgaactaatctcaaataggggatatagggccacaggcagagctatttgaggcagcatttttgcagcacctcttgaattccagagaatgggtccatggataagacagaccagctttggacccaccagcaggcttggagaatgtttcaggatgaggttatgaaaagatattggttttattcaggtggtcatagggtacccattgagcaatatgcctgcttattttggatgaagagaaatgtcgggtcattcttgagctgtcatgacctagtctcttagaaagcaaatgtagtttcacagtagaatagaatgccaaaattcttcttaatggaggggattaaaaacatgctaagtcctcctgatcactgtggtcctgtcctaatc

SEQ ID NO: 902 - DNA, 4001 bp, Homo sapiens
tgtctctactaaaaatacgaaattcagctgggcgtggtggcatgcacctgtaattccagctactcgggaggctgaggcaggagaatcgcttgaaaccaggaggtggaggctgcagtgagccaagattgtgccactgcactccagcctaggggatagagcaagaccttgtctcaaaaaaaaaaaaaaaaaaaatgaagacttcttgacttcactgcattcgttttccaaatctggctactctatttcctaattgcatgactatgcataagttaattatcatgcacaagttccttaacctctctctgcctcagtgtcctcatcagtgaaatgtggggaataatagcacacctacctcactgagtagttgtgaggaataaataaattgatatacgcaaaatgcttgaaatagtgtctggaatgtaataagtgctgtctatgtgttagctgttatctccagttcccagcatagtttctggtacatagtaggtgctaaataagtgtgtatggtttaatgaacttacattaaggattcatgggaagatgggatggggaatggggagatggaggaagcaccctgagaagttgccagaaatctaaagaatggagctccatctttctgcaaatgaggaccaaagaccagtttgcagtaggagaaacggaggttatgcatagaaaacttctcagtggttaaaggtgaaagtatctgggatgcgaacatgagcaagagaaccacttctttataggagaacttgataagtaagaatgatcgtgaggactgagattgactgagaccaacaataatgatagctcaaatgaacacgtttaaaattgaatgtgcctgacactgctctaagcactttacatgtatatttttatatttactcctcccagcaatcctgaggcagaaacaattataaatcctactgtacacatgctgaaaccaaggtgcacctattttaggaaatgaggtcacacagctagtaagaggaagggtttgctgggatttgaatacagatctgacagtgaggctcaagcgcttaatcactaatctatatttctgcatttcaaaacagtgcacacacatgctcttcatacctcttacagaaaatgagagtagtcagcagcccattgcctacctgttagaagctggtctcttcacagagacggagggagcagtgcttagcagctttttgtcttgcttgaggaagaggttctggatgaaggtttgccaggctcctgggagttccaagcaccttaaaaccctggaacttgagcccctgttcaacacagttgctccttttgcacctttgaggaaaagcttctgtcctgtgctcaaagaagaagccaaggtgccaagaacgacccccacccccatcagtccactaagccatgttaagagacctgtgtccagccctgtgactatatctgtggaaatcactattccgggaccaggggaagatgctggggttgggatgagggctgggaacccatgaaggggagtggaataaagggagcaacccaggaatgatgacctggaagagtgcagaaagtgaggtgcttcattttttctcgatgcctttgaaccagagaggtgtagattgatcggtggatatgaaggtgttggactgatggggatggggatgaactctaaatgtggctcaaagatccataactgccaagctcgagctgcctccctttccatatgcgcctcatctaagcagcatccccatctcccctctccccacaacagagtactcacctctgccctctggtgcctgagtgcgcattgcctttgcaaacagactttcaggtgggaactatccaggacttccagctgcttcaagaaaccggacctcttctgtacaaccccctgtctgtctgtctgtctgtcctttccttctcagtccccaccccatcggaagcacaatttcccattgtctctgtcttttcccctattgttgaataacagggcccctttctttattctgtgggtaatggcaatgaaatgtcaacagctggggatgtgggatgcaggaccggctggcacataccaccggaaaagggcctgggtggggggcgggctcagaacaggaattgacatccccaagaagaagagaatagggtgaggggcagagaacggatggtgaaaaggttgaaatggaatctctctcaacactccaaattacagggctctaaagagattttgtctgaggccaggggaaaggctgggctccatgagggcagagggagtggctagcattgcaataggagagatggagattagacagcaaggaggatttttctgtccctggggaggaacatgagaatttctgaggacagaaggactttggaaacctctccaaaagagaagttatcttattggttccctaatattctacctcttccctcagcacaaatagataacctttttaaagtactcagaaggggatccttaatcttcctggatggaaattcactttctctcaagtcttttttttttttttttttttttttttgagacggagtctcgcactgtcgctcaggctggagtgcggtggcacgatcttggctcactgcaagctccgactcccgggttcatgccattcttctgcctcagcctcccaagtagctgggactacaggcacccaccaccacacccggctaattttttgtattttaagtagagacggggtttccccgtgttaaccaggatggtctcgatctcctgacctggtgatccgcctgcctcggcctcccaaagtgctgggattacaggcgtgagccaccgtgcccggcctttttaaaattttttttttaagacaaggcctctatctgttgcccaagtaggagtgcagtggcccaatcatagctcactgcagcctcgaacacctgggctcaagagatcttcccccttagcctcgaaattatctaggactacaggcgcgcaccaccacacccgtctaattaacttttttttttttttttttttgagacagagtctggctctgtcacccaggctggagtgcagtggcgcagtctcggctcactgctacctctgctctgcctcccgggttcaagccatcctcctctttcctcagccttcagagcatctgggactacagacgtgcgccaccacgccaagataatttttgtatttttttgtagagatgaggtttcatcatgttgcccaggctggtcttgaactcctgggctcaagcaatccgcccacctcagcctccccaaatgctgggattacaggcgtgagccaccatgctgggcctaattaagtccattttaaaacctttccattgaggtataatttacatacaaaaaagtcatagaaattatgtgtacagctaaatgaatttttacgtgtgtacatatattgtacacaggtaaaaacccaccagatcaagacatagaacatttccaacaatgccgaataggcccaattgtttttgttttctattaatgcagagggaggactccctccacctgcccctgtaaacagccatgtagaaatgttttgagctttaagttccattttagccttattttctctctgctgtagccccatggaagtagctttgcattattaaaaccatataatttcatgttctgtgagttaaaaaaaaaaaaaaaaagaggctgggcactatggctcacacctataatcccaacactttgggaggccgaagtgggcggatcacctgaggtcaggagttcgagaccagcctggccaacatggtgaaactctgtctctactaaaaatacaaaaattagccaggcatggtggtgtgcgcctgtaatcccagctcctcgggaggcttgaggtgggaaaatcgcttgaacccaggaggaggttgcagtgagctgagatcgtgccactgcactccagcctgggcaacagagtgagacaccatctcaaaaaaaaaaaaaaaaagaaccataccctttcagaactggagacctcaggatgctgaacatttactagaggagga

SEQ ID NO: 903 - DNA, 4001 bp, Homo sapiens
caagaattgcaatctttggccaggcatgatggctcacacttgtaattccagcactttgggaggccgaggtgggtggatcacctgaggtcaggagctcaaaagcagcctggccaacacggtgaaacgccatctctactaaaaacacaaaaattagctgggcgtttggcaggcgactgtaatcccagctactcaggaggctgaggcaggagaatcacttgaacctgggaattggaggttgcagtgagctgagattgtgccacggcactacagcctgggcaacagagcaaggctgggtctcaaacaatttttgagatggagtctccacctcctgggttcaaccaattctcctgcctcagcctcctgagtagctggcattacaggcacctgccaccatgcccggctaattttttgtatttttagtagacacggggtttcaccatgttgaccaggctggtctccaactcctgacctctggtgatctgcccacctcggcctcccaaagtgctgggattacaggcgtgagccaccgcacctagccagtctttgcactttattagtggtctctcacaagctctcacttcaggaccagatgggatactcaccctatgaaatggcctctgggagccccagtctggtgctggttggggggattcacttcttgcatcactctccaagacccccccaaagatcctgggctggtgactatctggatacttaagcattgagtcccgaagtgtctgtccctcccgtagtctctcaccaggtgtctctgactcaggacctggaagttctgcagaaaggtggcaggtgtttgctgggatgggaaaggacttgggctctattaatctctctgaaatcatcagtcttctcacacttcccatcccccagctactccctgcaggctctttatttcacccaccaacccaccagaaaccacaggttgccccttagggaaagccacacaccaggaggatgggaaggcaaggtccaggcccccatatcgctgaagatgctattgaaatctcgtactaggtcatcaaagccgaagttatcgtggaaacgtatccctcctcctgggctgaagctgaagccgaagccaaattcctcaggggggtgctgaggactatggaaccttgggttcccacggccccatgagcccccttcttcttcttcttcctcatcatcatcttcatctcgagtcatccctccaaaaaagggatctctgtggctgagagtggaggcagattggccaccaatatttcagcactatttaagccattaaatcaactcatgggtggcaaagtgggacaagagcaaggggtctgggaagctagggagagggtcggaggactggctgccacatcaaaacattaatacaatggctgacagttctttttttttttttttttttttaatcaaagtcagacctcagctcgcagctcccttcatacaccttcccccagtttttcttcagtgtgccccagtccctcctctctctcccaaggtcctgctcacttgctcactgtcttattccccagaccctcacggtcttccccgcccgggtccctgttgcatcaccccaggttggagaaaggcttagtttgctgtttctcctcttaatgaccgccttggttactgtggcggggtgagtgttcaatgttgcgacttctgtcctctctgcaggagttgaaggagtgggacagaggatgtttttccaaaaataagacgtaggggtcaagctcccctcagacgacccccacccttgtccgagccggacctactctcacctccgaggtccaggaaagccgaaaaagccccggaagagatcaaagaggctcattcccgtactgggacgcgaacctttgaacccctccagtggtccattcgcagacgggggaaacctgcgcagccctgtgagaaattgagcgaggcgtcagcccacgctaccggaaagcaagcccgcgatcctgacactgtcgtaaacgacggtaagccggacgtgaaatggaggcgggaccgaaggtcttcctcaaatttgaaaggctttatctttaccccacctttcagagaccagtttccgtgacgggagtgggcgtgacgcactttcagtttcctatgaccgccttcctcctaaatctgttcttctttctgcagaccaactcagtacgaaaagcgatttcgagggtttgactctggatggcacccggataaagccgccagagggcagcccagccgcacaaatggaccggcttgagggcgtccctcaaccaccccacccgcggggctggccagcctcacagcagaagccacctcgctccttactcgggcgttctttttgactgacctgggcgatgtctgctgttagagggatgaacaaaatgcttttccaagctccttctagtattgaatttcccagagaagagatcaagacataagagacgcatggacttaacttcctccacctctctagctactagggagtttgttataactatatagaattcttttttctaagcaggctctgcaaccagcaagacaaaggatttttaagaaagcaagggaagggaagctagttgagtcctgagaaggaacaaattgggggttataaagaaatatccctttggtatctttttttttttttttttttttttttttttgagacagagttttctctcatgtttcccaggctggagtgcagtggcaccatgtcggctcactgcaaccttcgcctcccaggttctctcctgtctcagcctcccgagtagctgggattacagtcatgcgcctccacgcccggctacttttgtattttttgtagaaacggggtttcaccatgttgaccaggctggtctcgaactcctgacctaaggtgatccgcccaacccagcctcccaaagcgcctgtcctcattcctttttaaaagtgttttgttcaaaacctctccgagacctgtctctccctgtaccccatccccaagccagaccttgctctagattctttttcaaagaattgggtatagctatgtcacagagaagcatccaagaagccactactacagtagtccattcctagggggaatgggccccaaggttttgtttttttatttcgtttttggggtacaggtggtgtttggttacatggatgagttctttagtgatttctgcgactttagcgcacccatcacccgagcagtgtacactgtacccaatatgtagtctttcatccctcaccccactccaagatttagttctgccagacgatacatgttgccttcacttctttttagtttatttgcctggacccatctaagtcatacttaaaactctataaagcattttttttctttgaaatggtctcagctccttcttgatcctctccattttccacccaatctcctctatccctctccctttactgcctgaaatcggctgtagatgtagcagtttctggaggaaatgaagatttgtggtggttctttccagtcaccaggttgtgaaagtcttaggggtgaggggaaggaaatcccctcaaggacaagatactactaccacattaaggtcaggagttcttaaagggcgaagatttcattttattccactgccttcaggggcctgctagaggaggcccagttggtacagtaatacttattcaccaagctggtcatcgacgaaattgaggatgtcctagacggagcaagaataggcagaggctgaaggtagaggttttctttttatatatacaagacacattaatccattaaatttgaggacacagtacaaaaaaaaaaaaaaaacaaaaaaaaaaccacttcaactaattcatctgacaatgctgttcatattcatgacgccatttttttgtttgttgttgttgttgttttcctaataataaagaaggagacttagggctgttgggctgatatatgtttgggggtcccacctccccgcctcatccgtacaccaccagggtgaacaggaggaagcaaaggaagtgcagggccc

SEQ ID NO: 904 - DNA, 4001 bp, Homo sapiens
agttctgcatacctttcctcctctggcctccctgtgtccactgggactctggctgagcacaggcagaggcatgggcaggggtgagtgacattgctgtggcagacaccgtggaaagaagaggtcaagagggaactgtgtgaagccctcattcagagaatggcacaggaaaatctcagggactcagttacctatggtggttttaattctaggacacacctaatcccagtgtcaactcaggagctagccccttctgactcggactgcaaaatcaattttcagccctgaaagaaacttcctcaagtccgggcctctgggaagccccttagactgtatgttttcaataaacaaaaaccctcggccattcttcttttctctcctcggctgctgaggaggaatcctgtattgtgagacactaagagaggggagggaaagagggttcgcctagccatgaaagcatcttcacagcctgactcacaggtgggtcacaagcctggcgggtgatgtagtatagagaatggagaagcacaatcagagggataccaggcttctggggatccgtctgcgagtgaactgagggaagagagtgagatccacaggagactagaaaaggcgcactggctgggtgggaacgaggcagcaaagacaggagtgaaaggaacaatgggaggaagagagacatagagggagtgtgtatatatgtggattcaagataatgtctgggtctacaactgtatttcgaggctccagattcacacctcttcctctctgcttctttagttccccaggttaggtgctttgcacacatccctgcctcatccaagagctgtccttcatttcccccaaggacagggctgctgtcttcccctagcgaccttgatgtagaggtacaccctgacggagactgtgaaatggccccacccccaccctctgttccttctctgggagtcacctgggtggtggtcctgcccctgctttgccgcctcagtcactctgagtctcggccccgccccgccgcccccgccttcagcactagggacagcgaccagagctgaggtctggaccccccgcccccttcagcgtccctatttttcctggtagtctgtcatgctgaactaggcaggtgctaaggagcgggtgtggggatgggagatggcggagctcggcttctccctcagactggccccgatacttagaatataatttcctagatctccagcaagcaggactggaggaggcaggggtcccaaactctggtagttcctttggtccggatggggtcccgggttcctgaaagaggaaatccaggtctctggagatcccctgatgtctgcttgccccttctggtgcccccagcctgtccaggcacggaggacctccggcaggggatacccgcccaggaattcccaggctagactggtgcaagtgactctcccgccccaccaagggaccccgggctggaaatgaagtgaccgtggagggtggggcgggccgggtcccggtgtcgctgcccgcgagggtgggattgatgtaccctgccctccccgccaagcccccaataccggaagtcgctgtaggggtggatgatccaggcccccgctgacttcacccgctcctgctcgatttccactgctttgtggctgccgaacacccgaagggagaacttgttgaccgtaggctggagcagcgtcccaaggtgcctcctcttaggctcaggcccagatttggggatcggacctgaggccgcggtcgcaggcgggggagcaacgggaggcaccgcctccagtccaggggtcgccccttcgctggcccccgccgccggccgctgctctgcctccatggcgcccaccccgcttacacgctcggcctcctagagccctctgtggccatcaggtacccgcaacccctccagagcaggagtcggcgcagccccgcgggctctagcggaggcgtcgtaggctcggaatcgccggcgcgcggggcggagggggtgtgtgctagactggcgggcggcgggcgggctgcgcggcgccccctggcgagggccgcgccaagaccgggcggggctgggacgccgggatcctggaggaactccgagaggggcgtggcttagcaaagaaggcggggagcgcagcctgagccagggagagggcgtggcctagcgttggcctttcatccactgagaaccagggaggaggagccccctgcagtggcgggaaaatcggacgcgggtttgtagcttgaaggacttgggagggagagggattggggaccaatggaagaagtggaaatggcttttgggattcttctccactctcgcccagggacttctgtcctgctcccgtcttctctcaacactgtcctaggcatattcttgtcttttggtctcctccgaactgcttcccctagtatttaatttcctaattcattctgtcagccttcaccaagtgcaactctgcctgtcattgagtggatgctgaggaaacaaaaatgaatacaaaagtcctagtcttagcatctccatgtagtaatggaaaacaacacaaaacaaaacaaaaacaaaggcctagccataaagccactgctcatctgtgcccaacgacagacaggtaaattgcagtgctatgcgaagtgctacaaattcctaaatatctcaaattctccccttcatctccaattcttattaccactgcctcatttcaagccctcagcattttttcacttaaattacttcggaaacctctaaaagagtcttcaacctcttccaggccaattcttcttccattccctgccagttaccttcctaaaatccaactatggctgtgtcacttgcttgaagcccatcaagctttcccatcttctacaggggtacatttaagctgcttagcatggtgtaccaggcccaaaaaatttggacctagtttcaacagtctctcttctgacagtccctctcttgaaagccacagccccaatcatgctgaaagactttgtgctgccttgtctctatgcttttgcaaatattttctctgcctggtattctcctccaattcactttcgaacagttggttcagatcttgctttctctaggaaacctaggaacacatttccaactctcctttcctcaggtagggtctattctagagcttttttacagcagccagggcaccactgttttgagcaactcatgtcacagggctaccattattattattattttagagatgaggtcacactatgttgcccaggctggttttgaactcagagctcaagtgatcttcctgccttggcttcccaaagtgctaggattacaggcatgagcatggtctcattatttatttacagattttctctcctgttagattgtgaaactctgagaaacaggaaccttgcacctggcataattctggacacatagtggacattcagtaaatgcttgttgaatgaattaataatctaggaaaatgttccaggaggtggaagtgaaatctttacttctctctccccgactccttcattgattgctctccatgttctattccagggaacttctctaaactatgtctggttatctgatctaacctccatctgaccatccttcatccagctcctctctaatatttcctgactttatttatttactcattctagagtcagggtcttgctctgttgctcaagctggagtgcagtggtgtgatcatgacccactgcagcctcaaagcaatcttcccacctcagtttcctgagtagctgggactacaggtgtgagccaccttgctcagctccctgactttaatatcgttattctcagattatattatttctctttcaattgacctttctgaccacttctcaattccttctgtaaagtctctaactctttctctttctcattttctttttttcttttcttttcttttttttttttttttttttttgagatagagtctcactctgtcgcccaagctggagtgcagtggcacgatcacgggtcactacagcctcaa

SEQ ID NO: 905 - DNA, 4001 bp, Homo sapiens
gggatgaccttgcagagggcatggccgaacagccaggactcagtgatgtccaccagcaggctggccggcaggcagatagcagtcaccagaacgtcagccagggacaggttgacaatgaagtagttggtgactgtcctcatgtggtggttccgccacacggccaggcagactgcagggtgcagcgaggtgaagctggtggcagagccacacccatcctagttctgcctaatcagcgagccctcctcccacacaacccccttcaatccccagggaaagccggcagcactgccgggcaagccctggacctacccagcgtgttgcccaccagggccacgacgaacacagccacataggctgcgatgaggacccactcatactgttttgggtacagataatcgcgccacagatagcggagaaactcatcttcatagtctggaggcacaggggacggctctctgctgccaggggggacccccatctgggcccctggggtggctgagggctccatgagctcaggagccgctgcagcagaggggcatcctaggctctacagagggagaggagggagcttgggccagccctcagcccactcccttcagggtgcctggaggcttgcacccaggtcttttcgggtctcagcctcaaacttcctgaagggaggaaggaaaggagggagtgggaaaagagagaaggaaggaaacattagggattgtgccaggcgctttgcgtataagttccctcttaattctcacagtcatgaaattggtggaggaagacagacctgggttgcatcccaattccacaccagttgccttgggtagcttacctggcctctttcagccttggtttccccatctgtctaatggggtgacagccctacataccttacaggaccacgatgaggagtaatgagctccgatgcgtgccaagtgcttcaccaagaacctggtacgagaaggtagtttcggggacgtttccggttaccattattagggtaccctgctttgcagatgagaccgaagctcagagagattgagtctcttgctcaaggtcacaaagctcttaagccaggtctgttcgaacccaccaaacaccgtagatttgggaggagaagccatcccgattgcaaatatttcttgagccagttcagaggctttaactttgggttgggaaaacgggccaagggaggtgttagagacccaagccccacccgccatacctgccagaccctccggtgggcactcgcggacacgcacacatacaacacacacacagtgggggtggtgcgcggagggactgacgaccccttgcgagcaaggggagcatccaggccccctaagaggcccctttgggtccccagggccgcgacgctccccgacggccgccaggagccgctgttccggcgcgcgggtcgctctccattcataaatccagccagcccagctccccgcccctcccctcctcccgcactcagcccctccttcccccggctgggctaggacgaccccggccaggtgccggagggttgcggatccctggagacccctggggaaggggaggggacgccttcataccccactgaacgccggcaggcccgctccgtccgcgggaccttcctgcacctcgggggctggcggggctccgggaaggcgcgggggagcgagggcactcggagcctgcctagaggagagcagcgctggccgaggagccagtctcccagcacccaggttaccccccgagactcttggctcctcccatccctcgccgcgggtcctttggaacccccatcccaggcctgggggtcccccacaccccgcacctgttggctccgggacccgggcgttctcggctgctggtccccggacctggcaccggggacttcgccttcctgcgaggaaggccgagcctctaggggccgggactgcaggagggggccggggcagccccctccctaggctgcgctgcctcggctcgcggggctcagcacgatccgcggcaactgcgcgggctgtggctcggcgcgggctccgccgggctgcgcgctgcggggagggagggccggcgggaggggcagggcggggtgggagcccccagacggtcttggctccctgtcttccagccccgagacccgcagggcggagggagacgctcgttccttctagcctcccacttcaagcttccatcccacctccattcatgcgtccatccgttcattcattccatcctcattcattcaacatttatgcccctggccaccccgcattctgggcgcacttagtgtgtgccggcgggcctggcagcttcagagggccacagtgcagaggtggagcccagccccgcctctccttgctgcctcacctaactgaggaggaggatggcacaggtgggtcacaggggtgagacagagaggatgcctgcaccgcctccagcctagctccggatgctgctgtaacagctagctcccaacgatgccagagaagcctgttctcccatctcccagccccccatcctatctgcccccagtttctctttttgttatacctactgttccccccaaaaatcaaggacgccggtggggacagaagtgggggttcgttaattccacaaataacgatttattaagctgtgtgctaggcagtgagttctaataatacagctaccgtttggataatgcatatgatgcctgctctcatttaatcttcatatcaacctggtgaggtggtcgttattgtccccattttacagataaggacactggatccacatggcgcaatgacttgcccaaggtcgcacagcagaggcagagctgggctttgagcctctgcccctctcaggcctctagcctctctcaccagacacagtctccctcccctgcaaaatctctctggctggtgggggaggcaggtgcacacccaggcaattaacctgtggtgtgaggagggtgtgagggccctgggggctgtggggcacaggaggacagaccgactcagccagggcatgagaacaggcttcctggagcagggacatctccatggagacctgaagaataagaaggtagcctgcaagggggattgtggtattcgaggagaggcattcaaggtcaggaaacagcaggtgcaaaggtttgaaggttggggattctggaaatcacaggtaggtgaagggtgactgcctgagcatcatgcagtcaccttggccatcccctagctcagcataggacattcctaacatgtcaccctctgaaactcacactgtttccctcctgggaggtgactcctgggatgcaaccaccatctttcccattgcagccaaagcccttttcaaaggctctgaagatgcgccgttaggcataggaggtgtgggagaggaactggagcagcataagggagggggccagtgaccttaacctctgcagaacaggaggatggactgaagctaaacccaaggcagaactttgtccttgggcaggtatggcatctgcatggtgtgtgatgtcttgtcttccctaggtgctggccgaggtaggagaatgagtgaagggactcagaagaggggctgctgtgtgtgtgtgtgtgtgtgtgcgtgtgtgcatgtgtgaatgtgtgggtgtgtgcatgtctgcatatgtgtgcatgagtgtgtgtttgtgtttgagtcttgaattcaagtaagggctgtggtgtgtgtctagggaatccagtgtgtttgagtctgactgtgcatatgagcagggggtgggctctgggttgatgactggaggtcactctgggtgggatgtgtctgtctgggtcttgatctgtccctgtgttttggcgtttgtgtctatggggaatgtgtatgtgtgaggagatgactgtttctcagtgtggatctgaatgttcaactgtggctttgactagcactggcctcccagcgtgtttccctgtgagtgtgggaatgtgagtgtggccatgcctttgtgtgtaaggttctgtgagtgtgcatatgtggaacttggtaca

SEQ ID NO: 906 - DNA, 4001 bp, Homo sapiens
ttacccctacaatctgaatttttttgttttttttttttttgagacgaagtctcgctctgttgcccaggacggagtgcagtggtgagatctcagcccactgcaacctctgcctcccaggttcaaacaactctcgcacctcagcctcctgagtagctgggactacaggcatgtgccaccacacctcgctaatttttttttttttttttgagatggagtctcaccctgttgcccaggctggagtgcagcggtgcaatcttggctcactgcaacctctgcctcctgggttcaagcgactctcctgcctcagcctcctgagtagctgggattacaggtgcgcaccaccacacccgggtaatttttgtatttttagtagagacagggtttcaccatgttggtcaggctggtcttgaactcctgacctcatgatccgcccgcctcagcctcccaaagtgccgggattacaggcgtgagccaccgtgcccagcctaaattttgtatttttagtagagatggggtttcaccgtgttggccaggctggtcctgaactcctggccccgagtgatctgcctgcctcagcctcccaaagtactgggattagagaggtgtgagccactgcacctggcccccattactttaatttctaaggtataaacctgatgatgtcaataacctgcataaaacttgaatcactcacaagtgccctcaataaagtccaacttccttgggacagcatgcccagcccttcatggtccggtccctatttacatctttttttttttttttttttaagacagagcctcgctctgttgtccaagctggagtgcagtggcacgatctcagctcactgcaacctctgcctcccgggttctaagggattctcctgccttaggctccagagtagctgggattacaggcgcacaccaccatgcgcggctaattttgtatttttagtagagacggggtttcaccatgttggccaggctggtctcgaactcctgacctcaggtgatccaccagcctcggcctcccaaagtgctgggattacaggcgtgagccaccacgcccggccaaatgcctgtttttcaaaggtcctgtcctctctcttgcctctgaaacttgctgttatctttgccttccctgtgcctggctaagaactcctgttcttcaggtcctaactaagatgtcccctccttcgctgactcctcaggtggagttcggtgcctcttctctgtgctcccctaacactctgagctctgacacggagagaacttcggtcactgggaagggtgacccgatcaaccccacggccccagcccctcaacacttcctcgaacacagtaacctgcttgagagattaagtgagaagtctgttttaacaggttgcatccttctccttgcaacccctggcgccccacgtcgcagtagcaaccgcaggccccgctcagaggctgggggaggggaggcgggcaaccagtcgtgcaggactcttcccccagaaaagatgaggaagggacggggcagggaagagctttgggttctcggcaagaaaatgtatccttgcagccgtctccatcagattcagcctccccgctccgacgcaccctcccctctaggagtcccactcaaactctccacatcagacttcctcagaatcttcccatcaagattacctcacgcttcccccacgcgatcccctcttggtctcagcctcgatctcccttcctcgcagcctcctccctcagcctcgacttccccctcgcagcctcctctccgagcctctccccagcgcctcagcctcccgcagcctcccatcggcgctccagcctcagcctccaggttcccggtccggcccggcctggccccgcccccgccgcgaggacggtgctcaccgtcgtagtagtaacagactttcctccgggtgccctgcgtctgcgccatcttgctcgcctcccgtccctaccgtcagtcggtccgtccgccctcccgcccgcggctccgctcagcgtccgacccaggggggagggggcgggcctccggcccgccccgcccgtcccctcctgggctcacctatagccgcgcagcccgggcaccgctccagccaatcagcttgcgcagacacgggcccggaactcggcagggggcaagggcagcccggagaggccgccgagggccccctgggcctgtaccaaggtctgcgacagatgggtggggagccgcccggggaccgtaccatcagtcccgggggaggaaagcagctctgtaaacttaacagtcccacttcgtcgtgaaaagcgtgcttggagatcggaggccaactttctgattttacggagaataaaccgaggcctacaggggaaaagtgacttgcacaaggtcactcagccaataaaagggctgaacctgggttagaaagcgagtttgtggccgcaaaggagggctacagaaaaataattaaaaagaaaagcaacacgcgggtttggagaggaagaaaccgacaagaaagggaaagaaagctaatgtttgtcgaggggctgctgtgtgccaagtactgtgcgacactttaccaatgttatttcagtttttcctcaaaacagctctcggccaagggctttttacctccattttacaggacaggataaagaagttcagacttctgtgaattattcaaagttacacaaagtaattaaattcaattttttaattgtacagggtttttaaaatgctttctttgcaccagaggcactgtaacaaagtgacagaacccagcctttcagactccaaaatctacctccctgatgcagtcacccaggatgactaagtaggcgtctctttagacaggaggaaatgggattatcctatgataggagggcaggtttcctttcttttctttccctgtttttttttttttttttttttttgagacaagagtttcgctctagttgcccaggctggagtgcaatggtgtgatctcggctcaccacaatctctgcctctgtgttcaagcggttctcctgcctcagcctcccgagtagctgggattacaagcatgtgccaccatgcccggctaattttgtatttttggtagagactgggtttctccgtgttggtccaggtggtctcgaactcctgacctcaggatccgcccacctcggcctcccaatatgctgagattacgggcgtgagccacagcgcccggcctaggagggcaggtttctcagcctggtagctaatgacattttgggccaggtaatgcttttttgtaggaagctattctgtgcattaacagcttctgtgaagctgttctgtgcctgggcaactagagtgaaactcttgtctcaaaaaaaaaaaaaattaagcagcatccttagcctctacccactagatgccagtagcaccttccccccaggctgtgacaaccaaaattgtctctagacattgccaagtactgtgcaatagctttaccattgggttggggggaagattagtggggtgtaagggagtgtaaaattgcccccaactctaccattaagaaccactccaccagatcatcaattatcaactgatcatcactgaaagctgaaagacctaaaagtgcaatgctgggctattaaaataactacaataatgtcaatatttaatgagtgcttcctgtgtgccaaacattgctctaagttagccgccaacttgtggtcctacagtcaacaagaggctgggcacagtggctcacgcctgtaatcccagcactttgggaggccaagatgggtggatcacttgagctcaggagttcgagaccagcctgggcaacatggcaaaaccccatctctacaaaaaatagaaaaattacccaggtgtgggggcgcgctcctgtagttccagctactcaggaggctgaggtgggatgatggcttgagcccaggagacagatgttgcagtgagccaagatcatgtcaccacactccagcctgggcaatagagccaggccttgtctcaaacaaaagaaa

SEQ ID NO: 907 - DNA, 4001 bp, Homo sapiens
cctcccacctggccaggtgctggggttgtggggggggctcatactggctggctgaattaaccacatggcagagactgggccgttctggcggaagatcttcacatctgagcgggggaaggaacttgggctcccctaacccctactaagaggcagtctgtactggacttcctaataccacaagggaatctgccacctcaatcctaaatttgagttggcagcatatggaggaatatttctgtggagctgagggctgatgggttctgacggataatttccaagccaggtagatccccttacgccgcccccaacgatccttcgacctttccaactttagacctcttacagatgccccaaaccaaagtttcctagaagcgaactccgcctccatctagccctctccgggttgggatccttcttaaccatttatccacgaagagaagagtttgaattaggggcgacaatccacgaacaaactaggggtctctaagggggtcttaaagggggtggcggcggcgcctggggtcgggggaaggaataacacgactggcccaaagccagacttcgcgctcgaaacctctgggagtatgggggctgggggcggaactgagcacgcggagctgggggccgggaagtgaccggcgccctcggatccccacgccgtgaacacgccactacgcgcggacgccgtgcccgccaggtgtctacccccacccccgcccgcctccaccattatataaccggcgggtgggcttggaagcgacagagaaagagccggagacctacaagccccctgcccccacctctgcccgctccgcgcggagcgctcgtgcccttcccggtgttatgcaacccaagcccgcagggggttagggggcggcgggccgcgctgctcacccgggccggccagtgtgggtagcccttcatcttggcgaacaccaggtccccgcatttgtactccttctgccggttggatcgcgacatggcggggctccgggcgccccgggctccgcgccgggccgggaagcgcgagcccaagtttgcgcgtgcggcggtggcggcgccgctccgctccggccctcgcgcggcccccgcctcgatggtggcccccggcccgagctccggcgcggccacggcgtctccgcccgcgcgccgcacggacggggcgggcgcggatcggggcaaggctccggcgcggtgggtgcgcgctcgtgcagttgtttgtgtttgaaattcaattgctccctcctctgcgcgaggcctcttcctccaccccccgcccggtccccactcctcctcctccctcctcccggacccactcctcctcctccccccgccccccaacctcgcgctccctcccgcggcggtttgatgcgtgcagcttcttgacgcccagggcctgccacggcccaacgcccaacccggagccgcctgacggcgcgtggcggcacaggcataaggagccgatcgccgagcacgccgagcaggctttgtgtgcccgcggtcggtgggtgcccgcccgcccgggaggagctggcgcccggctggacggagcggcccccgcccttcccccgactccgcggagcgctcaccaccgcggccccagcgcagttaagtgtggacgtctgtacacggtttccgcctgccctctgctccatctcaatccacaaatatttactgggcacccgcggttcttggcagcgtgctaggcgccgagggcgagaggagtgggcgccgtgccgctccgcgcactggggtcctctctggacctcgccgtgcttaccgtatggggggtggccctggaaacgtcggggatttgagccctacgtccgcctttgctaaggaggaaacgcttgagtttggtagccaggagatggccaaggagttgaggcacaaattggccaccttccgggtgcattcgatctcgtttctctaagctactgtcttgccaaggagacttggactcaacggctagctaaccccgcaaagatgagctcagttctagtcggttacggtagaatgccaataaacccaaccccttcagtaaactgtgaagaccgaggggccaggtgctacctcttttcggaggtggggaggggggtctgggaaggcttcacaaaggtgatgactgaactgggcattaaagaatgagtagaattttgccaaattctgcgagactacattttggcctaggttatatgctaagaagtgatagaaccaaaacttgaactcaggtctcttccattaagctaaataagactttattgtaattacatctttgatttgctgtcactgtatttgcccacattccagacacctatgttcccttagaaataagatatttggatcttatgttacggcatatacacgtccttaaaatttagcaacaaaatatgctaggtttgaataggtaaaacatatgcatgtttttcttcccacgtttcctgatcctatttcaaagcatatgcaaagtctccctgcaaggaagtccaggatgtagccaaaagttccaaacccacatcctaccctgctgttcatctgtcctgagaacttggacaacctcctgaactctaagcctcagtttcctctgctgtaagatgggataacatgactgccctggtaactaacaacagaggcatagaatggctgcttgtcactaggggatgcctgcagttgttcccagagtcctgcatgacacttggctgtccttatgtccatggcaatatgtttcactatttttgcctttataacagtgtggcctctcaaccatagttccccttgtgataagaggcacaccaggctgctggcacaggggggcattctggaaggtcctgttgcaagaaaacagccaagcaggccctcagccacaagcttgtcaatttgtttccatagcaaattcaaacttgttgcaacagagcaactaggttctagttggtgtttactctacaatgcattccattttgaaatgcagtcagtgtaatagtccagattctatcaggctaaatctttttgttaggagagagtcttgtcacaagttcttgaagatgtttcaagaataagtctccagcatcagaacaggtttcctttaactatctaggtcatattttattctatctatctatctgagacagaatctcgctctgttgcccaggctggagtgcagtggccaatctcggctcactgcaacctctgcctcccgggttcaagcgattctcctgcctcagcctcctgagtagctgggattacaggtgtgtgccaccacgcccggctaatttttgtatttttagtagagacggggtttcaccatgttggtcagcctggtttcgaactcctgatgtcgtaatctgcccactttgggccctccaaagtgctggggttacaggcgtgagccaccgtgtccggcctaggtcgttattataaacatgcacagtttcagtgcaacaaacatggttttttgtttgtttgtttaattgttgttttgttttttggagacggagtctcgctctgttccccgggctacagtgcaatggtgcaatctcggctcactgcaacctccgcctcccaggatcaagcgattctcctgccccagcctcctgagtagctgggattacaggcacgcgtcaccacgccaggctaatttttgtatttttagtagagacggggtttcaccatgttagtcaggctggtctcgaactcctgaccttgtcatccacctgccttggcctcccaaagtgctgggattataggcgtgagcaaccgcgcccggccaacaaacacgcttttaaactattttccaatttggtacactcaatttagtaaaaagcaagagcccttcccatttctccactttgttgcatcataatagccagcgtggaagtggaaatgggcttctaaattcttgttgcaacaaaatctcttgggcctctcattcagtctaccatgcagatgctggttgcaataatacaaccagggttccttttgttgcagtaatctcctaggcgttg

SEQ ID NO: 908 - DNA, 4001 bp, Homo sapiens
ggatgcagaaggggttccctgcaacccacattccagctaacacccactccccaagggcttagtccagcctctggactttgtcccaccctcaggaggtaggaacagtagagacctgggttcagttcttgtcctacccaccagggccttggcatctgggccaagaagccagctgggtcaaagggtgcagggtaaagtacaggagagttgtaacgcagagagtcccgcttctctttgtacttcactcccaatagcggaagccggtcctcatttgatccatctgaaagtttcacggaaccaggagctcaaggcatgtgggattaggcacactcctgaggagtgggtacagagcgaggaagggtctctgagttttctgagtggccccaaagttggcctgataccctgaataagcctgggccagacagacacagacttacactgagaagagcaccccaaagatatgcagtccttctgcccttggattttactctacaggagtcctacactctaggatactgagtcatgccctcgcccaaaaccaaaggcccctctacaccaactttaagttgccaaatgcactgcccccgcatcccccctcctttcctccagcaactggcaacctcccatcctccttacttaacctgtctcagtccttaggggaaacatgatgagcacaccaggcttggctgcagggccccaccctcccacctggccaggtgctggggttgtggggggggctcatactggctggctgaattaaccacatggcagagactgggccgttctggcggaagatcttcacatctgagcgggggaaggaacttgggctcccctaacccctactaagaggcagtctgtactggacttcctaataccacaagggaatctgccacctcaatcctaaatttgagttggcagcatatggaggaatatttctgtggagctgagggctgatgggttctgacggataatttccaagccaggtagatccccttacgccgcccccaacgatccttcgacctttccaactttagacctcttacagatgccccaaaccaaagtttcctagaagcgaactccgcctccatctagccctctccgggttgggatccttcttaaccatttatccacgaagagaagagtttgaattaggggcgacaatccacgaacaaactaggggtctctaagggggtcttaaagggggtggcggcggcgcctggggtcgggggaaggaataacacgactggcccaaagccagacttcgcgctcgaaacctctgggagtatgggggctgggggcggaactgagcacgcggagctgggggccgggaagtgaccggcgccctcggatccccacgccgtgaacacgccactacgcgcggacgccgtgcccgccaggtgtctacccccacccccgcccgcctccaccattatataaccggcgggtgggcttggaagcgacagagaaagagccggagacctacaagccccctgcccccacctctgcccgctccgcgcggagcgctcgtgcccttcccggtgttatgcaacccaagcccgcagggggttagggggcggcgggccgcgctgctcacccgggccggccagtgtgggtagcccttcatcttggcgaacaccaggtccccgcatttgtactccttctgccggttggatcgcgacatggcggggctccgggcgccccgggctccgcgccgggccgggaagcgcgagcccaagtttgcgcgtgcggcggtggcggcgccgctccgctccggccctcgcgcggcccccgcctcgatggtggcccccggcccgagctccggcgcggccacggcgtctccgcccgcgcgccgcacggacggggcgggcgcggatcggggcaaggctccggcgcggtgggtgcgcgctcgtgcagttgtttgtgtttgaaattcaattgctccctcctctgcgcgaggcctcttcctccaccccccgcccggtccccactcctcctcctccctcctcccggacccactcctcctcctccccccgccccccaacctcgcgctccctcccgcggcggtttgatgcgtgcagcttcttgacgcccagggcctgccacggcccaacgcccaacccggagccgcctgacggcgcgtggcggcacaggcataaggagccgatcgccgagcacgccgagcaggctttgtgtgcccgcggtcggtgggtgcccgcccgcccgggaggagctggcgcccggctggacggagcggcccccgcccttcccccgactccgcggagcgctcaccaccgcggccccagcgcagttaagtgtggacgtctgtacacggtttccgcctgccctctgctccatctcaatccacaaatatttactgggcacccgcggttcttggcagcgtgctaggcgccgagggcgagaggagtgggcgccgtgccgctccgcgcactggggtcctctctggacctcgccgtgcttaccgtatggggggtggccctggaaacgtcggggatttgagccctacgtccgcctttgctaaggaggaaacgcttgagtttggtagccaggagatggccaaggagttgaggcacaaattggccaccttccgggtgcattcgatctcgtttctctaagctactgtcttgccaaggagacttggactcaacggctagctaaccccgcaaagatgagctcagttctagtcggttacggtagaatgccaataaacccaaccccttcagtaaactgtgaagaccgaggggccaggtgctacctcttttcggaggtggggaggggggtctgggaaggcttcacaaaggtgatgactgaactgggcattaaagaatgagtagaattttgccaaattctgcgagactacattttggcctaggttatatgctaagaagtgatagaaccaaaacttgaactcaggtctcttccattaagctaaataagactttattgtaattacatctttgatttgctgtcactgtatttgcccacattccagacacctatgttcccttagaaataagatatttggatcttatgttacggcatatacacgtccttaaaatttagcaacaaaatatgctaggtttgaataggtaaaacatatgcatgtttttcttcccacgtttcctgatcctatttcaaagcatatgcaaagtctccctgcaaggaagtccaggatgtagccaaaagttccaaacccacatcctaccctgctgttcatctgtcctgagaacttggacaacctcctgaactctaagcctcagtttcctctgctgtaagatgggataacatgactgccctggtaactaacaacagaggcatagaatggctgcttgtcactaggggatgcctgcagttgttcccagagtcctgcatgacacttggctgtccttatgtccatggcaatatgtttcactatttttgcctttataacagtgtggcctctcaaccatagttccccttgtgataagaggcacaccaggctgctggcacaggggggcattctggaaggtcctgttgcaagaaaacagccaagcaggccctcagccacaagcttgtcaatttgtttccatagcaaattcaaacttgttgcaacagagcaactaggttctagttggtgtttactctacaatgcattccattttgaaatgcagtcagtgtaatagtccagattctatcaggctaaatctttttgttaggagagagtcttgtcacaagttcttgaagatgtttcaagaataagtctccagcatcagaacaggtttcctttaactatctaggtcatattttattctatctatctatctgagacagaatctcgctctgttgcccaggctggagtgcagtggccaatctcggctcactgcaacctctgcctcccgggttcaagcgattctcctgcctcagcctcctgagtagctgggattacaggtgtgtgccaccacgcccggctaatttttgtatttttagtagagacggggtttcaccat

SEQ ID NO: 909 - DNA, 4001 bp, Homo sapiens
ttactctacaggagtcctacactctaggatactgagtcatgccctcgcccaaaaccaaaggcccctctacaccaactttaagttgccaaatgcactgcccccgcatcccccctcctttcctccagcaactggcaacctcccatcctccttacttaacctgtctcagtccttaggggaaacatgatgagcacaccaggcttggctgcagggccccaccctcccacctggccaggtgctggggttgtggggggggctcatactggctggctgaattaaccacatggcagagactgggccgttctggcggaagatcttcacatctgagcgggggaaggaacttgggctcccctaacccctactaagaggcagtctgtactggacttcctaataccacaagggaatctgccacctcaatcctaaatttgagttggcagcatatggaggaatatttctgtggagctgagggctgatgggttctgacggataatttccaagccaggtagatccccttacgccgcccccaacgatccttcgacctttccaactttagacctcttacagatgccccaaaccaaagtttcctagaagcgaactccgcctccatctagccctctccgggttgggatccttcttaaccatttatccacgaagagaagagtttgaattaggggcgacaatccacgaacaaactaggggtctctaagggggtcttaaagggggtggcggcggcgcctggggtcgggggaaggaataacacgactggcccaaagccagacttcgcgctcgaaacctctgggagtatgggggctgggggcggaactgagcacgcggagctgggggccgggaagtgaccggcgccctcggatccccacgccgtgaacacgccactacgcgcggacgccgtgcccgccaggtgtctacccccacccccgcccgcctccaccattatataaccggcgggtgggcttggaagcgacagagaaagagccggagacctacaagccccctgcccccacctctgcccgctccgcgcggagcgctcgtgcccttcccggtgttatgcaacccaagcccgcagggggttagggggcggcgggccgcgctgctcacccgggccggccagtgtgggtagcccttcatcttggcgaacaccaggtccccgcatttgtactccttctgccggttggatcgcgacatggcggggctccgggcgccccgggctccgcgccgggccgggaagcgcgagcccaagtttgcgcgtgcggcggtggcggcgccgctccgctccggccctcgcgcggcccccgcctcgatggtggcccccggcccgagctccggcgcggccacggcgtctccgcccgcgcgccgcacggacggggcgggcgcggatcggggcaaggctccggcgcggtgggtgcgcgctcgtgcagttgtttgtgtttgaaattcaattgctccctcctctgcgcgaggcctcttcctccaccccccgcccggtccccactcctcctcctccctcctcccggacccactcctcctcctccccccgccccccaacctcgcgctccctcccgcggcggtttgatgcgtgcagcttcttgacgcccagggcctgccacggcccaacgcccaacccggagccgcctgacggcgcgtggcggcacaggcataaggagccgatcgccgagcacgccgagcaggctttgtgtgcccgcggtcggtgggtgcccgcccgcccgggaggagctggcgcccggctggacggagcggcccccgcccttcccccgactccgcggagcgctcaccaccgcggccccagcgcagttaagtgtggacgtctgtacacggtttccgcctgccctctgctccatctcaatccacaaatatttactgggcacccgcggttcttggcagcgtgctaggcgccgagggcgagaggagtgggcgccgtgccgctccgcgcactggggtcctctctggacctcgccgtgcttaccgtatggggggtggccctggaaacgtcggggatttgagccctacgtccgcctttgctaaggaggaaacgcttgagtttggtagccaggagatggccaaggagttgaggcacaaattggccaccttccgggtgcattcgatctcgtttctctaagctactgtcttgccaaggagacttggactcaacggctagctaaccccgcaaagatgagctcagttctagtcggttacggtagaatgccaataaacccaaccccttcagtaaactgtgaagaccgaggggccaggtgctacctcttttcggaggtggggaggggggtctgggaaggcttcacaaaggtgatgactgaactgggcattaaagaatgagtagaattttgccaaattctgcgagactacattttggcctaggttatatgctaagaagtgatagaaccaaaacttgaactcaggtctcttccattaagctaaataagactttattgtaattacatctttgatttgctgtcactgtatttgcccacattccagacacctatgttcccttagaaataagatatttggatcttatgttacggcatatacacgtccttaaaatttagcaacaaaatatgctaggtttgaataggtaaaacatatgcatgtttttcttcccacgtttcctgatcctatttcaaagcatatgcaaagtctccctgcaaggaagtccaggatgtagccaaaagttccaaacccacatcctaccctgctgttcatctgtcctgagaacttggacaacctcctgaactctaagcctcagtttcctctgctgtaagatgggataacatgactgccctggtaactaacaacagaggcatagaatggctgcttgtcactaggggatgcctgcagttgttcccagagtcctgcatgacacttggctgtccttatgtccatggcaatatgtttcactatttttgcctttataacagtgtggcctctcaaccatagttccccttgtgataagaggcacaccaggctgctggcacaggggggcattctggaaggtcctgttgcaagaaaacagccaagcaggccctcagccacaagcttgtcaatttgtttccatagcaaattcaaacttgttgcaacagagcaactaggttctagttggtgtttactctacaatgcattccattttgaaatgcagtcagtgtaatagtccagattctatcaggctaaatctttttgttaggagagagtcttgtcacaagttcttgaagatgtttcaagaataagtctccagcatcagaacaggtttcctttaactatctaggtcatattttattctatctatctatctgagacagaatctcgctctgttgcccaggctggagtgcagtggccaatctcggctcactgcaacctctgcctcccgggttcaagcgattctcctgcctcagcctcctgagtagctgggattacaggtgtgtgccaccacgcccggctaatttttgtatttttagtagagacggggtttcaccatgttggtcagcctggtttcgaactcctgatgtcgtaatctgcccactttgggccctccaaagtgctggggttacaggcgtgagccaccgtgtccggcctaggtcgttattataaacatgcacagtttcagtgcaacaaacatggttttttgtttgtttgtttaattgttgttttgttttttggagacggagtctcgctctgttccccgggctacagtgcaatggtgcaatctcggctcactgcaacctccgcctcccaggatcaagcgattctcctgccccagcctcctgagtagctgggattacaggcacgcgtcaccacgccaggctaatttttgtatttttagtagagacggggtttcaccatgttagtcaggctggtctcgaactcctgaccttgtcatccacctgccttggcctcccaaagtgctgggattataggcgtgagcaaccgcgcccggccaacaaacacgcttttaaact

SEQ ID NO: 910 - DNA, 4001 bp, Homo sapiens
gttattttgccaagaaagcagcttagtactcactgcctcaagtgtgcaggaacaagctgtaatggcaaagtagcatgggctcttcagaactaacgaggttaggctgggcgaggtggctcacacctgtaatcccagtattttgggaggccgaggcgggtggatcacctgaggtcaggggttaaagaccagcctggctaacacggtgaaactccatctctacaaaaacacaaaactcatccaggcattatggcaggtgcctgtaatcccagctacttgggaggctgaggtgggagaatcacttgaacctgggaggcagaggttgcagtgagccaagatttcaatattgcactccagcctgagtgcccagcaagactctatctcaaaaaaaaactaatgaggttagaccatttactcaaaatcaccagtagttctacttttcactatcaacaaaaaagaatttaaaggcagaagagcatgcttatctcacacaatggacattgtatcaatctcttaatatacctaatttttcagctttaatttgataagttctcaactacttaattttttacaagaccaaagtgattaacccatagttatttctgtaattctattagctacctgtgaatcaaccactccagacacttctgtgctggcttaagcaggaagtaaggcgacaagtgaataaggaataatgaaatgttttcatccaactgtttgtttactgctttggtctgaacacttcgctccaaggtttttgctagctgactgaacaacggtgcttcaaactgctcaaaggaaggatcaattccaagcaactcttccaggccagtacatcctaaatttcaaaaaaggccagtttatttaacaattcttcgtaagcaaattcatcccacccctcttttacagttttacttacccctaagaagtttctgaattctttaagtacatataatttataatacagtcccaaacactgatttctagttttcaacttttagagtaaatcctatctcatctactagaacagaaagtacttcgtggcagggaacacttttttttttttttttttggatatcccctacaataactaggccagtcctctgagaggacttctccgtcaccccagtcactgcctccatcccccttttagctgttcttctctttgacatattagttgacctctctaattttgtttcttcatctgtgaaatccagatacctctactcataaacatttcaagcaccaagcacctgactgttatgttctctttcccttaaaaatatacatcaacatgctagaaactgctaaggaagaggacgggacagaagagaaaacaaggggaaaaaaaaaaaacagtaacatccagaaaacaaacgcttccaagagcttttctaagttaaaagatggctcaccaatggcgaaggcggtgtccctgtcgattgtggccgcttccttagggtcaaataacaaagaagcaacttcatctctagataagaggctggcatcactttgagggagggcgagtcgttgcagctgctgggctaaggacgtcatctttcacgccagcggagttttaatgacacgggctaaaaaaacgtaagcactttgataagtttctacgaaattataaggcgcctcgtaaacaaacaattctcttctgcactcagcaccgtcatggacacacaacgcgggtgtcctgagatttgtggaccccggagatgcaaagacgatggcagcagcgttaacaactaattacagtagcggcgaccgcgccaaggctttccttcaaccctgattccgcagatatccggaaaactcttaccctccctcgatatgccgcccccatccgcagccacatcaagcggctctgtgccgcttacctggaactgggaatttgggtatatcttggaaggcaacaactcttcacagcgcttcccacatggtaccaaggagcccaaccctcacccggaaacctaaggcatgctgtagagcaacttcctgctgcaggcgctacggcaagtgaagaggttcaagcttgccgggaatgcgacgagacagctccgcctcccgagacgaaagcccgcccctcagcccgccggactcaggctcaagtctgagcttcgcctctgtagctccggtttagcggtctgctctgcggcttgtgtctgaagctttcggtctctggatgggccttctgtgggctttaaggatccgtagccagaatcattcattcagtagtgatccagcctttactaggtgccagcagcaccgcgtagtgttgaaagctatgggttgtgaagtcacgtggtttgggttcaaatcctggcgctggcgcctgtcggccgggttaacgccaccaaattatttcatctctccgagcttgttactcactctacaaagtgggaagaggccgagattgtcgtgaaaggagcttctgctcctagtgcaaaccgatctataaatgctggactccaccgccccagagcttgggggagatcttgtcactcctctatgtttccattcccgaggggtaaatggcatatatttttttctttcaaaacgaatcatagtcaggcgcggcctgtaatccgagcactttgggaagctcaggcgagctgatcacctgaggtcaggagttcgggaccagcctggccaacatagcgaaaccccgtctctactaaaaataaaagaattagccggacgtggtggcgggcgcctgtaatcccagctactaggaaagctgagacagaagaatcgctggaacccgggagtcggaggttgcagtgggccaagattgcaccactgcactccacagagcgagactgtctcaataaataaattaatcgaatcctgttgaggtataatttacaaacaatggttacacccacgtcagtggaagagtttgatgacttttagcaaatgcatgtataggtgtaatgacctccccagtcaaaatgacagtttccatcgcccctaaaaattgtctcttgcctgtttgcgaagattcccgcaaccactggtcttggcctcactacagatagtgttgcggaagagtatccttatgtatgaatatagctaatctgtttccaaaacaccggtatgcgctagaactaggatgaactgacgtcttccagacgaaggagtgagatctgatgctctgtcttttctggatgcattaatttctctgaagagctctgcggggccagggggtcaagtctttctgtaaccgtcttccctggagaatgtcagaaacacagctacaaatttggaggccctggttgtctatacctcatgcagattctctcccatttacaaacagaatcttttgttgttggtttgctttaaaagcatttaaaacaaccaaatattttcttcagttattagtatttctactgactgttaataatcttcttttcatgtggtgttgagtgccttgcagagaataacatgaaaattctagtagtacctatttcattcttacaaacatatctctcaaaggaattttttttttctttctaacatgtcacaggagttttacctttacagaagcaatcagctttcggtactttaaaagaaatgaacaccaggtctgtttcattgataagataatttgctttttttgcttaaaaaataccctatatattttttaaaagctttatttaagtgaaacttgaaaaagtgctacaaagatttgactcagtccttcctatgtcagctgtgatggtgtatagtgccatgccgaattttactttggaaagtaaaaaggaaaacaagtcagatgttcataaatgtaatttttttttaaaaaaaagctttggttttaaaaaaaatgtaataatcttgaattatatatttttatctgacggacagatgtaccaagctggtattttcttcatagccattatcactacttgaaatgacctgatttgtctgtttgtttacctgtttatttcttgtattccctcactataatattggcttcagcacgttggcataaagcc

SEQ ID NO: 911 - DNA, 4001 bp, Homo sapiens
ccagcgtgctcactcgtcaatgctcacgtcactcagcttcttcaggttgtccccttcacccccatagaccaccacccgctttggcataaagttgtcatctgtggtatccactgtgagtagcagcttcctgaagggtcagagtgtgaatatgagtctttgtgaacccacagggacatagcccacccaccctgtcctgcccagagcctacttacttgacaatggtgcccttcttcatagtaagccgtacccagtgttggcactgggacccatcgctctcccagtaggtatcggcattgctgtctgtcaggcaggacacgttgaactcctcctggggaggggcagagacgtgaagtcagcagttaccctccctccctgcactgggcttgtgctctgggccaggagcaccagagagaaagcatagtgaagttgggctaacaggcaactggtatgggatagggggccgctgggtatgtaaggggtcctatagacgtccaagatggggagctgaactgagtgtggcctgtggggaccctgttttagtcctggcctgcaggtgggggttctttctggatctagccttgaggggtgtgactatatcttgcctggggtgggaggagccccagcacccaccgtgtaggaggaaacgtctatgctctccacatactgcttcacgctacccaggttctcatcctccttgcccaggtggtcatacaagaagtggatcaggtcctcgtcgcactcgtaggtccatgtcgggggtacatagctaagcaaccccaagcccctaattagactgggcccagacgcagagctccttcctccccaccccattccagctcactcacagtagcctttgtacagcttctgcgtatgcctctgccggctgaggtctcgatcccaggcgatgtgagtatgtcaggtccaccacctgttcccacctgtgggcacagagtagggagtgggatggggagacatcagcggtcagcaagacactacctccatgccgtgtagccttcttcagggctctatctcccagtctccctccgagcccccttcacgtcccgcccctttctgctcttaaccctgcctccgctccagtatcccacccaccccaggctgtggctgaagtgttcccaagccctcctggcccggccttctgacagccagccccgctccttcaagtgcagtacctgagcaccggccgataatccacgccaaagagctgctgctgccgctggaggtggttgggagtgtcgatgggtaccaggcgggctccgccctccgccgggcggcacaccagcagccagccttcctgcagcccgcagtcgcccaggtgctctgccagctgctcctgccgggacgcgtaggatggggacagccgtcagggaactgcccagccgcctgtcgtgcccagcccagggcaaagggcgccgaacgcaatgccaactcaatacaggggagaaaaggcaaacagccagaggtttctctggccccaggggtcttttaccgggtcctgggcagggaagagcgcacctttgtcagcttcacccagagcccgtggccattgcacagctcctcgcccgtggtgcgcacgcaggcgccgcgccggagctcaatgctgtcgcgggcggcgcggaggggcccggagccggtaccgggggctgggcctgcggcgcccacacgcagccccaggccctctgcctcccacaccggcagaagcacgcgcgacggtcccgctgggtccttgtaaagcttgtagagcacctctcgcggcacgaaagccagcgctgctggcagcggccgcccggcgcggaggctccgcgctgcctctgccaagaagcgcacgcggcccagcagctgccggggggactccagcaccgcgcccgggccaggacccgccatggcgaagtggcggaggtgagcacctagaggcgaccctgcccggggaacagctggcgcgaccgcggacagagcttcccaccacgcccttccccgcctttggccagcctttgccgtatgttctggactaagcgcaccccagctctcactgtattggactgtgtactcccacactcaaccatattacttatctctgtgccaccctaacccagccgaccaaacccaagattggtgattgctacctgatcaatctccctctctccatttccttgtgactaccattttatctctactgctactaccctcattcaagtcaccattctagctagcctgggtcattgccaacagtcatttttctggttcttcggcctgctgtttttcctcccactcccagcgaatctgctggactccctatcctatgggtggtgtgattaaagtgtttgagacaatggccccttcccctgccactgacaggagtcttgagtcattagggttgattctgtttgtcactcctaatcccaaggacactggagatcattattcattttaatgtgattgctgatttctgtttccccagtcttgtagctccttaaaggctggggctgtcttgagcagagctaacctctgcacctactataggtccaggctatagtatggacctggctggataagactgttggtatcatgagtgggacttgcgccaagcctccggatacccagactgtcagatgagaacaaattcctcatgtcaccgtaagatacatttacagcggagttttcttttgggcctttgttgttgcgtcgctacagcaaactttacggtgaaaaaaggtaggggtcctacgggcagcagccagggcagccctggagctgtcgctggagtccgatcatgtgatcttcaacatggcgacgctcttggttccctacagaaaggggcggagcctggactggggggcaggctcagattcaggttaaattgtggattgagctcgcagttacagacagctgaccatggaagcgaatgggttggggtgagttctccagagcacgcggtgtggctagccgggcttctaatttgagtcttccaactcaggactctatccctctactcccctttccccaccctggagacctcccaacctgaactccgttagctgggatcctgaatcctaaaaccatggatttttgagatgttcatcccagggccttaattcaagggatgcctcaggatttccaaccaggatctctattctgggaccatcaactctgatccctctttatcccccagcctgggtatttctcagcccctgaaccagcccagtgacattcccgtttctgaggctcactagttcgaagacccccaaactatccttagtgggccttcattccctccccccagtccctctggttgcttcgagcttggaagagtagagactaagtggagggaagaggccccagggcgggcccttctggagtttgtgcaccacctgataggcagagaggaggcggaacgggcggaaagccagggtttgggagctggcctggaggaggtagatagcggtcctggactgaatcggccttatgaacccgcgctttccccagcctccagcgtagcatactgacacctacccccacccccacctgatcgccagacctcagggttttccggagctgaagaatgacacattcctgcgagcagcctggggagaggaaacagactacactcccgtttggtgcatgcgccaggcaggccgttacttaccaggtaagagtcagggtctggaaatctagataaaactccggagggagaaaagttttcgaggggcaggggagggctctggagggcctcaaggctgagccctgtcttccctctgtatgcagagtttagggaaacccgggctgcccaggactttttcagcacgtgtcgctctcctgaggcctgctgtgaactgactctgcaggtgaggggtccacaaaagagggaaagatttatgccttcagtctgccacctagcaacctgtctcctgtttcctacagccactgcgtcgcttccctctggatgctgccatcattttctccgacatccttgttgtaccccaggt

SEQ ID NO: 912 - DNA, 4001 bp, Homo sapiens
aagcttgggcctcaccctagacctccttaaacagaatctgcaacttaacaaaatccccaggtgatccatatacacaaccacattggggaacactacttagagtgtttttaaaatagattttgctactttaacacctagtgataaaagtaaaaacatttattttacttacatacaccaaatgtgactctttcatctatgtatacccttgtttacctcaaccaacaccccgggaaatgctaggacctaaatgtgatcaattttgtttgcaattatctcacaatacatccaggtgataattcttaagagtcaaagacgcagctaagaagggtggcattacctgtagattattttcttccattttgtttcgaagttttgttgaaacaaaaatgaagatttatccttcaagctctatttgagagaatcagcactgactcagctgtaataaatacaaaaccgtttttgtaaagcgatacctgaaagaaatagctgcctagttcagaagggaagaacgaaagcctctttcttactccttactacagtatataatttaaatagaacgcttaaaagtaaataatgaattcacctctgagtactcaaaaaaaaaaaaaaaaacacgaaagcaggactcgaacagatatttatacaccgaagttcatagcattattcacaatagccaatctgtggattaaatgtggactaccatttaatccacagaatgtatccagtattttttcagacattcgcaaacaggctcagaaagcgtaacttttcactacgtcaaaccctactaagagcgaaaacagccatcctttccctttactatcatgaatagttcaactagatacaaacggagcaatcttaggagttctgcccatttcattgctaagaccctcaacttcaaattttttcaaaaatttttccacacatcgtcaaaatgaaatttcgagggggaaaaaaagtgtccttgataaactagagatgctccaacatctattcaattcactcacgaacttgaatttaaattttagttctctattgcacatgtgtctccaacaactagactttaatctggaatctaggcaacatgttagtcaccaacttgtattaagaaaccctggccgggcgcggtggctcacgcctgtaatcccagcactttgggaggccgaggcgggcggatcacgaggtcaggagatcgagaccatcccggctaaaacggtgaaaccccgtctctactaaaaatacaaaaaattagccgggcgtagtggcgggcgcctgtagtcccagctacttgggaggctgaggcaggagaatggcatgaacccgggaggcggagcttgcagtgagccgagatcccgccactgcactccagcctgggcgacagagcgagactccgtctcaaaaaaaaaaaaagaaaaagaaaaagaaaccctgctcactgaaaccaacgcttctgtctttgtacgggccgtcgcttccatcatcctgcggtaagcagcatgcccaaccgaaaaaacaaagctcgtcgcggagccgccagcgtcctcaactcagcgccgccctgacgcccgcgcacgcacggcctcgctgcgtgacgctaccgccgcggctacgccggcgcccgcacccgcgcctcggcctccccgcggggctcgccaacctcgtgcgctctcacggtcggccttgggccccgggagcctcatggtgcgccgagctccgtccctctaggctctcagttccaaggcgtcggttttgcgtctcgtaacggccgctgtggcgcatgcccagaagccattttcaaggtcctcttccgaaccttggcgaggacccctgcgcctgccgcgccgttgaccccgctagcgtgcggctgcgacgcggcacggtacggcagctgttggcgaaggcccccaactccgagcgcgtccgcagaccgcgagccggaaggcggcttgggcggctgttgagttcgtggcgctcccgaggcgtggcaaaggcctaaaaacggtcctggccagcggaaggcggcaagaggagcagcaaggctccacgcgaggcggccggcggctggagtcccagtcagcctccgctttcatcccagagcagtccacgggggccttaaaggaatgtaggctgggtgaagttggcccagtgacacctgcgttcagaaaaacgttctttccgctcccaacgccccctctccaccgccacccgacccccgaaatagttttccccgagtgttgtggatagaactgttgatctcttggaaaagttattgtatcctgccatccttccctctggagactccacttaatatatataagtactttctttcctgtatatgatggaagagtattaggggggtgaggggagggacgaagctgccttctttagggaaaaaagattgacttatattttgaaagatgcaaaagctggtgtttttgctactgaattaatagcctattaatatgccacaaatgatatattggaactgtattttcaaacatttaacgcctgctgtatgcaaagcactatgctgacagcttaagggtaccacaatgataaattacaccaatcttgtttttggcattttggggagtctagtgtcataggtaaagaagtacataactaacaataagcttcaaaaattcaatcataaggcccggcaccgtggcttccgcctgtaatcccagcactttgggggatcacttgagccccggagtgtgagaccccgtctctaccaaaaaaaaaaagaaattagctgggcatggtggtgcctgcctgtggtcccaactgtttgggaggctgaggccggaggatcacttgaccccaggaatctgagcctgcagtgagctatgattgcaccactgcactccagtctgggcgacagaaccagaccatgtctaaaaagaaaaaacactcagtgataatttcacattacagtttgagaggttcctgttgacttggggaaactagttttagcagacttcattaaaggagtgtacaccttactacaggatgtaatttaaaatagaatgtttaaataataaattcacttctgggtatatactcaaagcaggaattcaaacaggtatttgtacaccaaagttcgtaacagcattattcacagtagccaaaatgtggaaacaacccaaatgtccattaaaggatgaataaacaaaatgtgatatacatacaatggaatattcagcctttatttttccaatcagagtttcaggaaaatcaacctttaaaaggagtgaaattctgacatttgctgccacatggatgaatcttgatgatgatatgctgagtgatatataatcagtcacggaaggacaaatactgcatgattcaatttatatcaggtacctagagtagccaaattcatagagacaaagtagaatggtggttgctacgggctgagaggaggagggaattgagagttgtttaatgggtgatggaaaagttttgtagataggatggttgcactgaatgccactgaacttaaaaattgttaaagtggttttatgtatatttaccacagtttcaaaaattttaaggaaaacataaaagctatcatctatacagcattcctggatctagggtttttgcctcccctgctggttagcccatttatgaacttgagctcctcatgtccattccctctccaaatttgcctatttcatcattctcctggcctcctactcttattagagtctgaaaaatcatccttggctctgtccatttttgtccttcccacacttggacaatcaccaaattttgacttcttcaagctgtcatctaccatctgttccttcccacagctaatagcttagccttgtcatctcattttgtcattataactcatctttccttcgtacacaaggtaagtcctactgagttatagaccatgtaacgtcttttagagtggattttaagtcaaataggccttaaatccagattttactattactgcataacctttggaagttgcatcctctctg

SEQ ID NO: 913 - DNA, 4001 bp, Homo sapiens
ctcagttccaaaaccttcatcagaaatacttgtctgtattggatttaaaaactttacatttaaaatatacatgcacatacccaagttattccaaacatacttttttccaataatgtaatcaaatatccaattttaaacttaaaattaaaaatgaagttatgagcccaggtggtcagcgttgcagttaaccgtgactgggcaagtgcattccagcctgggcaacagagcaagaccctgtcttaaaaaaaaaaaaaattaaagttcggttcctcaattccactagccacatttcaagtgcccacttgccatgtgtagctactggacagcagggagctacaccctaggtactcccaatgtggtttccaaaccagtggcatcttcacctagaaactttagaaacacaaaagcttgggcctcaccctagacctccttaaacagaatctgcaacttaacaaaatccccaggtgatccatatacacaaccacattggggaacactacttagagtgtttttaaaatagattttgctactttaacacctagtgataaaagtaaaaacatttattttacttacatacaccaaatgtgactctttcatctatgtatacccttgtttacctcaaccaacaccccgggaaatgctaggacctaaatgtgatcaattttgtttgcaattatctcacaatacatccaggtgataattcttaagagtcaaagacgcagctaagaagggtggcattacctgtagattattttcttccattttgtttcgaagttttgttgaaacaaaaatgaagatttatccttcaagctctatttgagagaatcagcactgactcagctgtaataaatacaaaaccgtttttgtaaagcgatacctgaaagaaatagctgcctagttcagaagggaagaacgaaagcctctttcttactccttactacagtatataatttaaatagaacgcttaaaagtaaataatgaattcacctctgagtactcaaaaaaaaaaaaaaaaacacgaaagcaggactcgaacagatatttatacaccgaagttcatagcattattcacaatagccaatctgtggattaaatgtggactaccatttaatccacagaatgtatccagtattttttcagacattcgcaaacaggctcagaaagcgtaacttttcactacgtcaaaccctactaagagcgaaaacagccatcctttccctttactatcatgaatagttcaactagatacaaacggagcaatcttaggagttctgcccatttcattgctaagaccctcaacttcaaattttttcaaaaatttttccacacatcgtcaaaatgaaatttcgagggggaaaaaaagtgtccttgataaactagagatgctccaacatctattcaattcactcacgaacttgaatttaaattttagttctctattgcacatgtgtctccaacaactagactttaatctggaatctaggcaacatgttagtcaccaacttgtattaagaaaccctggccgggcgcggtggctcacgcctgtaatcccagcactttgggaggccgaggcgggcggatcacgaggtcaggagatcgagaccatcccggctaaaacggtgaaaccccgtctctactaaaaatacaaaaaattagccgggcgtagtggcgggcgcctgtagtcccagctacttgggaggctgaggcaggagaatggcatgaacccgggaggcggagcttgcagtgagccgagatcccgccactgcactccagcctgggcgacagagcgagactccgtctcaaaaaaaaaaaaagaaaaagaaaaagaaaccctgctcactgaaaccaacgcttctgtctttgtacgggccgtcgcttccatcatcctgcggtaagcagcatgcccaaccgaaaaaacaaagctcgtcgcggagccgccagcgtcctcaactcagcgccgccctgacgcccgcgcacgcacggcctcgctgcgtgacgctaccgccgcggctacgccggcgcccgcacccgcgcctcggcctccccgcggggctcgccaacctcgtgcgctctcacggtcggccttgggccccgggagcctcatggtgcgccgagctccgtccctctaggctctcagttccaaggcgtcggttttgcgtctcgtaacggccgctgtggcgcatgcccagaagccattttcaaggtcctcttccgaaccttggcgaggacccctgcgcctgccgcgccgttgaccccgctagcgtgcggctgcgacgcggcacggtacggcagctgttggcgaaggcccccaactccgagcgcgtccgcagaccgcgagccggaaggcggcttgggcggctgttgagttcgtggcgctcccgaggcgtggcaaaggcctaaaaacggtcctggccagcggaaggcggcaagaggagcagcaaggctccacgcgaggcggccggcggctggagtcccagtcagcctccgctttcatcccagagcagtccacgggggccttaaaggaatgtaggctgggtgaagttggcccagtgacacctgcgttcagaaaaacgttctttccgctcccaacgccccctctccaccgccacccgacccccgaaatagttttccccgagtgttgtggatagaactgttgatctcttggaaaagttattgtatcctgccatccttccctctggagactccacttaatatatataagtactttctttcctgtatatgatggaagagtattaggggggtgaggggagggacgaagctgccttctttagggaaaaaagattgacttatattttgaaagatgcaaaagctggtgtttttgctactgaattaatagcctattaatatgccacaaatgatatattggaactgtattttcaaacatttaacgcctgctgtatgcaaagcactatgctgacagcttaagggtaccacaatgataaattacaccaatcttgtttttggcattttggggagtctagtgtcataggtaaagaagtacataactaacaataagcttcaaaaattcaatcataaggcccggcaccgtggcttccgcctgtaatcccagcactttgggggatcacttgagccccggagtgtgagaccccgtctctaccaaaaaaaaaaagaaattagctgggcatggtggtgcctgcctgtggtcccaactgtttgggaggctgaggccggaggatcacttgaccccaggaatctgagcctgcagtgagctatgattgcaccactgcactccagtctgggcgacagaaccagaccatgtctaaaaagaaaaaacactcagtgataatttcacattacagtttgagaggttcctgttgacttggggaaactagttttagcagacttcattaaaggagtgtacaccttactacaggatgtaatttaaaatagaatgtttaaataataaattcacttctgggtatatactcaaagcaggaattcaaacaggtatttgtacaccaaagttcgtaacagcattattcacagtagccaaaatgtggaaacaacccaaatgtccattaaaggatgaataaacaaaatgtgatatacatacaatggaatattcagcctttatttttccaatcagagtttcaggaaaatcaacctttaaaaggagtgaaattctgacatttgctgccacatggatgaatcttgatgatgatatgctgagtgatatataatcagtcacggaaggacaaatactgcatgattcaatttatatcaggtacctagagtagccaaattcatagagacaaagtagaatggtggttgctacgggctgagaggaggagggaattgagagttgtttaatgggtgatggaaaagttttgtagataggatggttgcactgaatgccactgaacttaaaaattgttaaagtggttttatgtatatttaccacagtttcaaaaattttaaggaaaacataaaagctatcatctatacagcattcctggatc

SEQ ID NO: 914 - DNA, 4001 bp, Homo sapiens
agtctcaatgagtagcagggagtagtttgcaagaaaaaaaaacaagtgaagatgtttcccattctttaacctgctccatccctcaaattcctgctgctccatggcaggggccctgctcaccccacattggcacagactctgctggagtcagatcctccaaagccacaagcttccttgaggccacggggccgcctcattcttgttctgccccttcctcacactgaaagactgcatagcctggggtgcaatgcccaggtgtgaaattgatgctcgggaaaacaaatccttcccaaagtcacttaaggaatcccccagccccaccgcacagacccctggatgtatactgcccctataattctgctctaggcagaaaagcctaggagtggaggtgacagctcccagcatatgcacccttttgctctgctctgctgccctgtagagccctggaagtgaccagagcccttaggctactgctgctgcatgcccagagggtcccaagcagagctgggcaggaggtaggcccaggcagggctgggagagcagtgaccaggcagggtgcacggctgcactttgcccaggtcctggctctggctctggtctggtgccagtgctggggtgggtgtgtcggctgcccacgcagctgcggggtccagttccagaactatctccaccagctgggatggggggcttcttcttcaccctgctgcctcttgtcctttcttctccagccaagttgggggtgaagcagggacgctccttttattccctgagccgagccccagccccagggctttcagtctgccacgccagtcacaaacagccggcttccggcctgggtgtgggtactgggctggcccctaatgatgggaacagcagccgccaccaagagcttcaacctgtccagtgccccaaggtcccaagcagtcggcagggtctgtggatcggccgaggggctaccacggccgccagaggccagggccgcagggaggcgagggcggcgagggcaccggagcggatgcgggctctggggcagacgcgggcgctggggcgggggcagacgggccactggaatccccagcgcgcccgccgtccagggtggcgctggccgctctccgccacaggtgctccagcaggcgcgcgctcacggcgggctccaggacacggcaggcgggcagcacgcgggccaggcgcgccacacaggcgctgtagccctcgcggtagctgtcgcaaggcactgcgggcggagagccgcgtgaggcgcggggtagggtgccgggtgcggggtgcagagcgcgcggcagggcagggagggctcactcacggggcgctgccgtgggccatgaggacgcaggcagctcctgcaggaagcgcacggtcatttccaggacgtctgccttctctagcttcgagcagttggagttctgcgcccggccacgaggaagagcgacagagaaccaccaagacagaactttggccggctaccgtgcgcaccctcgctctagtcgggagctgggtgtggggcgcgccgtggcctgctgggggtccgctccgacgcgcccaccccacccaggctccgcctcgggcgccgcgcggaaccccctggtgggttcctcccgcaggagcaccccgtccccctgcccccgctccgcgccccaggaccctctgccctccgcccgggcgcgctcacctcccggcccagcagcggcaggatgagccccttaagctggctcaggctctggttgatgcgcgcgcgccggcgcttctccagcagcggcttcaggctctgcggacgggcggcgcggtggttagacgggtccccggagtccccagccccgcccccagtccccggtacccaccttgcgcagctccgccgcgtcccctgcccggcgaggcagccccatgctccgcggggaagcggtggcagctgcgagccccacgcaaagggaaaccgaggtccgaaatgaggtcccgggcgcggcccgggctggtgccagacgagtgcgcgccccgcccgcggccgagctttaagggagcggctcgcccgccccgccccgccccgcggagtccggccgcccgctggtcccacctcctgcctttgttcctgcgcagggtggagccgggaggggagaccgcgacgcccccggggatcccgctccccgcctttgcgtcctgtctaccgcggggtggcggcccccagttttccccgagcacctgcgggagagtggtaaaggcgccatcgggggccttcgctgcgtgaccccgagggcaggagggccaggtggggccaggccttgcctgactggagctacggtccctcctctccaatgctgcccttcattcattccccaggctcgggttcagcgtcttctctgagccccgccctgggccgcagcaggggacccagcggttacgggagctcccatgagggacagcagcgggagggacttgcacccccagctgctttatcgggtgaagggctgagctggacgggaaatccgagttccggagaaaggtcgtgacttgctccagtcctcgacgctgggaacaggccgagcctggacaagggccccagtcgctggacgcccggctctaaggagcccgtagaacccttcggcggcttgcctagttaagagtcttttggttaccccactccaggctttgggtggggaaacggaatcctagagaagcagaggcagccctggagccctcggagctcgttttcattcccaccggctaggggtccgggttctcgcccgcaagacagtcagggctcatgtgacgcgcgggcaggacagttttgggtgcgggccccagtggcccgcccaggaccgccttcgcgccgcgtggccgttgctgcggcaaactggctggcgtcccccgcccatctgctccgggctcccctcccccgaccggctggcggggcaacggccacgcccgcgaaccacactgcgaactgccgggcagagagatgactggagggatccacagagccagccaggaggagttcccctatggggcggggccaaggagggctctgtccagggtgttggatgaaccccctgtcccccgaaccccacttccgagctccacccctgccgctagccccacgtctccctccttcagggttctcgccgcagggtggaagaaggccagcgaacacactgaggggcccggagaagcctgggccaggggagcccaggccacccatacctatctgtggcatgggaaggaatgtaggccacctttcatggacacttactgtgtgccaagctcagggcttaacgctttaaggctcgctaacctgcattaaccctcataaaagacctaacaagtaagaataaatccttcaacagatttggcccagcagggcttggaggaacctgagaccttgttctccgtggttgaggccagtttgactccataggcctcccctaagacaattaattgttctttaagagctcaaaaaactctgtggatcttttccctctcatccccaggccaagcgacttagcttggctgactcaggtctgcacccacaagtccgcctgcagcatctgcatcttggggagggactgaccctagctcctgggagaaaaaggctgaaggaggaggctccccttagaacatccccctccaggtttgcggaccaccatttgaagactgaatggcaggggagcaaacaccatttccattgccagttacccccagttaaaaatatttcttcctctactctcccattgggtaaaggactttaaccaagtaacccacagttctcttcaactcaaggattttcaggttttgctggttacttggaaggagtggtctggaatcagaggaacgttaaagacagctaggtgggcaaatgtcgggtgcaggctttaggggaactgggaccacctaggatacagtaaggatacactccacccctggtccctattcttgggaagtgccctggcccttgggttgaggagaaacctggggtgggctggggtgagcccagc

SEQ ID NO: 915 - DNA, 4001 bp, Homo sapiens
ttcaagctggtgccaccaagcaatgggtcccttccaggaaccgcgtgggcggggcgtccggttggggcggtgcatcttaggggcggggcttctgagaagggtgggcctcggggaatgcgccagcccggtgggcagcaccgcttgcgaaggaggtccttggaagtcaagaggatcccgggttgggggaggctgggggccccttgccggcggggcggggccaggcgcgctttgtgccggtgggaaccgggcgcccgcggtccgctgaatggtccggggcggggcagcgattctcctcgctgcgaggggtcagctctgcgctgttgccaactgcgacattcccaccgctgcgcggcaaccgggcgggggtgggggcgggcgggttgcccgccaggggtccctgggaaaggggcgcagcccaggacaccccctcccagcccctccggaggatgggcggagagcgagcggtccggcgtgtgtaggtggagctagagtgggggtggattatgcccagacgcgcagacccagtccggcagggctgggggtatttccctgcgcttgcggggtgcgcggccctctccaagccacccccgccccacgaccagaacggacgactggggggtcctggcagtcactgtgggcgtgctgaaaatagtccctgtgtcgcgagaccaaatagggagcgccttcagttcaggtcatccccggggcttccccagggccgccacacgcgcaggcccagcccgggactctcggcgcagcgactcgacgctggctgcggcggggggacgctggcggacgagccagggagactttcggggaggaggagcaggggtggtggggaccgcgggccgccggcggccggagcaggagcccagacggcaggggtgcaagggcggaacagcgcgggcgcctcctggcccaacccggcgctgtccatggtgctgccggcggcgctctcgggcaccagggggcagcgcaggccgctgccgacctcatctccgcgccgaaggagctggctcacgccgggcaggcagctgcggaagcccgacggttgctcggctcccctgggcacaggccagagccctgtggggaagagcggacgcgagaaacagggaggggaagagagggaaggggaaggggagggggagggagaggaggggaagggggagggaggggaggggaggaagggagggaggagaggggagtggaggtggaggggaaaggagggaggaagcgtgttgaggaagggaagaggagggcggaggtcagacgacccgaacgtctcccccggggtccagacctaccacccagattgcaatcgcacagccagcccgggctttactgctcctccctcgccccctagcgagctggggccccctcctcaccaactgcacctgcctccgagttgtcctctttatatttgctgtcttgccatgttgcccaggctggtctcaaaagcccggggtcaagcggtccttgaggtatccctctttatttggccttgtgcatccctggctctgatcccacaagcctccccctcctccctccagccctcccctataccttgcaaggagttctgaaggcttctcatgtacttcacgctcaactccaggatgtcggccttctccaatttgcgcttccggatctacccgaccatggaaaggtctattagaccggcctcccgaggtggagagagggaggttgggatcgtatcacccacccacccccaccccgcctgagtctcacctggtgcgagtagtgtttctccagcagcgacttgagctgctccagtgacacattgatgcgtgcccggcgctttttctccatcagcggcttggaaatctgcagatgaacagcctttagagtgcaggactgccaccctcctgccctcggcacccccccacacctcccggggaagggtgcctgcccctagtccctcaagaccccagacctttcggaagttgccggggaggctgccccgggcagcaggctccgtgcccatgttgcagtccatgcaccagtgcgaggcagcgccgcctttatagggaccctcgtttacatgtcaatgaggccctctggactctagaaaccttgaggaggaggggaccgagggaggacgcactgggaagctccccacctccttccctcagccccctcccatagcctaggcttcctctcaccttcaggaccccccctgtctcccgagggacccccccctcccctttatctgtcttttccttatctctctggcctccaccacttccccagtctgaggacccctgccatgcccaccccctccatgcccatcctgtcccaatccccgtaagttctccagtcccacttgccaagtccttgataccctggagtgcaagcattccaggggtcacctactggggaggtacatgggccagctggccacaggctgcctcactgactatgacagggctctgggctccctcgggactgatgaagatgccaaggcgacgcctctttatgcacttcatgctctggttatacccgcaacgccgcattagttgccctaatgtcgggacaatgcagcaattttctgcctgtggctgctcaaagccaggcacaagctgagcccgcgggggccatgcagcagcctgtgtcccattaaagcatgcagcccacccgcggggccacagccagcctcatccttgctggggccttgggattgggaggggtcctggtgagggtgcagcctgggtcctgtgttctctgacactgctaggatccaacgcggacttcccacaggaggcaggtggggtgaacacggctgcctctcccttccttacagccctgggcttccaggctgggtggctttggtggtagaccctgtccccatggagaagcactagaagtctactcccatgagcctgctctcagctccacgcacaggtggtggtggcaggagaccactgacattctgggaagagctccaggccacacttcgagagatccagggcccgcaccccaatctatgattcagactacggcggacccagtggaggaggcgcctggagcacttgccccaggatgggctaggcctacagcaaggctctggggccatccccctggttggactccaggaggctgaactgtagctgctgtgatggacaggaaggctgacctccaggaagtccctgggttcaaacctagacacctcccatgggccctcatggctttagtttttggggcttgtaaaattatattctgaacaatgcagcccccattgcttctgagggtgacagggaagtcgcaaaaattctgcagctgagccctgtggcagaggaatgaacaaaccggcttctgtgtagggactcagggtggggtgcgccccccagctctatcaagccagggcatctccccccagcccgcccccgcctacccttcccaggatagcggcgttcccaggcgccaagcagcgtggagaatcgcgccacgccctccccctttcaggccgaggcagcggcaacagcagctctggggctctgtccagcccggaccgcagggcccgcgggccagatccgggccgacccgggcctgggagggcggcgggggccgagaccaggcggcgggcgctggcacgcgccgggcagctttgaagcgccaggaccggccgggccggggcgtcctccatgcgactcgctccgagcttggggcggtggcggcgcggtataaaggcaccgcggggcgggcgggcggcgcggccgggcacaaaaggggcagccgagtgttaagggcattgtgcgggccccacaaagcggcgcccgcgcccgcccccgccccctcggggccaaactccgggcgccccgccaggcgcggacttccagctgctgcacatctgcacagaggcctggcgcgcgtcgcgccccggcgggcctccccctccccgcgttctcgagctgcggggcagcggggcaatttgtcctctaattacaatccttccctataaaccgccgcccgcgcctttcaactcg

SEQ ID NO: 916 - DNA, 4001 bp, Homo sapiens
cggcgctgcctggtaactcggtggtcgacaacggcacgtgctcgggacgatgagggaggagcccccagtcctcacccactggggaggcggaacctcccttaccggggcaggggaggctgcgggcagggccgacgccctcgtgagcgacgtccttggccccggcactcggtgtccacagcccagctcggacccgcgcgctcccgccgggcgccccccgcacagacgcctggaggaggggtctgcggtgggcacgggcagctctgcacttaacaggagaacccagcgggggtcttcagggccaagggcggccgccctcatcccagcgccgctcaggaccgcagcctccgccttccgcggtccggggactgggagtcgggaaaggggcctccgaaaagtaacttgcccggcgatgctgcgcgaccgccttccagcaccgggaagattctgggcactcagggacgttgagcttcccacctgagcctccggggggacccctcacaaccgccaccgcagagcgaggcaaacccaacgcgggggcagagggcgggtgcgcatgcggggctgcagggatgcggaggggagggcgcggagcggagggcgcggagcggaggggtcgccctcagtcctcggtcccgcccccagcccgcccccccgggcccgcccgacgcccccagccacctgcagaccgcggccctgggaggagggcgggaccccggcgcggcgtggctgcggggcgctcccaaagtcaactcttcaccaagacaaagaaagaaaactcgtgacgcagactctggaataataaatacgttttctctgctacagtctcggcaaaggccacggccctagaacggggcgccgcctccgatgcagtctcagggccacagcctcagcgcagccacggcctccagggcccacccgggccctgcggccccgccctgggggcggcgggcagcgcccgggtcagacccggcagcagcggcggcgcgagcagagggaaggggccgccgagcgatggcagcagcgggcggcccgcgtagacctcgggcgctggggcctctgcgggggcagccggggacagcgaggccgggcggcgggagggtcccagctggcgcaggcaggctgccaggtggcccagcaggcgggagcgcacgtcggccgggacgccctcgcagccggccaggaagcggttcacctccgccagacactcgtggaagccggcgcggtacttgcccagaacggcggggtcggcgctgagcgcggctgcgggagcgacacaggaggagaggtcggtgccgggtcccgggggtcccgcgccctccccccgcctccaagccgccgccgcccgcgcctcacccgtcacctgcacgcgacgcaggctccgcaggtgtctcacggtcatctccaggatgtccgccttctccagcttcgagtggcgggagctctgggggcggggataggcgggaggtccaggtcagctgcgacccagactccgggtctcgggccttcgcccccgacttacctcttttctgagggcgtccaggatgagggttttgagctgagcgaggctctcgttaatacgcgctcggcgccgcttctccatgaccggcttggaggactgcgggtcgggcaccggctgagtcccgcgtccctcccgccccccggtcgcccccctcacgcccggccgggaccccaccttgcggtgctcggccgcgctccggggcttgtctggggtccggctggcgctggccggcgctcctgccatcggcgaggcgctcggtttccccggcgtgtctgcggccatggtgcgccccgcgcctccccgtgccgggtggagcgcgccgccacggaccacgggcgggctggcgggcgagcggcgagcgcgcggcgatccgagcccctagggcggatcccggctccaggcccgcgcgcgcctcaggccgtttccctatttaaggcctcgccgccgcggggtgtgtgaacccggctccgcattctttcccacactcgccccagccaatcgacggccgcgctcctcccccgctcgctgtcagtcacgcctcggctccgggcgcggcctccgcgggcgacaatggcatgcggggcccccgcccgcgcccccctccgacaccgctggggacagggccgggtgatcccgcgctccccgatgcagccggggccgagcaacgcgccgggaggggccgctgggggcgaacggggcccgggacccccggggctgggcggagtctcggggctcactctcccgcccagggggccgggagccggggctggacggagctggggctgtggccgcgcgggaagtcgggaaggaaattcccccagtggcgcagggtccggcggcgccgaggggtgggcgagcctcggtctcgagcctcttggcttcctccgcccgtccccactccggtcccggtttgggccctgctcggtctccgagtttgatccgacaccggctcggcctccgggggtcccaccctcaggtgtgcggcctggagcacggagggctgcagaaagccttgggagcgacagagccgggggaaggtcggcggccgggtcggcaggcgggagggcggagtcagcggacggcgaaggggcgcacgggtggccccgcagagcagggccggtgatggcgcgggccgggccggaccacgaggagcagaacgtgcgcgtgacgcgagcgggctggtgacgtcaccaggcacccggggcgatgacgcaagcctgctgggatgacgtcatgtggcccgtgtcgccacgtgcttccaggtgacccgctggcgaactcagcagcagcaaagtggggctcacagaaaaatgaggggccactgttaatataactgcaaaggggcaggttgcgtaaaacagggctgtggttattttcgtgtttgctgtttttatttcgaatgccgctgcggggcacgttggtcctttccgcactcggggtccccggcggcctcacgcgtccgtgcagcggaggcttcctgagccccctggagagcctggcctgggcccgggtgtggagaccctcccgggctttcaatccgggcaggaggcagatggcagactcagcagtcacgtaagagaaccgaattaggtgggtggcctgggtggacaaaagccttcttgacgccgggtggtcccaaaggcttctgcggggtggggggtcctcaggggggaagcctcaagggagggcgtggcattcccagggtgcgaagggggcgcagggacgagggaggtggggagggggagctgggccagcgagaaccgggagcttctggtcggggagggagtcggggaactttttggggagcttttctgagccagggagtcggctgattggcaggttcgcccctgcccgggcacctggacccagggtttctgtgcggaagcttcccctcccctcggaccccacgtctaatctggccccaagcaaagtcctgcggcccacgcgggaaggcgccctcttcgcggcgctgaccccggccctccgcggtgcccctgaggcgccccccacaccccgccgcttgcacaggggcgcggggggctgcgaggccggagcgggggtggcgccctctccgccgagaggctgtccgcgcccctcgccgactggggaaagccgcgggggctgggcgggcgtctcggaggtggccccgcgagcacttaagccccggctctcctgccccgacctctctgcgcgcgcctcggcgctggagaggctcggaccggccccgtagcccaggaggtggtgtggatggtgtccccgtcccgcgtccctccccggcctgagcgctgggcccgggcgggaaagcccgcgagcgcccccagtggccgcagtcgccgccgcctcctgctgggggtcatcccaggggagctgccggcctgaatctccccagcccctgggccccggcttgggaagaaatttgggggggctctgggcctcccccagtccctagacaggcagggagttcgggatggaaggaggagcc

SEQ ID NO: 917 - DNA, 4001 bp, Homo sapiens
ggcaggtgtccccggagcccatgccaggactggcgctgcaggccgtgggagtgtgcagcagcaactcggggcaaatgttttctcctgtttggcccagggccaagcccctttggctgtagcaacagatctactgcgggctgtggccctgggtcgcctctcagtggacacagcctaaggtcctgcgctgtcaccttgccccacccctaccttccggaagctagtgaaaggcctgggcggggggagacccagggctccgaccatgtccacccctccagcccacctccccctgcccctgcccctcacctgctttccctccatccctccctccccctgttcttccggagcaaggaccccacccttcttccggggtccagggggccactggcaggggtccctccctgcttaactgctaccatggccctgcccattccccttcacccctgcagacccgctccatggctgccaaggacaggcgtgaggcacagcagacgacactgtgttgggggctgaacaatcagattttattatggcggcttcggagcagtcccgtggcttccacgtgactgagagttcaatttctgagtacaaagtcgtgcccacacgcatccacccacacagaggaatcctttaaggatcatagtggaggcacccaccctccccagacagcccaccgtgagccccagccagaccaccaggcacactcaggagccttttggccatggccctcagggtcctggacgcccgtccggggtgatcactgtttcctatgaggatacagctcgagttcggccttcacaaaaggcaaatgtgcccgcggcacagcccgcctgccaggggtacgcccagcagctacgggccctgaagaaagtcctctacaggctgggggcagcagtgtgcgagccccggcactacaaatatcatagaaccccgggcggccggggacttcccagaagtcacttgcttaaatgcaaacacagaacaaccccatggggtcagacacttggcagaagatgggccctgattgtcctaaaacggcagggactctgcacacacattctctgagaatggggctcctgcgggccggccagcttggggccagagccttccggagaagggcgcgtccaagcccggggcggacgacggcgggaaggcgcttccctacaggcgagaggagcaggctcgccctctggtcgtcgggccgcgcgcccgcaggtcccgccgggtcaccagggccgccagaggccgcaggcgggctggtgcgcggcggcggcggcggcggtggccttggcggagagcgcgggcgggggcgcggcgcccggcgccttgggctccttggcgggcgcggcgggcgcggccgggggccgctggaagtggtacagcagcttcatctgcgtgtcgctggcggcgtggagcgtcaggaactgcacggcctcctgcaggcaccacgagtagccttcgctgtagtcctggtgcaggctcttggggccggcggcggcgacgaaggctgcggggagacgcggcggcggtgagcgggcggcggggcgcgggggagccggggcgcggtgggaactcggggcgcggggggcccgggcgcgctcacctttgctgtgcttcaggtagctgacagccatctccaggatgtcggccttctccagcttggagttgggctggtgccgcgcgaactcctgctccagcagcagcttcagctgctcgatgctgctgttgatgcggtcgcggcgcatcttctccaccaccggcttccgcagctgcgggaggagggggtgtcaggctggcccggcacggcgcagggacccccgaggaccggaggccgcggggacagcgcgccgggcgagtctggtacttactcggtttttctctttggggctgagcagctccacggccacagtgctgggggccatgcctggcgcggaacaggcgacgaggcgacgcggggaggccgggcgagacgaggcgagcgggcgcgggcaaggccaagcgcgtcccgggctggcgcggacaccggccccgcgcgccgacgccctatataggcgcgggcggcggcctggcgcctggagtccgggcgccgcggccgttcccacactccgcggccaatggccgggcgggccgcacaaaggcgccggcccattagcgcacgctaaattgcctgtgaattggcgcgggcacaatgggcgctccccaaggagcaggtgggccgcgcggcacaatgtccgggctgtgggaacgcgctcgccctcattagcatcccggggcctgatgccgggagccccgcgcctcaatatgctgccttttcccaggccgccaaacgggaggggggcaggaaggagggccccctcccccgccctcccctccgctcccctcccctgcctctccccagcggcttcccactgctggctggcagaggccgtaggagcagataagggaaaaactgtagaatgaacaagtgccacggcttcctgggggatgggcaccttccctgactgggacctgctgcccctccaggggagggggacagagggggcgacgctcttaggatcagtcctacgtgcctatattacaagccccctgactgtcacctgggactcctgacttctccagacctagaaaatgggccttgtgccttcctggctgggctccgggcagctccaggaagctggggcccgtgctccacgtggagcccggcacccggcagctctccccgcggagccgggcacccggcagctctccccgcttcctgcaccctgtcctcccaggagcactgtaacccacagcagcactggggctgctccacgagctggcaggtgtccctcaggggcctctccccacccctatctggccagggatctgactacagtgtccacgcagctcgggaggcctcggctcttggcatgcttgctgtggccactgtttatgcatgccacagctccacctagtctctctggcagccagggcacttgtagggcttgctttcctctggcattttgccagtgggtagggagtgggtgccaggtggcagacttgaggatcagaggccatgccagccctagccccccgcccccaaccaccggtccatgggatgagctaataaccccggtacctggccaactgagctgagtgcccgcagccactttgaggcaatgaatcccaccctgggtccttaggggagggtcccttgggagacccccaccccctagcctgcggtcacagttcctcaaatgctctgcagcagagactaggagaggattcggggcctgggctggctcctagagacaggttgggaccctgccgggtcctagcggaagggccttagcccccagagctggggctggcatcagggctggttaggcagagtttgaatccaggagtggggttccctggccagctggcagggtccaatgaggagccttccccggaggctctcggcagtgacccccggctctgagtgactcgcttggtgggcctagctccaggaggtcctcagcacaaggatggacggtccagggggcagccaggacagtgctgggacagcaggggaagacaggacttcaagccaatgcagggtggctctcccacaggccagccggacaccattgtgaagggttaggctgggaggctcccaggcagaaacatcaggtgactttggaggtggcaggaagggagcccctattcaccctcgtacccccgctgtactcccacaacacctcccttgaaggggactcatgctccaggctgtcagagggaggcagtgacactgggggctgggactgctgggggctcatctctgagcaggtggggtcccaccacaacactctggcccttgatggatgcaggagggcaacccgtgtgggggtgtccaggccacgcgctcacgccatggctcccacagctctgggcattgatggcggctggcactggctaggggctctggactcccggctacacaggggatctggttgtgttcagtggagctatttcgcagctga

SEQ ID NO: 918 - DNA, 4001 bp, Homo sapiens
gtgtctaaaaatgggctctgtatatataggaaatgctgtatgtataggaaaaaactgcccactgatcctttatgcctcatgtaagcagttgcccagatgctactatcttcaagaagccctccttgccatctttgattaagagtgacctctctttgcttaagtgccctcacagcccacagtctgtctcctttccatcctgtccatggtgtttttatgacctggcaggtcactgactgggctgcaaacttgtggaggacagaagccagctctgatcaacctagttctctggcatcaattttgtgcctctgatctatgaagacccaatgccattgaatttgagaccccgctccaccaccaccacgtggtgctgtgccctttcctggcccttaacaggcacaggctaagataactgcttttctaaatagcagtttctgctaaacaattaagaaaggctaatacgttgcatagcgagttgtgttatactccctaaaaacaaatgtacaggctgcaagaggaatatctattatggcattttcctgggatttgagactgaggcaggatccttggatctcagaaaactggagagcactaaaattacaaaatgtcctcaaaaacatccctaagaattaactgggcctggctcactggcttatgtctgtaatcccaacactttgggaggccaaggcaggaggatcacttaagcccaggagatcaaggttgccatgagctatgatcatgccactgcactccagcatgggcaacagagtgagaccatgtcaaaaagaaagaaagaaagaattaactgaattcccctccaattctgttctagagagtcaagtctagatgagccaagagagatgaagtatatccctttcttttccactgctgtctttgttttactgatggggaaactgatgacagactctgtcagggaaaccaatggcccaagaccacatagtgagttggtggcagatttggggctgggacccaggtctgcagactcccagtcagccctgcagctctttcagggtgctgggaatcacatggtgtgtacctaggcatgtgctgtgctaagcccttgacatactttgcctcatttggttttcccaatatttccatgaagttggttctattattcatgctcatttaacagataaggaaactgaagcttagacagtttacagaactgcgaggtagcagaactatacaagcgcagtttgttcgacaggtttgaagcaggtcagactatctaccaggagctgaaagacactggcagtatgggggcacgataggaggaacattggaattagagtctaggcccttgcaagtcgcttattattttcttcaatactaagtccctaaatccaaactccaatttgctcaaaggaggacaaattttcttcttcctgaaataatttgtggactacatgaaaactgcatccaaactagggtaaaattgggaaaggatggggttactctgcatcgtcagcagattccagacaggggccagagtaccatcagtctatgagagttttctaagatctccagggaaaacctgccaatggcctcccctaggccacttcaacagatagatgataacccactagccacctgatcccccgagctgaactctccctccctgccagcatccccagccctgcacgaccgagagcgcgcaggatccaggcactcgtgcgtgtaacggcacggcccgcacacgccccctacgccgacacctgtggcccccgcgctcacctgcctctgcccaggcggtgctggagggctggcccgcctgctcggcgagcccgtcgggccgacccccaccccgctcgccctccgcctgctcggtccccgcatcccggcccttacctcagctggccctcttggcccacgtcgatgggtccgtcggactccccgtcggagccgctcggctccttgggtcgcttcatggcgaacgcaggctgcctggtctcagccccgcggctaaggctcccagtcgggaagtcaggccccgccccggccccgccccggccccgcctcgggggcgccgccaccgccctttcccagggccctttcctgcgccgcagctccgggcgcccaggcgccccctcgcccccgcggtgacgcgccgccgagccgtgggaaggccctaggcggtcgccgccttcatcgacggctgggaggtccggctctgctccgctgtctcggctgccgcgcgctgggtggccttgggcaggtgccctgggaggccccgcggggaagccaggagtccccgtctgtccctgggtcgcctgggcgctgctggcctgtagaggcgccgcttcgatgcccgggattccgcaagggtcaaccctgcgcgctcctgcctcctggtgttctggaggcagcagacacatcaagtttgtcgaagttagtcgtggtggttgtggcctgatcctcagcaagaattccccagcagcaactccataggggcccaaagcaagtggaatagtgtggtgggggcaaggggaagacacttacacttctgagaggtggcagtcacccccaaaagggacggctgaagttgtggccaccgcatctgagaaagctgggctctggccgaggtccctaaaggcctggcgtggtggcagtggtgggttgtccctgggaatcagttcccagttcaccagaggtcgagttgtcctgggcggccaggaggccaggaaagggctccttctagacgctatggcagggcctcaaagtgggagaaggagaggaaaagggaagataccttccagcctctcttcctggggcctctgcttctggcaacccatcaaactgttcactcagggagggctctagctgccctgtccttagggggacttgtgggaagttctcagattcaccggtcatcctcaggcgcccagtacctcagagaagctcctaaggctccaaaggaagctgcatgagagcatcctggagctggacttcttgggcagggaagaggagatagaggaggtcttggtgtgctgggttagatatgagaggtcttttcctttttacccgccaccaggtcaggacctgagggaagccaccccttcaagtgggagaatcgggttggtcatctgagaataactgtgcttccatccccacagcaaggcctgcttgctgggggacacttgattacttgatgggaaagaatgttcctgtgcccccgtccacacacatccacagacacaaccatttggccaggtatgcaaacacatacacacggacagacttacaaatatatactggtaggcgcaactgtcgtgagcaatcagtaccaggaagccctggtggtcgccccagccacaactatggactctcattccaaatgccctcagcactcacatcacttctgtgggcacatgccagtcagtggaaacctcaactaacagagaagttgcacaatgtgttatgcattccctggaaaggcggaagtcaaggaagcctcccagatagctgccctgtgtaattggctgagatagcaaagattggaagaggagcagatttgcaggggaaggtcaagggccccgtgatggacgtttcatgtgagatgtcttggatcatcaaaatacagtgcacagttaaatagagggtatggagttcagaacagaggtctcagctggatattaaatttggacgtcattaggtaattgatggcatttaaagctatgggagcagatgggatcattcagaaaacgtggatggagacagagcaggggcctagctaaatacttaacatttggtgagcccttattataaaacctgaaactattctaagtcttttgtaaatattaactcatttaatccttgacaaccctataaagtagtaatattataatccccactttacaagtgagaaacaaaggctgagaggtagactaactccacctaaggccaacaggcaataaatggaagggctggaattcaacaaggcagttcagttccagagccaaaacattaggctttattacttt

SEQ ID NO: 919 - DNA, 4001 bp, Homo sapiens
tcaggggtttccagccttcctaaaacctaactaagggccttccccagcccccaaccccctagtccctagttctctcggctgtcttactaaaagtgtgtaagcctgccacatctcttctgcctgtcgaccaagggcttccccagtggccttccccagactgaacgggaaataaaatattagtatttgagagcagggcgagtgatcgggactctcagcgcctatctctcctcactcattcaggctcacatgcccacccctacatagcagcctaccctctagatttccccaaacccttccctggcccttccttaccatgtccacagaggagcagcaggagagtgagagtgcttagagttgggggactgccatgggaggacctgggactaggggactggcctggctcccccatacctatccagccaggtttcccaggcgccggttcttcccagctgatgaccctcctacctagtgaattttgaccggaagccctgtaagtgactgaaaaaagaaatttggctggacatggagagagagaagaattgaagattggtaaggataatgtggagtgaatctggggagatcaagaaaaggatgaacagactggaatttggggagattggagttcctcaaactataagtgtggcagttaagcctctttgccctgttcctgtggccacttttagggcccttgtgcaatacccctaggtgggggtggagggaaggttgagtgaactcaagggggcagagtccactgtattgctccattctgagctaccaaacagcaggtatgtcaaagatggaggaatcatggggctagatcagataccagtaatcctagtgggtaccctagtaaaattaggacctgaaaatatttcagaaacatacttcttatttgtccctctccattaggaggagatgccctctaggagtcatacatttcttttcctcctttgtgtcagaacacaagaaggattaagggtggcatacccatcccgtctagaatatcagtattcaaatgaaaaggaaaccaatctcttttcatcagctctagagagctgcaattttaatctccctctctcatggaataatgggatgcaaaccaaacatgcaaatcaatatttgttttttctaagtcaacagttcttgtattttcccaaatatcactccttccattaatctcttcttttcaaattctgaagttctcagtcttttatgatgacaggagttggagaggggctaaatccctcctgcctaactcccctatcttatgggtaaggatatgattgggggaagagtcctgcaagagggagaatagaatggagggactagagttgtggggagaaatcatttacagggagcagcccccatgcttggaatctcaatgtgaagggcattgctaagtgggggcaggatagaagggtatcagtgactcatcatctgaggtcatatttggccttggtaagaaaactacagaatagaggacgtagggaactccttctaaaacttcatcaggagtcttgaggtaataaggtaaagagagggctaagactgccagaggagagacagagaattaaacttcaaaaagctagaggccagaggccagaaagaaataagacagaaagagaaatggagattggggcaccttggtagggagagatcccagcatttggacgagagacatccaagtaggtgtttgtaattttataaaagtctaacttcaatataaaagcttattaaaggaattgcaatttcattttgacttactgtttccagaggtcaaacattactctgctatccaattctccagccatgattccctactctgtgggtcagctccagccagggggtcctccgtgtctcccccaggtccccaggccggctgctgtctcactgaggtcagggaaccagagaaggtttggtatggggggaagggggagtatatggctggccagagtactggacagctgagcagggagggaggtggctactgagttgacggttttaaaaatagctaagtccaaaattccaggaacgttggtgggggtagggtgtgggagttgggggagtggggagggttagaggattagaaagaatatggagtattgagtgccaagtcagggagggaggagagaaatatgacagacaagttggatatccaattccagcttgtgtgactctgtggtcactgcctactccaggcagccctccagcattttcaataatgttgagctcctggcctttaaaaattacagtgggcaattggatacctttcatttaccatgttcatccctgctatgctgaatattacatttaggttctacagatagtatctaggaggtagctgactttgaataagatccatagcagaggtagttcatagcccctctcctatctttgcagagtatttcagaaggacgaaaaaagccagctgtccagagaagaaatctgagctgtgagttgcttaggatgagggtttgttcagtctatccagctcagatccttgcagctgtctatcctcctacctactccattttcattactttagtttgtacagcaattcatcttcctctccctcatgaatacacaaaaaataaaggctcccgatttgcttggagagaaggctaacaaaggcaaagaggtgaagaaagaatggaaatagaattcttctaaagaaagagttggagaaatagaaaaagattcaaaaatatacttttccttccttccttccttccttccttccttccttccttccttccttcactccctccctccctccctccctccttccttccttccttccgagatgaggtctcactatgttgaccaggctggtcttgaactccttgcctcaatgaatccttccatctcagcctctcagagtgctgggattacaagtgtgaaccaacatgcctagcctcagaaagatacttttatggaataacataatcttgtgaccataaatattgcaaaatctcagcactttgggagctgaggcaggagggtcacttgagcgcaggagtttgaggctgcagtgagctatgataacgccattgcactccagcctgggcaacagtgagacccgcccccccaccccccttaaaaaagaaaagagatactgcaaccaagggatttagccatgtcatgtttttgcagccataggtatatctgagatcatcatcttttagtacttgccaagtgaaattaacagaaggaccgattccaaatacggtcactgtattagggttctctagaggaacagaactaatagggcatatatctatatctgtatctacctctatctatatagagatctatatctatatccatgtctatctatctagccatctagactggccatcaccagtctgctttctgtctctctagatttattaatatctatatagatatggatatctatataggtagatatataaataaaggggaatttattaagtattaacttacacaatcacagggtcccacagtaggctgtctgcaagcttgaggggcaaggagagccagtctcagtctcaaaattgaagaacttggagtctgatgttcaagggcaggaagcatccagcatgggagaaatatgtaggctgggaggctaggccagtctctcctttcatatttttctgcctgctttttattctagctgtgctggcagtgaattagattgtgctcacccagattaagggtggatctgcctttcccagcccactgactcaaatgttaatttcttttggcaacaccctcacagacacacccaggatcaatactttgtatccttcaatccaatcaaattgacactcagtaataaccaacacaatcactaagccatctttaccagttggctctattttaatacagagtctagaggccctcatagcactcttctcaggtatatatatgacaaatatttttgtcaaatatatacttctcaggtatatatatatgacaaatatttctcaaccattagaggccatatcacaagcagtttc

SEQ ID NO: 920 - DNA, 4001 bp, Homo sapiens
aacaaaactacaaatttaaaacatttgggaagaaaagcgttgcataaactgacaaaaacctcctatacaaacagcaaatattttcaaaagaatttttgatttctagttctagcatacaagaatataacttgtttgggttcagaataaaaatatcatgtacatattttagttcttatatactcctgtgaaaaaacaccccttatctaaaactgcatcctctcattccgcattatttttcttcatagcatgaactgataactaacattatagtatatgcttagttgtttattatgtttctccctttagagcaagcagggactttttgctcattaatgtgttccaataacccagaatagtgcctggcacacagtaaatggtccataagaatgcattgtggaataaatgcattagcaagaaccagtttataaaaatagtgtcaaataaaaataattttctgttaatttagaaacttaaaatttgagccccaatcttcaacgttcagttaaaaaatgtgaaatttttttctagttcaggatttatgtaaataaaatcatgaaggttctaaaagatgatgaatttggcactttcattatgtaaatctttttttaaaaaagaaacacaggtcctaaaagggaccttgctacagttcagtatgagtttgtgatgtgaggggatgctattttaaattaattaaagttctaggtttagattcagattttttaagttcctattatttattattaaagttttagtttcagcacgtggcacaaaattagattgccaaacacaataaacaatatcatcccaggtagttttaagtgtctgctctgctataatcactgttaaaatacttaagctatttttgagtctacataatttgcggtgccgaccttctctagttatattaatgacaatctctagttaaatattaatacaactagatacaattaatctttagttatattaatgacaattcaccattttgtcttctgtaatctttacttattgtataaaattattgtatacaattattgtataaacttattgtataaaattgcaggcctattacttcttacaatttttactcagaaacatactccttattttaaaagtacagaaactcagataaaaattattgatttgctagaaatttttgtgagttaaggaagaagtagggaccaacatttacgggaataaccgaccgtcacaaataactgcagagaatctgacaaagaaggaaaaatcaacgggaacaaattactccgaggctcggcctgggaaaggaccatacaattgtcggagccccagatctcaccccctctccccaggcaccaacagggctggctggaagggtccggctggggaccgaatcagcacctaaagcaaaataacagctctgtggatttcctaaggagaatatcctaaatccaaggcagaggccttagggccccgagagtggcacaagaacggggcgctggggcgcgtcactccaccccccgggtcccgtttcctcccaccgctgtgaaacccgcggctcagacagatgggtacgtcccccccagcgctcgctcagggggcgccacacaccggaacacaagacacaggaaccgaacaccaatcagccgactttaggggcgggccggacgcccagccggtcccacctcgcggggagctgggcccgccctgcgcccgagcgcgccgcaggcctcaccgctttctgactggaaatgcggctgaggcgctggcgcgggccggcggcctggagacgcctggtgaccaacaactcgccgcgcccgtccgctgcctgcccggcagacggctctagagatcgaccgctgcccggacggctcggctgggtccccacttccccgcgggcgtcgggcccccgtccccaccttccccgcgggcgtccgggcccctctcctcacctccctgcggacagctcctaggccagtcgagcgccgatttatcagcccctctgaggaccgccaagcctggctaagccgagctccaagcaatggatcgcccaagcccccaacctctcccttcctacctttttttctccgaaagtttataactggttttgaatatatctcttgcagtttactgtgtctattctctttaaatacagctcctaatcctgggttctaagggtctactaaatggtaccctttccctaagctaacctgcttctctacccccacaaccaccactccacaaacataccccaacctgcctttctcatcaaagttagccaggcctcagctctgggacttccggtctcttcgtacctaaaaagtgttttacctatattatttataaaatatcacagtggcactcatgaggtcggtattactggggaacttgattcagaaataaagttaaatttcagaaataaatattctaaaacacaatgatatttaaatgtgtttagccaacatgaatttataaaaacagggcaataatgtgttcttaggctgtaaacatgaacaaactataaattatccttttaagtttctttagaattgtcctctgaagatttggcagggaatgttttgtagatgataaaatagcaacgaatcaatgatgcttttcttacagagacatttatctttcctttggaaacccccacctgtgacatctagggccaacctactgctgtctgactgccctattcctgttctcttttttcttgcagttctactgttcattagctatatgaccttggaaaagacccaacctttaagtcttaattctgcatcctcagtgatactcataagctctaactcctagatactgctgcaagggttaaataaaataatatttgcagtagtcctaccacacagtaaatgctcatgaatattaatttctttcaccttctctgaaatgtaaaattattccagtaattgggtgagccagttatttggatactgataaaataacaagtctttgtctcttggagaaaataacattttgactgcataaactattcttaatagaaaggttgaattatcattcctctcaaaaatactggagaggaaagttactttccatagactgcatagaggaaaataacgaaacagtgcatttgttatagtgaacccctcaatgtgttgaaattcatacattgaattctaacccccgatgtgatgatatttgaacgtgggacttttgtgaggtaattaactcaaaagggtagagccttcatgagtaggattgtgcccttttaagaggccagagagttagctcgctcttttcctaccatgtgaggatacaggaggacggtatctgcaagccaggaaggaggccctcgccaaataccggatctgcctgcactgtgatcttggacttctcaggcaccaaaattgtgacaaatgtttgttgtttaagccacccagcctatggtaatttgttatagcagcttgaactaagatagggtttgagtgatagaattgtagaattcagcaacaggcaggtacaggggagtcttactgtcaaagcacacagtagcaaatggccaccatgttcataaacaaaaacattcattcattcactcactcatttattcaagaatgcatgtggaatctatagagccttactttctcttaaaataatgtaataaaaatgtcaaagctgcagtttttaaaaggaagcctcaggacagtgataaagttactaaaaatcccattttggggggagggattaccatggtttttagtaatgttgccacatttctcaagaaaacattttaatcctaaagatttaattttacaaccagtgcaacaatgtcataagcaatcctccaaattgaataacataactaacatttgaaatatagtcttcccggtcaacttctggcatgactgcataaagagctttgctacctcacttctcagtgaaactggtgaaaattctagaaaaatgactcagaccctctggaaatgatcctaagggcaaacagcaaaagaagaaacatcttttcaagaaagagatacaaaaat

SEQ ID NO: 921 - DNA, 4001 bp, Homo sapiens
ataagcaaacacactttgggtgtcaatgtctaccaacacacccccccagatgggactgcctagttgcagaaaaacaagctcaggggtcccactgattctactctatggtgagttgtattcatattacaatgtaataataatagaaataaagtccacaataaatgtaatgcaggtggggcatggtgattcacacctgtaatcccagcactttgggaggccaaggagaggatggcttgagctcaggagttcgagctcaggaatttgagaccagcctggttgacatggtgaaatcctgtctctactaaaaatacaaaaattagccagatgtggtgtcgcatgcctgtaagctactccggaggctgaggcacgagaattgcttgatccccagaggtggaggttgcagtgagccagtatcgtgccactgcactccagcctgggtgacccagcgagactcttgtctcaaaacaaataaataaaataaatgtaacgtgcttgaattatcccaacaccatcccccttcccccagtccatgaaaaacttattgtccatgaaaccggtccttggtgccaaaaaggttggggaccactgctttagggaacattccccctgggccaggtcctaagctggaagcagggggtgcaggtaaggcccatgctcgcaagttcctgatgctacctacagagctcccaccaacatctggccacccacaaaaacggctgctccctccaaagaattgactttcaccctaagttcatccatctaacctacttccaaggagggggcaaagtaaacagtagataaagcacaggcgttgatccaaaagaggagtccaaaacccggccctgacatgtactagtttgtggctttggctcccctccaaggctttctctatcctactgtgaaaagagataacaacacttatctttcccagttactgtaaggtttagaaataatgtatctaaagcacctaataagcacacagtctccttaaattaacattaattgaatctctcaggtcagagctgtccttatcaaacaatcacaattagggactgactggcaacgagaaaggagggagaaaaatcacagggaaaatggaacatgaggaatggaaggggaaaaaaatcattcctcaaagtctccttcaatgaactaccgcctcttcaatgaagccttccctctcctctccttgcattcccatagcacttaatcacattgaaataggtccttagctctgagaatgaatgagatgccaggcacggtggctcacgcctgtaatcccagcactttgggaggtcgaggtgggcagatcacccgaggtcaggaattcgagaccagcctggccaacacggtgagaccctcgtctctactaaaaatacaaaattaggtgggcgtggtggcgcatgcctgtaatcccagctactcaggaggcaaggctggagaatcgcttgaaaccgggatgctgaggttgcagtgagctgagattgtgccattgcactccagcctgggcgaccagagcgaaactccgcctcaaaaacacaaacaacaacaaaaacagaaagagaagcaatgtctcactcccacgtaatgcaaacctctgaggatgccaaatgccctagccctacaaccctgatccaagagcaatgtacacaggtagcagcacatttcttaacaccaatgctacccgtaaagtacctctggtgaggattagcgggagggtttttccgcataaagacctgccacctgaaggttagactcagaacagaggaagaaaactgagtcctgaagatagaacgcaaaggaagtctctaactttagagtccctggagtcacagcaggcaggcaggcgcaccgccgatactgccaagaggaccagagttcgcaactccccgcagcagttccggaagctggggacgaagccaaggagagaggacgtgggcagggccgtgcgcggacttgtcccggcgcctagatccccgcctttgcccgggcgcactgcgcgcgcggcccccgccgcttttgtcttcttcgcccgaccgggaacttcctctgtcccgccctcgggcgcgcacacgggaacttgggtaggaaacggaaagcgttttgtgcattttttttttaacagagtaaactgacgcagaaaattcagcatctaacctccccaggaccccctatggtcaccagttaccaacctccgggctgtcccgggcggcggcgacggcaacgttcacgcgcgccgcgagttcccaacacccctctttcggcacttccgagtcccagcgacatcggcggcggctgcgggcttccccgggacgccaccctctttcccccggagctgccctttggaggagcagcgcagcgcgcgtcctccgagcacgcccctgccgccgtgcccgcgcgccctccgcgcccggactcgggaacccgcggcgctctccgggcgatggcgagcaggccgtgctgctgcagggggcgggccagagcgcggcctgcgtttctgaaccgcgtttgccccgccggcggcccggggcccctagccccgctcacccctcggctgttggttcccactgaccctggcgtgcatatctctcccccacccgtgtgttcattgcaggtctggggctgcctgcaagttaattgcagagtggaagtcacctgaaactcgaggtgggccgtcattccaacaccagtggtccccacctacgttttgtaggcgaaaggaggtagttcggtgcggtggaaagagggtgggctttgcagccctggcagcttcgagggcttactgtgtgaacttagcccctgtgagcctccctgtacacctctgtaaaacagaaatagacttccctgcttttctttgtaaattagagtgaagatcaaatagaataaactttatgaattgtaaagcaacttacagagatcactactgcaaaatgggtacgaagattttgattgcgttgtgaaaagagtggaagatctgaagatgctccaacggggtataattgggacgatgttgctgctcggaggcctccaagcctgagccaagagacaggcttgccagagttctccagacttatctcagcagaatcacgtggctctcattaaaacctcgggcttctggatccctccccaaaccaaaagcatcagactgtccatggcaggggcgtctcaggtggttctatgataaggtgaaggtggataactctgccctaggcagcagggaaactcggaagctgtgctctcagaaatttcatctagcagtcattgtaatggtcgagaggattattttaatgattttagaattctccaggaaaccagagtatgaactctccaagagctggagctatcttttctttctgcttccccccaacccactcaccccaaaacctggtactggatggtgttcagtaagcaggtgttagtaaactagccccaaataggagtgccagatttagcaaataaaaatacagcatactcaattaaaattgaatttcaggctgggcgcggtggcccacgcctgtaatctcagcactttaggagcggtagcaggaggatcacttgaggccaggagtttgagaccagcctggccaacatggtgagaccccgtctctactaaaaatacaaaaattagccgggtgtggtggcctgcacctgtaatcccagccacttgggaggctgaggcacgagaatcgcttgaacccgggcggcagaggttgcagtgagctcagatcgcaccactgcactccaacctgggtgactgagccggactctgtctcaaaaaaataagtaaataatttcaggtgaacaatatgtaactttttagtatcactatgacccatgcaatatttgggatatacttattttttttaagtacttacaggaagcttgtaatcccagcactttgggaggtcgaggtgagtagataacttgaatccaggagttcgagaccagcctggccaacatgatgaaactccatctctaccaaaaaaaaaaaaaaaaaatgg

SEQ ID NO: 922 - DNA, 4001 bp, Homo sapiens
attagggactgactggcaacgagaaaggagggagaaaaatcacagggaaaatggaacatgaggaatggaaggggaaaaaaatcattcctcaaagtctccttcaatgaactaccgcctcttcaatgaagccttccctctcctctccttgcattcccatagcacttaatcacattgaaataggtccttagctctgagaatgaatgagatgccaggcacggtggctcacgcctgtaatcccagcactttgggaggtcgaggtgggcagatcacccgaggtcaggaattcgagaccagcctggccaacacggtgagaccctcgtctctactaaaaatacaaaattaggtgggcgtggtggcgcatgcctgtaatcccagctactcaggaggcaaggctggagaatcgcttgaaaccgggatgctgaggttgcagtgagctgagattgtgccattgcactccagcctgggcgaccagagcgaaactccgcctcaaaaacacaaacaacaacaaaaacagaaagagaagcaatgtctcactcccacgtaatgcaaacctctgaggatgccaaatgccctagccctacaaccctgatccaagagcaatgtacacaggtagcagcacatttcttaacaccaatgctacccgtaaagtacctctggtgaggattagcgggagggtttttccgcataaagacctgccacctgaaggttagactcagaacagaggaagaaaactgagtcctgaagatagaacgcaaaggaagtctctaactttagagtccctggagtcacagcaggcaggcaggcgcaccgccgatactgccaagaggaccagagttcgcaactccccgcagcagttccggaagctggggacgaagccaaggagagaggacgtgggcagggccgtgcgcggacttgtcccggcgcctagatccccgcctttgcccgggcgcactgcgcgcgcggcccccgccgcttttgtcttcttcgcccgaccgggaacttcctctgtcccgccctcgggcgcgcacacgggaacttgggtaggaaacggaaagcgttttgtgcattttttttttaacagagtaaactgacgcagaaaattcagcatctaacctccccaggaccccctatggtcaccagttaccaacctccgggctgtcccgggcggcggcgacggcaacgttcacgcgcgccgcgagttcccaacacccctctttcggcacttccgagtcccagcgacatcggcggcggctgcgggcttccccgggacgccaccctctttcccccggagctgccctttggaggagcagcgcagcgcgcgtcctccgagcacgcccctgccgccgtgcccgcgcgccctccgcgcccggactcgggaacccgcggcgctctccgggcgatggcgagcaggccgtgctgctgcagggggcgggccagagcgcggcctgcgtttctgaaccgcgtttgccccgccggcggcccggggcccctagccccgctcacccctcggctgttggttcccactgaccctggcgtgcatatctctcccccacccgtgtgttcattgcaggtctggggctgcctgcaagttaattgcagagtggaagtcacctgaaactcgaggtgggccgtcattccaacaccagtggtccccacctacgttttgtaggcgaaaggaggtagttcggtgcggtggaaagagggtgggctttgcagccctggcagcttcgagggcttactgtgtgaacttagcccctgtgagcctccctgtacacctctgtaaaacagaaatagacttccctgcttttctttgtaaattagagtgaagatcaaatagaataaactttatgaattgtaaagcaacttacagagatcactactgcaaaatgggtacgaagattttgattgcgttgtgaaaagagtggaagatctgaagatgctccaacggggtataattgggacgatgttgctgctcggaggcctccaagcctgagccaagagacaggcttgccagagttctccagacttatctcagcagaatcacgtggctctcattaaaacctcgggcttctggatccctccccaaaccaaaagcatcagactgtccatggcaggggcgtctcaggtggttctatgataaggtgaaggtggataactctgccctaggcagcagggaaactcggaagctgtgctctcagaaatttcatctagcagtcattgtaatggtcgagaggattattttaatgattttagaattctccaggaaaccagagtatgaactctccaagagctggagctatcttttctttctgcttccccccaacccactcaccccaaaacctggtactggatggtgttcagtaagcaggtgttagtaaactagccccaaataggagtgccagatttagcaaataaaaatacagcatactcaattaaaattgaatttcaggctgggcgcggtggcccacgcctgtaatctcagcactttaggagcggtagcaggaggatcacttgaggccaggagtttgagaccagcctggccaacatggtgagaccccgtctctactaaaaatacaaaaattagccgggtgtggtggcctgcacctgtaatcccagccacttgggaggctgaggcacgagaatcgcttgaacccgggcggcagaggttgcagtgagctcagatcgcaccactgcactccaacctgggtgactgagccggactctgtctcaaaaaaataagtaaataatttcaggtgaacaatatgtaactttttagtatcactatgacccatgcaatatttgggatatacttattttttttaagtacttacaggaagcttgtaatcccagcactttgggaggtcgaggtgagtagataacttgaatccaggagttcgagaccagcctggccaacatgatgaaactccatctctaccaaaaaaaaaaaaaaaaaatggtatatctgaaattcaaatttacatcctgggtatctgaaaatcaaacttaactgggtattttatctgtcaactctagatccaagggtttggcagagggagtggcagaataagaactcaactcaggtagtgtcaaactcagggacagggatgtgataacagctcctatattatttctaaaagatgctgttgttaatataggttcagtgtgatttacacttaacccctgtctacatatgcactttaaattcaccggcgaacacaaaggagataaaggcagatttaaacacaggcaatcagaaacatcaaataaaaatagccaaaatttatgtgtgtgtgtatatatatatatatatatatatatatatatatgtatgtattagagacagtctcactgtgtcacccaggctaagcacagtggcatgatctcagctcactgcagattcaagcaattcttgtgccttagccacctgagtggctgggattacaggcaagcaccagccaccacacctggctatttagtagagacagggttttgccttgttggccaggctggtctcgaactcctggcctcaagtgatgcacctgcctcagcctcccaaagtgctgggattacaggtgtgagccaccatgcttggccataatagccaaaatttaaagataagcaatagactgggatatttgcaagaaatttgcaaagtgttaattttaaaattatatatagagttaatacaatcaataagaaaacattagaaatcaattatagatgagcaagacacatttatagacaacccactagaaaaaggaggagggaaataaaagtaggaaacaaaaatatattgcaaaaagctcaatgaaatgcatagtaaaacaagaacatggtggctcacgcctgtaatcccagcactttgggaggccaaggtgggtggatcacgaagtcaggagatcaagaccatcctggctaacgtggtgaaaccccgtctctactaaaaatacaaaaacaaaattagccaggcatcgtggcgggtgtctgtagtcccagctact

SEQ ID NO: 923 - DNA, 4001 bp, Homo sapiens
gtggaggttgcagtgagccagtatcgtgccactgcactccagcctgggtgacccagcgagactcttgtctcaaaacaaataaataaaataaatgtaacgtgcttgaattatcccaacaccatcccccttcccccagtccatgaaaaacttattgtccatgaaaccggtccttggtgccaaaaaggttggggaccactgctttagggaacattccccctgggccaggtcctaagctggaagcagggggtgcaggtaaggcccatgctcgcaagttcctgatgctacctacagagctcccaccaacatctggccacccacaaaaacggctgctccctccaaagaattgactttcaccctaagttcatccatctaacctacttccaaggagggggcaaagtaaacagtagataaagcacaggcgttgatccaaaagaggagtccaaaacccggccctgacatgtactagtttgtggctttggctcccctccaaggctttctctatcctactgtgaaaagagataacaacacttatctttcccagttactgtaaggtttagaaataatgtatctaaagcacctaataagcacacagtctccttaaattaacattaattgaatctctcaggtcagagctgtccttatcaaacaatcacaattagggactgactggcaacgagaaaggagggagaaaaatcacagggaaaatggaacatgaggaatggaaggggaaaaaaatcattcctcaaagtctccttcaatgaactaccgcctcttcaatgaagccttccctctcctctccttgcattcccatagcacttaatcacattgaaataggtccttagctctgagaatgaatgagatgccaggcacggtggctcacgcctgtaatcccagcactttgggaggtcgaggtgggcagatcacccgaggtcaggaattcgagaccagcctggccaacacggtgagaccctcgtctctactaaaaatacaaaattaggtgggcgtggtggcgcatgcctgtaatcccagctactcaggaggcaaggctggagaatcgcttgaaaccgggatgctgaggttgcagtgagctgagattgtgccattgcactccagcctgggcgaccagagcgaaactccgcctcaaaaacacaaacaacaacaaaaacagaaagagaagcaatgtctcactcccacgtaatgcaaacctctgaggatgccaaatgccctagccctacaaccctgatccaagagcaatgtacacaggtagcagcacatttcttaacaccaatgctacccgtaaagtacctctggtgaggattagcgggagggtttttccgcataaagacctgccacctgaaggttagactcagaacagaggaagaaaactgagtcctgaagatagaacgcaaaggaagtctctaactttagagtccctggagtcacagcaggcaggcaggcgcaccgccgatactgccaagaggaccagagttcgcaactccccgcagcagttccggaagctggggacgaagccaaggagagaggacgtgggcagggccgtgcgcggacttgtcccggcgcctagatccccgcctttgcccgggcgcactgcgcgcgcggcccccgccgcttttgtcttcttcgcccgaccgggaacttcctctgtcccgccctcgggcgcgcacacgggaacttgggtaggaaacggaaagcgttttgtgcattttttttttaacagagtaaactgacgcagaaaattcagcatctaacctccccaggaccccctatggtcaccagttaccaacctccgggctgtcccgggcggcggcgacggcaacgttcacgcgcgccgcgagttcccaacacccctctttcggcacttccgagtcccagcgacatcggcggcggctgcgggcttccccgggacgccaccctctttcccccggagctgccctttggaggagcagcgcagcgcgcgtcctccgagcacgcccctgccgccgtgcccgcgcgccctccgcgcccggactcgggaacccgcggcgctctccgggcgatggcgagcaggccgtgctgctgcagggggcgggccagagcgcggcctgcgtttctgaaccgcgtttgccccgccggcggcccggggcccctagccccgctcacccctcggctgttggttcccactgaccctggcgtgcatatctctcccccacccgtgtgttcattgcaggtctggggctgcctgcaagttaattgcagagtggaagtcacctgaaactcgaggtgggccgtcattccaacaccagtggtccccacctacgttttgtaggcgaaaggaggtagttcggtgcggtggaaagagggtgggctttgcagccctggcagcttcgagggcttactgtgtgaacttagcccctgtgagcctccctgtacacctctgtaaaacagaaatagacttccctgcttttctttgtaaattagagtgaagatcaaatagaataaactttatgaattgtaaagcaacttacagagatcactactgcaaaatgggtacgaagattttgattgcgttgtgaaaagagtggaagatctgaagatgctccaacggggtataattgggacgatgttgctgctcggaggcctccaagcctgagccaagagacaggcttgccagagttctccagacttatctcagcagaatcacgtggctctcattaaaacctcgggcttctggatccctccccaaaccaaaagcatcagactgtccatggcaggggcgtctcaggtggttctatgataaggtgaaggtggataactctgccctaggcagcagggaaactcggaagctgtgctctcagaaatttcatctagcagtcattgtaatggtcgagaggattattttaatgattttagaattctccaggaaaccagagtatgaactctccaagagctggagctatcttttctttctgcttccccccaacccactcaccccaaaacctggtactggatggtgttcagtaagcaggtgttagtaaactagccccaaataggagtgccagatttagcaaataaaaatacagcatactcaattaaaattgaatttcaggctgggcgcggtggcccacgcctgtaatctcagcactttaggagcggtagcaggaggatcacttgaggccaggagtttgagaccagcctggccaacatggtgagaccccgtctctactaaaaatacaaaaattagccgggtgtggtggcctgcacctgtaatcccagccacttgggaggctgaggcacgagaatcgcttgaacccgggcggcagaggttgcagtgagctcagatcgcaccactgcactccaacctgggtgactgagccggactctgtctcaaaaaaataagtaaataatttcaggtgaacaatatgtaactttttagtatcactatgacccatgcaatatttgggatatacttattttttttaagtacttacaggaagcttgtaatcccagcactttgggaggtcgaggtgagtagataacttgaatccaggagttcgagaccagcctggccaacatgatgaaactccatctctaccaaaaaaaaaaaaaaaaaatggtatatctgaaattcaaatttacatcctgggtatctgaaaatcaaacttaactgggtattttatctgtcaactctagatccaagggtttggcagagggagtggcagaataagaactcaactcaggtagtgtcaaactcagggacagggatgtgataacagctcctatattatttctaaaagatgctgttgttaatataggttcagtgtgatttacacttaacccctgtctacatatgcactttaaattcaccggcgaacacaaaggagataaaggcagatttaaacacaggcaatcagaaacatcaaataaaaatagccaaaatttatgtgtgtgtgtatatatatatatatatatatatatatatatatgtatgtattagagacagtctc

SEQ ID NO: 924 - DNA, 4001 bp, Homo sapiens
gtcttacgtgccaggcaccgttctctacattgattgggatgcagcagtgagcgaaatgcacaaagtctctcttccaatggagcatatagtttggggagctcagaaaaccgttaagtaaacaagccagtgctgctgtaactatactttagcacggtgtgatcaaaaggcacaaaacttggagcctgagcatctggctctgtgccccaggattgttttaccttgggtaagtcatctaaactcttgagccctcatcagtaaaatgaggatcataacaactgcctgcagaatcattgctgggtacacactacatacgttggggaagaaagaggaccttataaatgtgaataaataaacacgtgtaggactgtttggctgaaattgttcttattcctcaaatccctaaaacaacagagctgctgactttgactttctgaaacctcatgcaagagggaagggtcaggggtataaatttttaccagggatgatctcagaaataaacattctcagtgctgcttgtaaaagctcagcttctaccctaatgggaatcctagagttaattctccaggaaacagctgtggagtggtgtctaagaggacagccccaggcggtgccacccaggtggctgactttctgggccaggctcagctgtaattctctcctggactctgggaagctcggttaaccacttcacgccctatgtgggagttacagtggtctgcaggctcaggaacagtggcgccaggagtcatgaacagatgcctgtggatagccaagtcattgtgctgacaagcccagggggtctcagttcaaaaggctgcctggacttcttgcctctcctccccaacatcattagaggggtcctccccaggcagcctcttttatcagctttccaaatgctgacctctccccattaacccccaaacaccctcttcctacaaagtctgtgtgtgcagcctacacccgtcttgttttcaggctgagctcaatcaaaacgatgcctcccaggcatgtggattttggctgttgggcaaccaggagaagcagaaactctgtgagtcactgctactcagcagcttgcatctctctcttccagctctggagtgctgggcagacagaactctggagagagtctccaacccctgccaccgccagggtgacgccagagatgccctggcacaaatcacccagatgaaaaggactggaccccagcagatgccaccactccctcccttaacgcgctcggtaaattccacgggtttaagtgcctagctctctgagcaccgcagaggatgcaaataattatttgccatgcaccacagagggagtgtggcaaataatggctgctctgagagctccaggaagagtgtccctctcattctcctggagcctggagaagaatcagggccagcagaatcccagagggagagctttggggaacccatggagaccaaattcagcacacactcatgtcagtgtgcgtgtccaaagccggcagctccaagatgaggcacccggcacatgaacttctaaagggctgggctcccaaagcaccctccgctcaggacccacaccatgcagcccagcacccaaacccctggggctggaaggcacttttcactacctggcaaaggatgtctttaatgtaatctccacacagctcatgtctcttcagatcaaaatattccatgatgtcccagtaccgggcagcgatgcggcggtccttgtgctgatcacagcagccgaaggactcatagtcagagcaaaactcaaggtgcagagggggctggaaagggggcccgtaatccaggcactgggggtgtccctgcagcaagcccacctggcccaacaagaatatgaggcagaggcagagaatgccagaagagagccagggggcccggcaatgcagaccaccacacagattaggagtggacgttctcagcattttggccttgggaacactcgggctgctgtgtttgctcaggttggcttccctgctctgcccaaggtcctccctctcttcctccccctactccaccctgttttctcctccttcctcctcttccccgcccctccctgctgaggtagtttctgagcagtgtcccttctgtgggctccctttgaaagcagtgggaggtgtcccttcccccctcccccaacccatctaaacatgaagccccactctagtgctgctagtgttatgggggcacacctttgcttagccaaaagtgtagtggtgtcaatggcagaggtgctcgattccttaaaactgcaaagaattcctgctgtctgtggggatgcccggaaattcacacttttttatgtttcttcacaggctgagaggcccagagtcaccatgagagcaccatatattacatcatcccagacttcacactctgtagaaggaaagcttcaagcgtttctacagtgctgaagggccccaaggcggtgggagatatggaggggccatggcaggaggcagggtgtgctgtatagctcctgggatctggcaaggtgtatatttggaagggtaggaagagagggcatttcatgaatcttgcatccacagtaaggaccaaggagaggaaggaggacacagtgaaggaaaagaaggggaatcttagtccatgctgctgtaacaaaacaccacagactgtaattataaataatagaaatgtattggtcacagttctggaggctgggaagtccaagatcaagatggcagtaggggctgggcatggtggttcatgcatgtaatcccagcactgcgggagcctgaggcaggaggattacttgagcccaggaggttgagaccaaactgggcaatgctgtgagaccccgtctctacaaatataaaaagaaaattaaccagccatggtggtgcacacctgtagttccagctacttgggaagctgagtcaggaggattgcttgagcccaggagtttgaggctgcagtcagctatgatcacgccactgcactccagcctgggcaacagagcaagaccatctctaaaaataaaaaaaaataagagatgccaacaggttcagtgtccgacgagggctctgttcctcattgatggtgacttgttgctcccatggtgggacaggatggttcaaatccactccttcaagaccttttataaagaccctaatcctatccatgaggcctctgccttcatgacctaatcacctcccaaaggctccacttcttaatactatcacattggcgattacattccaatctatgaatctgaggtagggagggacacattcagaccatagaagagggaggtggtccagtgaaaacaaggaatcaacaaggactgtttgggacaatttcctcaggaagcacaggacaactgggtgccttcctttgccaaatctatacctgctgtagggacactcctcctcacttagtatatgttcccacattagtattttaaaaatgtgttttgtggccgggcacagtggctcatgcctgaaatcccagcactttgggaggccgaggcgggtgaatcacctgaggtccggagttcaagaccagcctggccaacatggtgaaattccatctttcctaaaaatacaagaattagcggccaggtgtggtagctcacacctgtaatcccagcactttgggaggccaaggcgggcggatcacaaggtcaggagttcaagaccagcctggccagcatggcgaaaccccgtttctactaaaaatacaaaaaattagctgggcatggtggcgcatgcctgtagtcccagctactcaggaggctgaggcaggataattgcttgaacccagcaggcgaaggttgcagtgagccgagatcatgccactgcattccagcctgggtgacagagcaagactccatctcaaaaaaaaaaaaaattagctgggtgtggtggcgggcgcctgtaatcccagctacttgggaggctgaggcaggagaatcgcttgaacccagaaggcagaggttgcagtgagctgagactgtgccattgc

SEQ ID NO: 925 - DNA, 4001 bp, Homo sapiens
agtcactgaattttctataaaggtgattgcattatgctattccctgtttaaagatctctaaaaagactattcctttttttttttggacagagtctcactctgtccccaggctggagtgcaggggcacaatctcagctcactgcagcccccgcctcctgggttcaagcgattcttctgcctcagcctctcgagtagctgcgagtacgggcacaagccaccacgcccagctaatttttgtatttttagtaaagacagggtttcaccatattggccaggctggtctcgaactcctgacctcgtgatctgcccgcctcagcctcccaaagtgctggaattacaggcataagccaccgcgcccggccaagtgtaaacttttaagatgacatacaaagccctgcatgacctggcccttcctctctctctagccttactgtcagatttgactgtaccacattctagcattgaagtattgggcaagttttttttaactgtcaagtgaggatactaatgctaatcagggggagataacagcatataaagtgccaagcatactgcctggcttagcgttaacaataaatattggctattgtggaagaagcaaacattattgcatgtattttttcagtctctactgctgtctcaagaggatgctttgaactgttgattgggtaatgttttaacataaacggaactctccactccaccgaaaaagaaagaagaggaagaaacagatttatctgaacagactgagaagaaaattggaggtgaaaagttgagtgactggggaggattaagagaggcccatcgagttgtttgtttgcggagatgagttagcagtagtataaactttaagaaagaagagatctggccgggcgcagtggctcatgcctgtaatcccagcactttgggaggctgaggctggcggatcactgaggtcaggggttcaagaccagcctggccaacacggtgaaaccccgtctctactaaaaatacaacaattagcttggtgtggtggcgcaggcctataatcccagctactctggaggctgaggcaggagaatcgcttggacctgggaggtggaggtcgcagtgagccgagattgcaccactgcactctagcctggactacagagactctgtcaaaaaaacaaaaaaacaaaaaaaagagagagagatctgaagtatttgctctcagaacatagggggactttggagagttaaatgggtgaagatctttaggatgttttgctaagccccctccttacgtcctcagtggccagctttagttactttgttaaagttttatggttggcagatttacgtttcttcagagtttgacactaggttgaggttggccatgaactaatacaattatatttcagttacacgattctttgccctccttgagtgtccccaccctcatatatgttaactctgacatctgcccgaaattcattcatctaataaatatttgagtggcctcccctctttccgattgctggacagcccatcattttccaaagtcagcacctaaactcttctatgactttcctgacaactcaacactaaaattcgtccctcccttttttgtgtgcaacccacctccccgcctccgcttttaattgtttggccttcattcctcttctacagtgctccctgcaatcagtactggtgctgtacatatttgctagcttcgtacatacggcacgaagtagatgctcagtaaatgttggttgactgagtatcctctgcatctcggtgacatcacatcctgcgtgccgtggcgtcattctgcattcctctgcgggaggctcagatccggagggtttaagtggttgtttataacatgcaccgaacatatccaacggaggctgtggtttccgaccgcccacaaaaagcgcggttggcgggagtgcgggttcggggtcggctggcagctgggagactccagctctgggcggaaacacactgcctcggaggcgccggcgcctagtgattctgggaatagaaggtgcgagggagggagcgggtggctcacttatcgcggtgttttctctctcttcactcctgggggagctctcgcgagaggagcaagaggaagatggccgtgccctgtttttcggtgtaaggcagcgacggcggctgcgacggcgagactgagatcctggtgtcgtgggcacctgagttctagcttcccccagcgagcgcgcgtcccttcgtgcctaggcgagagccggctcttccccgggagatgcgtttgtcccaggctcgggggctcagtgggagttcatgctgcgctggaggctcttggccaccgctctaatcgccttgtgccgccgcagcgccagctccgtcgccagcggtgagcctcccgattcccccccttgcccctggcggcggcgatgaccggggagaagatccgctcactgcggagggaccacaagcccagcaaagaagaaggggacctgctggagcccggggatgaggaagcggcggctgccctcggcggtacctttaccagaagcaggattggcaagggcggcaaagcttgtcataagatcttcagtaaccatcaccaccggctacagctgaaggcagctccggcctcctccaatccccccggcgccccggctctgccgctgcacaattcctccgtgactgccaactcccagtccccggcccttctggccggcaccaaccccgttgctgtcgtcgcggatggaggcagttgccccgcacactacccggtgcacgagtgcgtcttcaagggggatgtgaggagactctcctctctcatccgcacgcacaatatcgggcagaaagataatcacggtgaggagtgctagcccctctccacctctctccttccccgagcctagggtgtgcctccccaggcttctggaatcctaggccccctccagcagactcttctttttgcccatcatccgggccgttcggtaaatcatgatcgactcagtaatagcgtgccagtggtcaaggggttggttcttgtgggtgcaaaggaatgtatcctccttgcccacttcaaagtttgtcgtgagaagctgttttgtttgagacaggccttcgatttgctgattctggactgtcagaaattttaggttgcctcccacccaacatggttttctccctttgtttatggagctatatatctttatttctctctcttccccctaccttggcattttaaattttgaacgcataaattgccctcctcccttcattgctcacatacagatcccatcttgactgcaactggttgtgattttgcctgccaccaggttgtttcttttttgtctgctttcagtaaacttagaatgttagatttctgaaagccacacagtagaaatttgttggtatttgatacgtagaacagttaaagtgacttctcaacagccgatttttgtttgagtagagatttgattttttgcttgttttaagtagataattgctaatagtaatgtctcatcttgatgactgtgactaaaaatagtattatgatttttatggtaattttatcttagtcaatattgaccatttctttttgccttgtcagctgaattttttgtttaattctaaaaaataatgtgactgagttgacttttaagcaacagtaaatttattattgaagactaatgtgaacactgacattttaacatttaatagccgttttaaactgggtagttggcaaatattgttgatcgctctgctattaatatgaaaattgtatacattcagttagaacacactgaaccaactttgtgctcaaaatgatatacgtatcaatgaaatatttgcctgtgaaataagctcacttaattccattggatcgtaggctttttaggacaaaaattcagataaaaaaaacgagtaagatttctcttggctgtataattatctaacaactgcatttgttttcagaatttacaatgttgtaattgtaataaaatcaccacctatcatttatcataaatccccaa

SEQ ID NO: 926 - DNA, 4001 bp, Homo sapiens
tagtacaaaatagaagtgtttttatcactttaaaattcacatactaggccctgtgggatccaaacatacaaaacaaagccccttttctaaaggagtgcccagtgctcttagaatagagaatgaaatattaagtgtataaagatgagaaatgataatagcccccatgttcacagccctcaagaaaagtcttcatttgttctatgtgaaacctattgctggtgcaaacattttattttgtgtcccaaagcaggctaagaattaattacaaccttaataataggacaagaaagtttaaaaacgatcttttccaaaactcacaggatttggaaagaaagcatctgctgtaaagcaaatcaaacaaaaccccaaagaaaggtaataaaactgaactttccaaggaaaaggaagctgtgtttcttaatcagtttcattcttacattttgtaaaaaatactgatcttaaatatcacttggtcttacaaaatacaatctttcattgccactattttgtagattttatgaagaatgtaaaatattgtctctttctaaaggtagacaaaggcaacagtatttttctccccacatagttcttacctacttggtcaaaagagctatgactcttcataaccgatctaatcaaagtaatgttttaattaatcaagttcaataaaaagaacttgaggaatttgtttctttttttcaataaatgtcaaagctataacatataataaacgttaaactaaaaatatattccaaagtcattacatatgtctcaagttttctaaactttggcatattgactgggccgtgttctgaaatgtcataaaattttgtcacgtttttcaactgaattcagcaaatcctcaatggtggcctacttacacatttactactgtgctagcagttgatcgcggctccaataagatataaacagaaatggaattaatggtacaatttctgcacacttcaggtaagtgaaacatatatatcacctttccattctatttcagaacgcggtatcagcggatgcaacaaagaccacacagtgtagcaacggagaaatgttagcataaaacagttttgttttgttttgtttttcaattaaaaatcctacgtccccagctggttaactacacactgcataaagtttactgtgatgacaactgtttctaaaaagcaaacctttcttcccttcaaagtgtcctcctccgatccttaggccatgactgattctaatacttttgatcttaagacacacagtgatgacttttctttgaaaactagcaggttcgaatgtaggccccaggtgtctgccgtcatgcttccgactccgggaagtgagggaagcccatctccggtcagggtttactgtaagcagcccagagccggagcaccgacgcagagagacgtggaaacagaaagcgaacgtactacggggccgcagcgggatccccgcgccagacgccaccccgttagcaacatatgggagagcagggatggttcccagccccttgacaagcgcggcgacggctccgcggggcctggcggcgaaggcgaggcgaggctgcggcgacgaggggcgcggcgggcgggccgccgggggagccccgcacattcctccccgcggcggaggcgcacgtggggttcgaggccgcagggcctgcagaggcggccagagcagagggcggcaggtgcgggaaagaaagaggacgggccccggaggccgcaagcccgagcagcggaggacgattcccggagcggcggcatgcgggtccgcgaccccgaggcaccggcagctcggacagggtgggggaagggagggaggcaccgggacgcctagagacggcagtgtgggggtctgaaggagagaccggatgggggccccgagggacgctcgccggcgcggaactcagctcaccgtgcctccgtccttaatgatgatcttcttggccagcatgatactgcggttcgcggcccgtttcttcttcttcccctgggtcattttaccatcctcgattcctggcgctgctgcagccactcccggggcggcaggccccagcagctagtgccgtcccaccactactgccgggccgagccgctctgggcgcccgccgccatcttgagggcccggcctgcctccggcggcgcgtcacaatcgtgcgatcagccgacgagcgggccccgcccctcccgcgtgataccgccccgcccgctcgccgccagcccactctacagtagccgcgcggccagggtaaccgcgggctcgcgtgggtgctgctggctacctgtacaacttcgtgctccggcgtcaccagctagctaaatcctcgcaacggttctgggcgataggggccgtttttgtcccccttcttcagcagatgagggaatttgtttcaaaaagttgttacctgctcacggaaacagacgtcctaagctattaacacaatctccagctgtgttctaaccaagacaggaaccgaagggaacagtaaaaaatcattttccgtaagtaatgggtaacttaagagataatgtagtgtttcagaaacagtcttgtccttttggtgttcagggacccccgctagaactcagctggctcacgcttgtttacctccctagacccaggaccttttttattccctgccaaaaaaaataccttacctgaccgatgtcaccctttgtggccctctacgtttttactgtattgtttaaaaataaatttgatgggaacattgctagaaagggcaatttacacaagtggaagtggactttaaagtatcacaatgttaaaattagatattgataactaccgtgttgtataatagaatatccttttccttaagagaaaaacacgagggatagggatacaccgcatgctccctactctcagatggttagggagtaacatgtatgtgtatgtatatgtaggtggggaaaagagagggacaaagcaaaatggcgaatgtttaaaagtactgaaactaggtatggtagttctaagatatgttcacagattcaatgatattcctccctggaagaggtggactctaattcccctccccttgagtgtagactaggcttagtgactcttgatagatcaaaacagaagtgacagtattgacttcagaggctaggtcataaaaggcactgcatcttcctttgcgggtctctttttcattcattttggggcttggagcctggggaagcctgcttccgtgttttcaggacactcaagcagcctatggagagatccagttgtccaggaactgtttgtagcctcctaccaaatgccacggagtgagtcactttggaagtagatcctccaaccttggtcaagcctttggctgactacaacttcatgagagacccagaggtaggaccacctagcttagccactcctggaatcctgactcagaaacagtgtaagatgaaaagtacttggtgtaagccactaagctttggggttatttgttacacagctataaataactaatatatagggtaaaaggaaaaacagtaaatgaatgtatgagttctttgtactgtttttgcaacttttctgtaagtttgaaattatttccaaataaaatgttaaaaagtaaatttgattgaatttccttttccttgtattttcatactgactaaaaatggaaaaaaaaactaatttccatggaagggagaagaaaagcaatttatagcctgatagatacttctaattatattttccaatcaataagtatattcattatacttgttttgaaacatatattctcattttgaaactttttttattatttattttttgagacagagttttgctcttgttgcccaggctgcagtgcaatagtgccaacttggctcactgcaacttccagctcccaggttcaagtgattctcctgcctcagcctcccgagtagctgggattacaggtccccactaccatgcctggctaattttttttgtatttttagtagagatggaatttcaccgtgttggccagg

SEQ ID NO: 927 - DNA, 4001 bp, Homo sapiens
aatgccacccttcatcataacagtattataacacagaaccctgagataattacatgtaaagatccaaaatcaccagctgaataatgaaaattaggtcaaatgatttgttagattttaaaatgttttatagaaagctttaggcttccatatgaaaaaagctagtaatagtttgcattctctataatcttacaaaaaaaaaaaaaaaacccacagaccagagatcaaaaatagctttacacaaacaaaaggaaaattgtaggtttgctgagggcatcagccacttaatttaaccctatttcatcaagagcgggaagccacactgctgttttcaccagttactaagaaacaagataaaggacagattgggacagagagtctatagctgaaagtattatgttgatgcaattactgagaattcccaaagtgtcactaatagacaagaaagagcatctaggactgcctctaaatgagtctacctacaacagaatcagtgattaagtaaagaaaagacttactggagcttgggggttttccccccctcttccctacccgcatcctcccatcctgaacccccctccccaagtaggaaagaaagctcgcccagcataaacacaggccattgctcacagctcgtcaccacaacaaactggaggttagaccaacgctcctggagacggaactccacgtcttggttgctaagcacaaaaaggggactcttccccacagacctgtgaacagtgtgggccttaccagaattttggttgtttctccaccttccccctcccttttgtttttttaacgaaagctttgaaagtggtggcagcaaaagtttccctttgggccagacctctagatctcccttgtacagatatacattaggtgggctggtctcacgtagtctccaccgtcattacgaattacaagcctaacgactacagaacatcagcggagacgacagaaaagcttccacacccaccccactgtcgtcctctccaggcacggcttcctggtcccaaacagcacaaataacccaaaaccatggtgataagcggagctgtgaagtacacacgcacaagccacacactgggaacctgccacgacagccggggaaaaaaccggccgagtgaggagacgcaaggcggtcccctgtcacttaaggacaacacgcccaggcgagaagtggcaggaggcagggggagttgccccgaaaaccagcccggagcctccccaccttcctgggaaggcaatcccctcagcggcagtgagcggccgggccgcaagacgcggcgcccggtcccaggcaggggccctttgaggaaggcgcccccggcaggctgggcgctccaggagagccggcggccggcccggccccgcctcagggagctgaggggaagtcgctccccgccgaggacccctcctgcccgtccccactcaccgccggtgtgtctggttctcagccgcgagctggggctgccgtgaggaggcggcggaggagacgagatctggggccccgcagccgggtcatcataccccccgcgcgagccggcccgggccccggcccccgccccccggagccgtccccgcgcccgtcccgcagggggagcctcctcagcctccctcccgctccaccacccagccccttcccgccgccgccgccgccgcctcagccccgcgcgctcccgcctcggcctcctgctgccgtccggggctaccgccgggccccttgctccgcagccgccgttgtcgccagacccgacgaacggaatgccgagcggccgtccctcaacccggccggccccgcctcgccggaactattcacccgccccgcgccatgacacctactgaggcggaagtgcagctgaatggactctctaggacgatcgcatagtactgattgcagtaggagtcggtgggcctcgagtaggtgggcctccgtagggagccagcgtggatcgagtgcggggcctggacttcccgccccctccgcactgcagactctgcggtgatttaaaggtgcctggcggtggtacgggatccaactgtaaaatgtcatcccagctagtgtgacatcaccacagtttagtgtgacacccccagagcttgggcagtgtacgggacgacagtgcctagcagaggagcttcactgccggtgagggattacctcaggttaggctttaatgtttcgttgccgtctagagacgttctagcaatgtgacatctgtgtaccatatctggaagtctccctgtacgtcaagagccccttaggggagtctcccattgccgccgtgggaacctgtgtttacattacgaggagagagaatagctgtactctgaactcaaacgctcaaaacatgcagtgagcgaatgctagcataattttcttgcctctaccagaaggaaggctgggtatttaggaaacagaacgcgttgggcacaacattctgagaaaatggacacagaaaattaggttatcctaatagaaaagcagttgcatctcccaaagtcaagagattctgtaggacttccgatgtatctcctgctgtgtaaaatattcaggttcctgaagtgggggacatttttagggcaactgtaatttcttcattttttccatcccacaagtgctggaggcagcagtgatctgagctctagaaagtgactgtccgtcaccatcggtatttgcatatactctgtgaggagaagggcagttgtggctaagacaaaattctactatcaagttttgtttctcaaatctcactcattaacatctttgatttccttggatccccataacacacacagaaaactatgatttgtgtaaaatgcgctgaagtaccttttaagggaagtcatttggctttctctctggcttaacaacacggggagcagttccattttatctggaacagggaagtttatttccctagagaactagggttaccaaaaatgttcgatcccacaaggcagttttgtttgcatattttcacagaaacttccttctactacttaaagtcctcacattgggctgacctgggaaacatgaagataaaaagagtgggtaaacatgcctgcttgatgagccagaaaaaaaggcagaaacctgtggtctgggtagaacagatcctgctcagaatgtaagcttcaaacatgtttatcatgccttggttcaacctaactctctgacatgttcctaaactcctgctctctcaagttatgtccctttcctcttttcaaatatctctcagaattcaccctttcgggaacctttgctgattgactcctattttatttgaattctgcatcatcatctgattacttaaattaacctgtaccttctttatttatacttgttaacttctattttcattgctcttaggtcctcagtctttctcactatacggagagcttcttaaagtctgtattttctcctctttagtatcattcactcattcatccagcaaactgcttgtgtgcctgctctgtgctatacactcttctagacactgggtcaggtatgaatgagacaggtgaataaagcatggtcttttccctcagggaccttacagtctaatgaggaaaaaacgtgtgcagacatatataagataagtgagagagtcggagaagaacatcagaagtgatatttgagcatagtaaggtcaaagaagtttcaaagtttagtcatttgtccattcagtaactatttatagagcatcttctgtgtgctaggcactatataagaaattaaggggctgggtgtggtggctcatgcctgtaatcccagcacttcgggaggctgaggcaggtgaatcacctgaggtcaggagttcgagaccagcctggccaacatggtgaaaccccgtctctactaaaaatacaaacattagccaagtgtagtggcgcatgcctgtaatcccagctaccctggaggcttaagcagaagaaccgctggaacccaggagaagaaggctaccatgagccgagattgcaccattgcactccagcct

SEQ ID NO: 928 - DNA, 4001 bp, Homo sapiens
cattacagatctagcaaagtatcaaccttaatataaaataaaattcttttttttattatagaattgcaaacatactttagcctaagaagcaggaagagaaaattatactattctttaaaaagttctttagtagcaattggactactctttccctattatctaaatacttcagtagtacttagtacttctctttctccagaatctaattcacaagtaactatttgcattctatttccattcaaataaacacttttacctgatcatattctgaagcaccaggataaagaggccatcccaggaacagctcagctatcacacagcccagtgaccacatatcaatagcttcacaaaatggtaacccaagaataatttcaggagctctagcaaaaacaaaaaatatcagattaaaaaaaaaaaaacattatttgggaaaattaactacatgactaagtcctgttttagtattagctaaaggaacatttattcaatgaaatggaaaaaaaatctttggtatacaatccatcatctgaagctcagggccagatgtgttttggaattcagaatattttgaatttcagaaaggtaatgcagaacacaaagtacacattatataataatcccagtggagttcagggcagtgcactataatcaaacacattaatatttctgcaacaaaacatggaacagtcatactaagttggctaaataaagacttcaaatagcttaacaatggttcaagtcaggtcttgccaattaaatgaatttataccaaacttaaagaaaaattttcatttatgagagctttctgaattttgcaatcacagataagggataatagattttttttattattattcctagcaccatttcaatcataaaaaaaaaaaatcaattaaaaggcctggtcaactgggcacagtggctcatgcctgtaatcccagcactttgggaagccgaagcgggtggatcacctgaggtcagaagttcaagaccagcttggccaatatggtgaaaccccaaatctactaaaaatacaaaaatgagtcaggtgtggtggtgggcgcctgtaatcccagctactcaggaggttgagacaaaagaatcgcttgaacccaggaggtagaggttgcagtaagccaagatcacaccactacactccagcctaggagacccaagacagtccaaaaaaaaaaaaaaaaagccctggtcaataaataacccttcatgacagaaatgccttctggaaaaaaaaaaaagaaaaagaaatgccttctgaagagacatggtgttgacagcacactctctagagccagcctgtcagggtctgaatcctagttccatcatttaatagctgcaggtatattacttgatctctctgtgcctcaggttcctcatctataaaatggagacagtaagagttcccaccacatagagttgttgtgaagcttaaataaatatatgaaagcttttagaccagtgcatggcacatggtaaatactagtaggtgttagatataataacagtattatgttaccattattttaaaactttgaactcttagtgtgctttttagaaatattcattaacagtccaagtgagaaataaaatgctagggaactttaaagagatgactaaggtaatccataactcagacgtttatatatacgaacacatctaaaatagaattattatccccattacagaagaagaaactgagaaaaagaaagattaagttattggcctagagtcacagtcaaataagtggcagagctaggatttgaatccctgcaatctggctccagaattgagtatattatatattacactgtttctcaataagtaaaagtacatactcatctatgtaaatttatatttgacatggtggaatacaagggcaattgtcaaactatgactaattaggcaataagtgggttcaaaaagaaaataataggtaacactaatagcaataataataaatgacacataaatattgcctactatgtgccatgcactgttctaagttctttataaatgttgagtcacttaatccttacaacaatcctatcaaagtattattatgatgtcatcaattctaagatacacatctttttacatgttagcacctctgaaattaagaagattcttacaaatgatggtatattttagtttaatggcagcgcttttccttttttaagtggtacaaaaataatgtatcttataatcaatggcatgttagattctatgcaataaaagtattacctccattttacagatgaagaaactggcactaagaggttaaagtaacttgcccaaggctacataactactaaaagatggtgcccttggccagcgcagtggctcacacctgtaatcccagcactttgggaagccaaggtgagtggattgcttgaggtcacgagttcgagaacagcctggtcaacacggtgaaactccatctctactaaaaatacaaaaattagctgggcatggtggcgggcagctgtaatcccaactactcagaggctgaggcaagagaattacttaaacttgggaggcataagttgcaatgagttgagatctgccactgcactccagcctgggcgacagagcgagactccatctcaacaaaagaaaaaggatggtacccaagctatttggatccaagatttcagctcttaggcactggatcatcttctccaaataatttcctttctttcttacaagtcatggaattataatctataaggacactccagatccagatccagatccagattcagattcctcatgttacaggagttaaatggaaaacagatctttccgtgaagaaccatctaactggccgtgtctcctcacagaatacccaggtttctcaaactactttcaagtgatatgtgcttattgttgttttgtgtatatgtgcagggggttgagggaaggcaaggattaagcaaggagaatataatttccctaaataagaatatccctccccatctaagcaaactaggcatagaagaaaaaaaaaatcctcccctagtatttatacataaatagtggcccttagaaaacagtaaatctggggactccacagggcctgaaagcttttctgatccttaaatacaaatagcagtcgacccaggcctcttcgggcttacactttttaacagctatgggtggaaccaccaatatcatcagtttttgtagtatttaatttgaactgtggttttgtttaccaaagaaataactggccgggtgcggtggctcatgcctgtaatacaagcactttgggaggccgaggaggctggatcacctgaagtcaggagtttgagaccagcctggccaacatggtgaaaccccatctctactaaaaatataaaaaatcagccaggtgtggtggcgggcacctgtaatcccagctactcaggaggctgaggcaggagaattgcttgaacccaggagacggaggttgcagtgagctgacacagtgccactgcactccagcctgggtgacagagtaagactctgtctcaaaaaaaaaaaaaaaagaaaagaaaagaagtaaccctcaaaagtgatattcctgttgcaggtggctagaggcacatattactgatggaatttcagagttcagtgaaatctcaaccataatggcatgttttcaacactgcacaagtttgacaggcgcattaataagctagtaagactacccagaaacaacataaaagcttttctaaaattgaaaaggaacaaaattttctactcctagtgagcagaatcattaatttccaagttcatgacaatgccaaaaatagctggcagggggagcacaactggcaatgagccaaaataaaaactgggtttagaacattccaaagcatcaattggagggcagcatattgattttgctattcctaccatactagaaagacattttaaagtccaaaaggtaggtcacagagaatggccaggccactctataactttcttctttaaaaggtagc

SEQ ID NO: 929 - DNA, 4001 bp, Homo sapiens
ctgctatgtaacaagacaagtaaagcaagagagaaatatgtaattctaaaaatatacttggttaggatttaaatgttcctttactacatggtggaatattaatgcattttttataaaaactgaaaacaaatactagaaagataacattaaatttgtctttagtataatcaacagaagtgtctctgattaaaaataaatgtctgactttctgaaactttccgtactcacctgagccatgtcatctaagcaattaaaaatgtacttccgagcttcttttgattttattccagtctccagttcatgttcttcaggtgtctataaaataaagattttcctccttaaattccatctgtatgttattttcacattttattcaaaaccaaagccagaatacaagagacaagtgtggtcaccttgccaaccatagatggcaaacatgaaagtaattcacaaccagaaaatcttccagtggagagatgtgaccttgatatctagctaccctttcaacagtgataaacatgcaagtaatgatacagcacagttcctaaagaatgtcaggtaaaaggggacactaccattgttctcttaaagctactttcaaataaatcgatatctcaaatgctaactgttcaacagactcagacacacagtcacagggttagtcaaattactcagatatttctgaacctgacagagtaggctcagaagtaaaaagcaggtatttgtttcaagaaaaaatatagaagtcctgaatgtgggcagttagaaaatttgtgattttatcatgttcattgagaattctctaaaaatcagtcattactatatgtctctagttctatcgcttaatggtgagcactaccctccaaactttctatcagctgtggattgaacatatacaaaataacctcagccaactgaactagcaattaatgttttgtttttcaactgaggataaggccaaacaggtacaaagaaataatttttcaaaatgcttccccctctcctttcccttctctacctgaagaatttaataactaaactttgaattcaaaattggggagtgaggggtggagtacaggagtcggaagcatagtagggaagacagaccttaagcctccacagtgggtaccccaaattaggatctctgttgaaaaacctggttgtttttgttccggcactgagaagatattcagctggcaagccttgtgtttgtgaaatataacgaatctgaaacatcaaaaccatcaaacaactatttggagtgaaaagggaaattattaaaggcttttacactaaaacatcattaactttaggcaaaggaagaaatcaaatctttaatcaatacaactgaaatttatctgtaaatacctatatatactaatccatccacagctactgtatctattatttacaaggaaatccagttttgaaaattttggctataatcttttttgcttttcctgttgacttctaatacttcaaatctgtggaatctactacaactcagataacttcctttctaaatcctgtagctggaaaccaaaataccatgcagacattgtaaatgacaaggtagaagtgtatttacggacaagtaaagatatttgacaatataggccaggcatggtggctcacacctgtaatcccagtactttgggaggccaaggtaggaggatagcttgagcctgggagtttgagaccaccctaggctgatatagcaagatccccgactctacaaaaaataaaagaattagctaggcaaggtggcatgcacctatagtcccatctacctgggaggctgaggtgggaggatcacttaagcccaggagctagaggttacagtaagctgtgacaggcctacatgccagcctgggtgactgagcaagactctgtctctaaaaaaataaaaacttaaaaaccacaacaaaaaaactggtgtacttactgtgtaccagacacagtgttaggagctgaggatacactggtgatgtgaaacaatctctaccctcaaggagcttacatcataaagggcaggaacatttttaaaaaataagaagaaggccaggcacggtgactcacacctgtaatcccaacactttgggaggctgaggcaggtggatcacctgaagtcaggagttcgaaaccagcctggccaacatggtgaaaccccgtctctactaaaaaatacaaaaattagttggtcatggtggcaggcacctgtaatcccagctactcaggaggctgaggcaggagaatcgcttgaaccagggaggcagaggttgcagtgagccgagatcgcgccactgcactccagcctgggtgacagagcaagactccatctcaaacaaataaaaagaaaaaagaaaaaataacaagaaatgagaattcacaatttacttccatagtaaaacattttcccttaacggaccaattccttaggaaattataccatatctcctaaagtttgtctatttttagatacagatcatatattactacaactcagatgatttcctttctaaatcctatcttagcgacccagtatgtcacagcttctgggacctgaagtgtttcagtctgaagaaagtacttcagtgtgtcatgcgtaaaagtaaattataatagctccgagtaagtagaagttctcttttaaaattccagttcctcatctttactctactttcctaactcacaaagcacataagttaatgaaagttaagtctctaataaatcattacagatctagcaaagtatcaaccttaatataaaataaaattcttttttttattatagaattgcaaacatactttagcctaagaagcaggaagagaaaattatactattctttaaaaagttctttagtagcaattggactactctttccctattatctaaatacttcagtagtacttagtacttctctttctccagaatctaattcacaagtaactatttgcattctatttccattcaaataaacacttttacctgatcatattctgaagcaccaggataaagaggccatcccaggaacagctcagctatcacacagcccagtgaccacatatcaatagcttcacaaaatggtaacccaagaataatttcaggagctctagcaaaaacaaaaaatatcagattaaaaaaaaaaaaacattatttgggaaaattaactacatgactaagtcctgttttagtattagctaaaggaacatttattcaatgaaatggaaaaaaaatctttggtatacaatccatcatctgaagctcagggccagatgtgttttggaattcagaatattttgaatttcagaaaggtaatgcagaacacaaagtacacattatataataatcccagtggagttcagggcagtgcactataatcaaacacattaatatttctgcaacaaaacatggaacagtcatactaagttggctaaataaagacttcaaatagcttaacaatggttcaagtcaggtcttgccaattaaatgaatttataccaaacttaaagaaaaattttcatttatgagagctttctgaattttgcaatcacagataagggataatagattttttttattattattcctagcaccatttcaatcataaaaaaaaaaaatcaattaaaaggcctggtcaactgggcacagtggctcatgcctgtaatcccagcactttgggaagccgaagcgggtggatcacctgaggtcagaagttcaagaccagcttggccaatatggtgaaaccccaaatctactaaaaatacaaaaatgagtcaggtgtggtggtgggcgcctgtaatcccagctactcaggaggttgagacaaaagaatcgcttgaacccaggaggtagaggttgcagtaagccaagatcacaccactacactccagcctaggagacccaagacagtccaaaaaaaaaaaaaaaaagccctggtcaataaataacccttcatgacagaaatgccttctggaaaaaaaaaaaagaaaaagaaatgc

SEQ ID NO: 930 - DNA, 4001 bp, Homo sapiens
cccgctctccacggatgcggcgggccagctggatgtccttgggcataatggtcacgcgcttggcgtggatggcgcacaggttcgtgtcttcgaacagccccaccaggtaggcctcgctggcctcctgcagcgccatcacggccgagctctggaagcgcaggtccgtcttaaagtcctgcgcgatctcgcgtaccagccgctggaagggcagcttgcggatcagcagctccgtggacttctggtagcgccggatctcccgcagggctacggtgccgggccggtagcggtgcggcttcttcaccccgcccgtggccggcgcgctcttgcgggccgccttggtggccagctgcttcctcggggccttgccgccggtcgacttgcgagcagtctgcttagtacgggccatagcgaaccaaaacacaggcttaccagcgcagcggcggggagaaaaacgagctcctagccccgccgcagccgtctttataagcacagtcttttcccgattgggcggaacaataattgaaaatcccgcgctggctgtccattggctgtgacgtcacccgtcctaaagtcaccggttggcttgggcagattcctccctaatcccgcccaccccgcctcactttctacttaccagttggcgaagtttcgcaagcttgtttttcccctttccttcagggtgaaagtcattttccattgcagctttgtcagattgttccctttccgcccttcgcttccttagaacacactgcccgcaataccccccctttcttgctgcgccctacagctcccgcgtggaacctcattcttccatttgccccccgcccccagttgctacttggcggatcgtttttcgcctgtcgggtgccttttgggtgggagaggtgcccgcccccaggacgcaagattccgcctccgaggcccttactctccgccgccagggcgctttggaaaacaaaacagaaactaagacttaagtcagctcagtgaagccaagacccagctccgccacactagcgagcactacccgctcagggccctccccatcgggggtggggacgaggagcacgtcccgctggtgccagactaggtctaagtgtccggccatagcctgcggaaaccactagggaagcgcgcgctccgcgcgcaacacttcagcgcgttgggtactgcccgcggcgctggtgtttgtgactgtgtggagcggaccgtggcggcgcccaggacgtttggtgcctgcacctgccctgggaagtcctaggactggggacccactcatcgaagagccaaggcagttacgtgctccagatggaagacggcgcgcacacacacacaccccgccccgccccgccccgtcccgtcccgtcccgtcccgtcccgtcccgtcagctccaggttcgctattcactactgaggaacgctggactgagagtggccagcattaacaactcttttatttgaaaacgtgggtggctctgaaaagagccttttgagttcacaggtgccccttcgagacgcgggccgggctgggcccacttgggccggacgtcagcctcacttgccctttgccttgtggtgactctccgtcttcttagggagcagtacggcctggatgttaggcaagacgccgccctgggcgatggtgactttgcccagcagcttgttcagttcctcgtcgttgcggatggccagctggaggtgacgagggatgatgcgcgtcttcttgttgtcccgagccgcgttgcccgccagctccaggatctcggcggtcagatactcgaggaccgcagccatgtagacgggcgcgccggcccccactcgctccgcgtagttgcctttgcgcagcaagcgatgcactcgccctaccgggaactgaaggccagcgcgggacgagcgcgacttggccttggcgcgggccttgcctccttgcttgccacgaccagacatgacagcgatagtagtcaccgagagaaactcctgcctggcgatcgggaaagtcgccgaaaacgccgctgcttcacctttttatagacagaacggcgattgtccacggagcactttgattggctcaagcaaattttgtcccgatagccaataggatagctcagccagaatccactcatttacataatctcgtctccctcgcattgcgcgccgcggaaaactcgcgaaccataacgcagcgtcatgcgcacagcctctgtaagtacacagtcgtttccggtagaccccgagcctaccgctctgcttgcgttctcgggggtcggtgtcggtcttgggtctggccatgcctgagcctgcaaagttcgcgccggctcccaagaagggctccaagaaagccgtcaccaaagcccagaagaaagacggcaagaagcgcaagcgcagccgcaaggagagctactccatctacgtgtacaaggtgctgaagcgggtccaccccgacaccggcatctggtgcaaggccatgggcatcatgaactccttcctcaacgacatcttcgagcgcatcgcgggagaggcgtcccgcctggcgcactacaacaagcgctccaccatcacgtcccggagatccagacggccgtgcgcctgctgctgcccggcgagctggccaagcacgccgtgtccgagggcaccaaggcggtcaccaagtacgccagctccaagtgagtccctgccgggacctggcgctcgctcgctccctccctccctccctccgcgggtcgccggctgctttgtctccaaaggctcttttcagggccacttaaccccgttagtgaaataagctgttttcccactgcttactgtgagttctacttaggggttttccctcagcacctatcccttttcctgcagatgatgggagaggaatataagataaagctataagatgtagcttggtcgagaactaccttgtagtgacagggtcatgtgcacataatttgccttttccaaagtgagacgatatgctacgggtgcggtcaatgtaaatctgctcaggagagtcaagggaaaaagtgttaactgcatattgagctcgcaaaattgtgtagtaacctgaaaatattcctaatagttttgcgaccaagcctcaccatataaactttccttccgcacctgtagacctccattctgtggttgaagcaatttttggtttatatagctctcttgtctcaatttggtattcctttcaggtactgtgagtctataggtatttatttctgggtttcaagacgttaaatgccatcagaattgagtaatgcaaaggctgctgtcatggatagtaaagctttttagtcaagtgctgatagacaattccccattgttatcgttgggtattttacaattttctgggcaagaaatgtaatgaaaaattaagtaagttttaaaggccttcgtctttgagactggatacctaaaacaatagtgtttcctaaacagttaaaacttatttaaccctgaagctttcgagacacacaaatatatacaaatatatattgtatatttcttaaaccccacatagttccactgatctaaatcactgggggcgagaggcaaggatagacaatctatgacacaacaccaggtgattcataagtttggtaaccactgacatttgattatgcagttgccatattccttagtaagaacctggtcacaattttcactcactaccccaggcaattccccctccccacaccccccttttttctgagaatttcagtgagatatacaaaagtttcatttaatcctttattaattccagactttatatatttttattaggatttaaaatacatttcaaaaagatcaagtgagaacagaagataaaagtaccaagataaaggcataatacaaacttagaaaatacatgttaagcatactgcggcgtcctggtagccccttgcttttgttcacttttttctcttatgtacctacataaaatcccaaatagtatcttccaggatgacacacttgctgtctgccccacccaattaaaaaca

SEQ ID NO: 931 - DNA, 4001 bp, Homo sapiens
gcccgctctccacggatgcggcgggccagctggatgtccttgggcataatggtcacgcgcttggcgtggatggcgcacaggttcgtgtcttcgaacagccccaccaggtaggcctcgctggcctcctgcagcgccatcacggccgagctctggaagcgcaggtccgtcttaaagtcctgcgcgatctcgcgtaccagccgctggaagggcagcttgcggatcagcagctccgtggacttctggtagcgccggatctcccgcagggctacggtgccgggccggtagcggtgcggcttcttcaccccgcccgtggccggcgcgctcttgcgggccgccttggtggccagctgcttcctcggggccttgccgccggtcgacttgcgagcagtctgcttagtacgggccatagcgaaccaaaacacaggcttaccagcgcagcggcggggagaaaaacgagctcctagccccgccgcagccgtctttataagcacagtcttttcccgattgggcggaacaataattgaaaatcccgcgctggctgtccattggctgtgacgtcacccgtcctaaagtcaccggttggcttgggcagattcctccctaatcccgcccaccccgcctcactttctacttaccagttggcgaagtttcgcaagcttgtttttcccctttccttcagggtgaaagtcattttccattgcagctttgtcagattgttccctttccgcccttcgcttccttagaacacactgcccgcaataccccccctttcttgctgcgccctacagctcccgcgtggaacctcattcttccatttgccccccgcccccagttgctacttggcggatcgtttttcgcctgtcgggtgccttttgggtgggagaggtgcccgcccccaggacgcaagattccgcctccgaggcccttactctccgccgccagggcgctttggaaaacaaaacagaaactaagacttaagtcagctcagtgaagccaagacccagctccgccacactagcgagcactacccgctcagggccctccccatcgggggtggggacgaggagcacgtcccgctggtgccagactaggtctaagtgtccggccatagcctgcggaaaccactagggaagcgcgcgctccgcgcgcaacacttcagcgcgttgggtactgcccgcggcgctggtgtttgtgactgtgtggagcggaccgtggcggcgcccaggacgtttggtgcctgcacctgccctgggaagtcctaggactggggacccactcatcgaagagccaaggcagttacgtgctccagatggaagacggcgcgcacacacacacaccccgccccgccccgccccgtcccgtcccgtcccgtcccgtcccgtcccgtcagctccaggttcgctattcactactgaggaacgctggactgagagtggccagcattaacaactcttttatttgaaaacgtgggtggctctgaaaagagccttttgagttcacaggtgccccttcgagacgcgggccgggctgggcccacttgggccggacgtcagcctcacttgccctttgccttgtggtgactctccgtcttcttagggagcagtacggcctggatgttaggcaagacgccgccctgggcgatggtgactttgcccagcagcttgttcagttcctcgtcgttgcggatggccagctggaggtgacgagggatgatgcgcgtcttcttgttgtcccgagccgcgttgcccgccagctccaggatctcggcggtcagatactcgaggaccgcagccatgtagacgggcgcgccggcccccactcgctccgcgtagttgcctttgcgcagcaagcgatgcactcgccctaccgggaactgaaggccagcgcgggacgagcgcgacttggccttggcgcgggccttgcctccttgcttgccacgaccagacatgacagcgatagtagtcaccgagagaaactcctgcctggcgatcgggaaagtcgccgaaaacgccgctgcttcacctttttatagacagaacggcgattgtccacggagcactttgattggctcaagcaaattttgtcccgatagccaataggatagctcagccagaatccactcatttacataatctcgtctccctcgcattgcgcgccgcggaaaactcgcgaaccataacgcagcgtcatgcgcacagcctctgtaagtacacagtcgtttccggtagaccccgagcctaccgctctgcttgcgttctcgggggtcggtgtcggtcttgggtctggccatgcctgagcctgcaaagttcgcgccggctcccaagaagggctccaagaaagccgtcaccaaagcccagaagaaagacggcaagaagcgcaagcgcagccgcaaggagagctactccatctacgtgtacaaggtgctgaagcgggtccaccccgacaccggcatctggtgcaaggccatgggcatcatgaactccttcctcaacgacatcttcgagcgcatcgcgggagaggcgtcccgcctggcgcactacaacaagcgctccaccatcacgtcccggagatccagacggccgtgcgcctgctgctgcccggcgagctggccaagcacgccgtgtccgagggcaccaaggcggtcaccaagtacgccagctccaagtgagtccctgccgggacctggcgctcgctcgctccctccctccctccctccgcgggtcgccggctgctttgtctccaaaggctcttttcagggccatttaaccacctcagttaaagaatctttcttgtgttgtcagtcccagttgatgtttttggcttcacgtctggttaactttaggagagcacacaacaccaagcacagataactattttcttttcacataggcattgctataagtaagcttacatagattgatagtggtatcttactatggcatagataggttggggcttgccttagagggctgctcttgaactgtctttggcctggttacgtacccgtgaatatgtgcccaggagattgtttcctgttgagaaacgcagtgttaattttgataagtttatgtaagatcaaattgtgtatatgaacaaaggttgggtccgctcttcagtggtaaaatgaaggtagagattaaatgcattgtatgctctcagatgtgtacttaaaagggaatagctcaacttttatatatggtatcgagaaacctgaggtttttatatcattggttcacaaacacgtgcctacaccaccactcatgtgaaaattccttaaggaggtagatggaagttcgattttgataaccaggagttaacaccgataaccttctgcgctttctagttgagataccctaaaatctacccaataccattaaatggtttttttccccaagagttatcactcggaaaagcttgtccagtttaagggtttgttccatacaatagcaacaaaatatacgatttctgaagccagagtttgggatccctgaagaggagaaggaccaccaatttgcaagggaggttgattaggtttgttttctgctttgggaacactggacttggaatcacacagcctcattaacctcaaaatattatactgattgctctggggatcgtaaatcctaggctggccacaatagaagcgaggaaagcaattaggaggctgttgcagtgttgtgggctggaacagtgattaagacttaaagtctctccagaccagcagcatcagcattacttgaagttactaaaaatgaaaattcccaggttccattatttgtgttaagctttctgggtgatggtgatatatgctaaagtgtgaaaaacaacggataaatgacatgctggagtgcaatggtggtaatggaaacaaatgttggattttatctttgaggtagaattaataggtgtggctgaggaacaggatttagctaacagtgaaacccctagatttttggcttgagcaactgtgtagatagtggtactattaggatagaacactg

SEQ ID NO: 932 - DNA, 4001 bp, Homo sapiens
gcgcgtgtggggcgggagtgggggcgggtaaagaggcggattcccaacagcctaattgagaaccgactcctgggaaggctaagcagcacaatgagtaaagacacgctctagattcaaaagcaaatccaatgacgcactggggacctcgagttccaaatagttaaaaagctacgtatgccatttcccatgaccttcacactaaaataacttactttatgaaaagaaactaagggaataagtgaacaagctcttttctagtgattaggtgggtggctctgaaaagagcctttggagtcaagcagccggcgactcgagcgagcgagcgccaggtcccggcagggactcacttggagctggtgtacttggtgaccgccttggtgccctcggacacggcgtgcttggccagctcgccgggcagcagcaggcgcacggccgtctggatctcgcgggatgtgatggtggagcgcttgttgtagtgcgccaggcgggaagcctctcccgcgatgcgctcgaagatgtcgttgacgaaggagttcatgatgcccatggccttggacgagatgccggtgtcggggtggacctgcttcagcaccttgtacacgtagatggagtagctctctttgcggctgcgcttgcgcttcttgccgtctttcttctgggctttggtgacggctttcttggagccctttttaggggccggagcggattttgccggttcaggcatggtaagacacagtacaaacgcggcttagccaagaaaagaagtaagagaatgggcgggcctgattcttttataaccaccttatgcaaattagggctccgaaagtcgttcatttccattggtccgtgtgcggaccttgcgttttcagcaatgcgtacgtaacaacaccgactcttgacttgattggccggttctgaagccatattaggaccaatgaaaaactcgttcttgaccccacccctaggaaagcttataaaggctttcctcttggttctctttcaatcttattttgttgcgaggttctgagcgttgtctgtgtttaaccttgatttcagtcatgtctggtcgtggcaaacaaggaggcaaggcccgcgccaaggccaagtcgcgctcgtcccgcgctggcctccagttcccggtagggcgagtgcaccgcttgctgcgcaaaggcaactacgcggagcgggtgggggccggcgcgcccgtctacatggcggcggtcctcgagtacctgaccgccgagatcctggagctggcgggcaacgcggctcgggacaacaagaagacgcgcatcatccctcgtcacctccagctggccatccgcaacgacgaggaactgaacaagctgctgggcaaagtcaccatcgcccagggcggcgttttgcctaacatccaggccgttctgttaccaaagaaaaccgaaagccacaaagccaaaagcaaataaatgcagacaaacaaaccaagaccaaaggctctttttagagccacccaagttttcaaaaaaagagctaatgcgctatttcgtgatcagcccttcatttgacactttggtggctcttaaaagagcctttggggtgaatgagtatggtgtcaagcctcttaattacttgttcttgccaggcttgtgactctccgttttcttgggcaacaggacagcctggatattgggcaagacgccgccctgggcaatggtgacacccccgagtaacttgttgagctcttcgtcattcctcacggctagttgcagatggcgagggatgatgcgcgtcttcttgttgtcccgagccgcgttgcccgccagctccagaatttccgcggtcaggtactcgaggaccgccgccaggtacaccggggcgcctgccccgacccgctccgcgtagttgcctttgcgcagcaagcggtgcactcgccccaccgggaactggagaccagcgcgggacgagcgcgacttggccttagcgcgggccttgcctccctgctttccgcgtcctgacattacggctaaaattgcagttacagcttcttttacaaggagaagaatgtggaaagaataaccaatttgatgtaatttataagagctaccgggaggggtgaagggaagtcgtttgattggctaaaagcggagccgtatctaacagccaatagaaaagcagaaagccgcctcttggtttgcgtcctgcactgaaaggaaatgacggattttgtaagtatctaccaatcgctgagagccacattaaagccccttatttgcatgccaggatctttaaagagagcaggctttcaaacaaaatactggttttgttttactgagaggcactgtgggtttttgttttgttttgctttgctttgtttagtttacagccgggaaatcccaatatggaccctaaggaactgcagaagacatccttagacggagagttactctcacgaaagagtaggggattctgaagccgatgatccccttgagctctaaactgccaagtcccgccctttctgtctcgtcacagccaaattccctttaaaaatacatgtactactaaggctgcctcctttctcgcccctaaacttaagtcgcccgcagcggcgtgtctccgccccacccccacccgcctgcactcctcggaatccggtttgaccgaggctagaatagatttgtcatcctcctcttgacctccaggaggcggccttcaaacttgctcccttggctttcaaaatgtcgccctgtttttcttcttacctcgccgacttttcttatcctgctcccccatgccactgcccatctctaaatctgcgagtccagctggactgtttccctgtctccaattcttcacttatcccgaagagtcttacccatttatatgctttcaactaacgtccaaatttgtttcagaagctcagacccttatgcctaactgcttacagaatacttcaacctacttatcccaacgagcacctcaaactcaaactctacctcagcctatccgaacgcgaactcatacaaacaacctcccctctttgccctcttttcctgaaatgcaccagcatacttacagatacctaagccgaaatctactctactcttcccttcgtcttagcatatccagtcagttgcttccttaacatcccttcagactttttctccatgctcccttgtccacctcatcatcatcccttagatttcagcaacagccgggaaagggtaattttgccgtcaggcactaatcgctggcatgactccagcggtcttagaaatctttcctgaaagctctcctttttttcttttatcccatataacagatgaacctgaaagctcttgtgtttcttcctcctcaacgtcccatctctgggagttctacatctcctacaccattctcaccctttccttagtatcccttaaggtcaggtagaatgctagagagaaaaaatagacttgtgggttttttgttcgttttttgaggcggaatttcctctgtcacccaggctggagcactatctcagctcactgcaacctccaccaccgcctcctccaccccgcccccacccacccgggttcaagcgatcctcccacctcagcctcccgagtagctgggatgacaggcgcccaccaccccgcctggctaatttttgtatttttagtagagatggggtttcatctctactaatgttgaccagggtgatctcgaactcctgacctcaaatctcgaatgttggccaaggtggtctcgaattcctgacctcaaatgatctgcccacctcgacctcccaaagtgctgggattacaggcgtgagccactgcacccggccagaaaatacttaaatcattctttgacacttttcctgatgttttctcctttattctcaccagtttattcaactggcatttattggatgtgtgctattgggccatgggtgtatagataattgaaagtagtacaaacaagtctgtgatgaaatgcctccagaaaatggaggaaatctggtgaactctgagagttaa

SEQ ID NO: 933 - DNA, 4001 bp, Homo sapiens
atctgtaagtatgctggtgcatttcaggaaaagagggcaaagaggggaggttgtttgtatgagttcgcgttcggataggctgaggtagagtttgagtttgaggtgctcgttgggataagtaggttgaagtattctgtaagcagttaggcataagggtctgagcttctgaaacaaatttggacgttagttgaaagcatataaatgggtaagactcttcgggataagtgaagaattggagacagggaaacagtccagctggactcgcagatttagagatgggcagtggcatgggggagcaggataagaaaagtcggcgaggtaagaagaaaaacagggcgacattttgaaagccaagggagcaagtttgaaggccgcctcctggaggtcaagaggaggatgacaaatctattctagcctcggtcaaaccggattccgaggagtgcaggcgggtgggggtggggcggagacacgccgctgcgggcgacttaagtttaggggcgagaaaggaggcagccttagtagtacatgtatttttaaagggaatttggctgtgacgagacagaaagggcgggacttggcagtttagagctcaaggggatcatcggcttcagaatcccctactctttcgtgagagtaactctccgtctaaggatgtcttctgcagttccttagggtccatattgggatttcccggctgtaaactaaacaaagcaaagcaaaacaaaacaaaaacccacagtgcctctcagtaaaacaaaaccagtattttgtttgaaagcctgctctctttaaagatcctggcatgcaaataaggggctttaatgtggctctcagcgattggtagatacttacaaaatccgtcatttcctttcagtgcaggacgcaaaccaagaggcggctttctgcttttctattggctgttagatacggctccgcttttagccaatcaaacgacttcccttcacccctcccggtagctcttataaattacatcaaattggttattctttccacattcttctccttgtaaaagaagctgtaactgcaattttagccgtaatgtcaggacgcggaaagcagggaggcaaggcccgcgctaaggccaagtcgcgctcgtcccgcgctggtctccagttcccggtggggcgagtgcaccgcttgctgcgcaaaggcaactacgcggagcgggtcggggcaggcgccccggtgtacctggcggcggtcctcgagtacctgaccgcggaaattctggagctggcgggcaacgcggctcgggacaacaagaagacgcgcatcatccctcgccatctgcaactagccgtgaggaatgacgaagagctcaacaagttactcgggggtgtcaccattgcccagggcggcgtcttgcccaatatccaggctgtcctgttgcccaagaaaacggagagtcacaagcctggcaagaacaagtaattaagaggcttgacaccatactcattcaccccaaaggctcttttaagagccaccaaagtgtcaaatgaagggctgatcacgaaatagcgcattagctctttttttgaaaacttgggtggctctaaaaagagcctttggtcttggtttgtttgtctgcatttatttgcttttggctttgtggctttcggttttctttggtaacagaacggcctggatgttaggcaaaacgccgccctgggcgatggtgactttgcccagcagcttgttcagttcctcgtcgttgcggatggccagctggaggtgacgagggatgatgcgcgtcttcttgttgtcccgagccgcgttgcccgccagctccaggatctcggcggtcaggtactcgaggaccgccgccatgtagacgggcgcgccggcccccacccgctccgcgtagttgcctttgcgcagcaagcggtgcactcgccctaccgggaactggaggccagcgcgggacgagcgcgacttggccttggcgcgggccttgcctccttgtttgccacgaccagacatgactgaaatcaaggttaaacacagacaacgctcagaacctcgcaacaaaataagattgaaagagaaccaagaggaaagcctttataagctttcctaggggtggggtcaagaacgagtttttcattggtcctaatatggcttcagaaccggccaatcaagtcaagagtcggtgttgttacgtacgcattgctgaaaacgcaaggtccgcacacggaccaatggaaatgaacgactttcggagccctaatttgcataaggtggttataaaagaatcaggcccgcccattctcttacttcttttcttggctaagccgcgtttgtactgtgtcttaccatgcctgaaccggcaaaatccgctccggcccctaaaaagggctccaagaaagccgtcaccaaagcccagaagaaagacggcaagaagcgcaagcgcagccgcaaagagagctactccatctacgtgtacaaggtgctgaagcaggtccaccccgacaccggcatctcgtccaaggccatgggcatcatgaactccttcgtcaacgacatcttcgagcgcatcgcgggagaggcttcccgcctggcgcactacaacaagcgctccaccatcacatcccgcgagatccagacggccgtgcgcctgctgctgcccggcgagctggccaagcacgccgtgtccgagggcaccaaggcggtcaccaagtacaccagctccaagtgagtccctgccgggacctggcgctcgctcgctcgagtcgccggctgcttgactccaaaggctcttttcagagccacccacctaatcactagaaaagagcttgttcacttattcccttagtttcttttcataaagtaagttattttagtgtgaaggtcatgggaaatggcatacgtagctttttaactatttggaactcgaggtccccagtgcgtcattggatttgcttttgaatctagagcgtgtctttactcattgtgctgcttagccttcccaggagtcggttctcaattaggctgttgggaatccgcctctttacccgcccccactcccgccccacacgcgccctggtggctccttgggtctgtttcattctaaaacgaagtggctgagttcggctgtcatttaagagaactccaggacacaattcagcccgggttccgcaaacactgcgtgacagctctgtatgactgacgcttggcagcagcttttgtgtccggtcaccagttctgccgtgcgatggggcctcctgtggataccagccgttctgtgtattttggacgaaggccgcgcagccgggtcccagccttgtcctgattgggcgacaagaatattcaaaattctgcgcctttttctaatttgtagatttcagtttccgtcgttcactttgagactttgaaattcctatttctcattttgttgataatttctgcatttaatggtctgtgctttaaatggtaacgctacggccccaggtcactgcgaggcacttaccatgtagatacgggctcaaaagtcacctctcagagacctacgtcatccactcaggaattcgcgcctctcatacttgcctgtctcattttatcttccttctagcagctgtctgaaattggttcgtctgttttcttgtttatggtattctcaagcccttgacagaccggctagtgtggttttcccgtgcatcttcagcctggcacattatggacacttaaatactacgtattgatctaatattgttgggttaatttttccatcccacccttttcttaatcgcttccgtggatggatgaagggtgctgttcatttccattagatgtatgtgaaggcacagtgaaaatggaaatgttcttggagctacttcctcaaaatgtatccttagtcacctcagtgcaacagctgggagggggccgtgttaagattttttttgctacaaagaggaggtggcaatggtagatccacccttatgcttctcagtttagcataacctcttatggattttcatcaaatt

SEQ ID NO: 934 - DNA, 4001 bp, Homo sapiens
gagtaaatattctgcacctccacaaaataaaactaaaatgcaattgtcctgcatctgagaatacaagggtggacagtatgagctgcatgactgtgaaccaatgaggcttctcttggcctcatttgtaaaaaggagattaactctgtagtcccgcctatattgcatggcctccagaaaagcaaatgaggtggtaagtgtaaattaaaagctcctctcctttaagaggggaacaccatgaggggagagtaagaaaaggagaaggaaaaggctctttccagtgaccaacacgctgaatttgatgaaaatccataagaggttatgctaaactgagaagcataagggtggatctaccattgccacctcctctttgtagcaaaaaaaatcttaacacggccccctcccagctgttgcactgaggtgactaaggatacattttgaggaagtagctccaagaacatttccattttcactgtgccttcacatacatctaatggaaatgaacagcacccttcatccatccacggaagcgattaagaaaagggtgggatggaaaaattaacccaacaatattagatcaatacgtagtatttaagtgtccataatgtgccaggctgaagatgcacgggaaaaccacactagccggtctgtcaagggcttgagaataccataaacaagaaaacagacgaaccaatttcagacagctgctagaaggaagataaaatgagacaggcaagtatgagaggcgcgaattcctgagtggatgacgtaggtctctgagaggtgacttttgagcccgtatctacatggtaagtgcctcgcagtgacctggggccgtagcgttaccatttaaagcacagaccattaaatgcagaaattatcaacaaaatgagaaataggaatttcaaagtctcaaagtgaacgacggaaactgaaatctacaaattagaaaaaggcgcagaattttgaatattcttgtcgcccaatcaggacaaggctgggacccggctgcgcggccttcgtccaaaatacacagaacggctggtatccacaggaggccccatcgcacggcagaactggtgaccggacacaaaagctgctgccaagcgtcagtcatacagagctgtcacgcagtgtttgcggaacccgggctgaattgtgtcctggagttctcttaaatgacagccgaactcagccacttcgttttagaatgaaacagacccaaggagccaccagggcgcgtgtggggcgggagtgggggcgggtaaagaggcggattcccaacagcctaattgagaaccgactcctgggaaggctaagcagcacaatgagtaaagacacgctctagattcaaaagcaaatccaatgacgcactggggacctcgagttccaaatagttaaaaagctacgtatgccatttcccatgaccttcacactaaaataacttactttatgaaaagaaactaagggaataagtgaacaagctcttttctagtgattaggtgggtggctctgaaaagagcctttggagtcaagcagccggcgactcgagcgagcgagcgccaggtcccggcagggactcacttggagctggtgtacttggtgaccgccttggtgccctcggacacggcgtgcttggccagctcgccgggcagcagcaggcgcacggccgtctggatctcgcgggatgtgatggtggagcgcttgttgtagtgcgccaggcgggaagcctctcccgcgatgcgctcgaagatgtcgttgacgaaggagttcatgatgcccatggccttggacgagatgccggtgtcggggtggacctgcttcagcaccttgtacacgtagatggagtagctctctttgcggctgcgcttgcgcttcttgccgtctttcttctgggctttggtgacggctttcttggagccctttttaggggccggagcggattttgccggttcaggcatggtaagacacagtacaaacgcggcttagccaagaaaagaagtaagagaatgggcgggcctgattcttttataaccaccttatgcaaattagggctccgaaagtcgttcatttccattggtccgtgtgcggaccttgcgttttcagcaatgcgtacgtaacaacaccgactcttgacttgattggccggttctgaagccatattaggaccaatgaaaaactcgttcttgaccccacccctaggaaagcttataaaggctttcctcttggttctctttcaatcttattttgttgcgaggttctgagcgttgtctgtgtttaaccttgatttcagtcatgtctggtcgtggcaaacaaggaggcaaggcccgcgccaaggccaagtcgcgctcgtcccgcgctggcctccagttcccggtagggcgagtgcaccgcttgctgcgcaaaggcaactacgcggagcgggtgggggccggcgcgcccgtctacatggcggcggtcctcgagtacctgaccgccgagatcctggagctggcgggcaacgcggctcgggacaacaagaagacgcgcatcatccctcgtcacctccagctggccatccgcaacgacgaggaactgaacaagctgctgggcaaagtcaccatcgcccagggcggcgttttgcctaacatccaggccgttctgttaccaaagaaaaccgaaagccacaaagccaaaagcaaataaatgcagacaaacaaaccaagaccaaaggctctttttagagccacccaagttttcaaaaaaagagctaatgcgctatttcgtgatcagcccttcatttgacactttggtggctcttaaaagagcctttggggtgaatgagtatggtgtcaagcctcttaattacttgttcttgccaggcttgtgactctccgttttcttgggcaacaggacagcctggatattgggcaagacgccgccctgggcaatggtgacacccccgagtaacttgttgagctcttcgtcattcctcacggctagttgcagatggcgagggatgatgcgcgtcttcttgttgtcccgagccgcgttgcccgccagctccagaatttccgcggtcaggtactcgaggaccgccgccaggtacaccggggcgcctgccccgacccgctccgcgtagttgcctttgcgcagcaagcggtgcactcgccccaccgggaactggagaccagcgcgggacgagcgcgacttggccttagcgcgggccttgcctccctgctttccgcgtcctgacattacggctaaaattgcagttacagcttcttttacaaggagaagaatgtggaaagaataaccaatttgatgtaatttataagagctaccgggaggggtgaagggaagtcgtttgattggctaaaagcggagccgtatctaacagccaatagaaaagcagaaagccgcctcttggtttgcgtcctgcactgaaaggaaatgacggattttgtaagtatctaccaatcgctgagagccacattaaagccccttatttgcatgccaggatctttaaagagagcaggctttcaaacaaaatactggttttgttttactgagaggcactgtgggtttttgttttgttttgctttgctttgtttagtttacagccgggaaatcccaatatggaccctaaggaactgcagaagacatccttagacggagagttactctcacgaaagagtaggggattctgaagccgatgatccccttgagctctaaactgccaagtcccgccctttctgtctcgtcacagccaaattccctttaaaaatacatgtactactaaggctgcctcctttctcgcccctaaacttaagtcgcccgcagcggcgtgtctccgccccacccccacccgcctgcactcctcggaatccggtttgaccgaggctagaatagatttgtcatcctcctcttgacctccaggaggcggccttcaaacttgctcccttggctttcaaaatgtcgccctgtttttcttcttacctcgccgacttttcttatcctgctcc

SEQ ID NO: 935 - DNA, 4001 bp, Homo sapiens
tttattttctagtggaaaaaaaaaatcatgtataccgcattttatatcttttaattgggtgtaaatttgaatttcaacatcataaaaattagtaaaattcattttaagcacaaagttgttaattcccccaagatttatcaagaatggcttaatttcaaaggctgtcaagttaattataagctaagattttccagttgcaccaagggtatattttatttggcaaaagaaacatccactggcttttgtcaggatgagtcttgagttattcaagttttgaactgagaggtcttcagaaattcaccccacatattaactgtggccttctctacaccacaaattcccctccactcatcctcaaattgtttcctttctcaggacatctgtgacacaaagactgtgacacacccacaggtcgattaacatgaggacccaacacctattaaaacatccacactcctgagaacactaaaaaccaaccacctcgtcaggtcccacctccagtctagctgaatcaggaaacctcaggagaagcacctggaagcaggtttaacaagcgcaaaggtgactcttataattgggaaagtttggaaccaagacagggttcttgtcctggaggaagtattttcctgtggagaaggacctgtaaacagcctatgaagtgctcagctttcaccaagaaaagaaaaacatgggctgatagggttaaggaaacgtttgactgaagaggattaaatcctgaaggttagggatgtctttgggcgctggggtctctcaatcaccaaagatcgacattacaggccaggtagctctttgtccccccagaggactgtcctgtgccttatgcttagcactcctggcctctgcccattggatacttctagcacctcccccgcaacacacacacacctgacaacccaaaacatctacagatattgccaaatactccacagggggtggggtggtggcaatatatctccctgtttgaagtcactggaatggaagttaggggaggatggctaagtcaggacttgcaaaaaggctaagggacgaaagcacatggctatattagacaaagtttgtgacagacgcctgtaggtatatggtaaggaaaacagattaaaacactaagaaatagtaagaggtcggaccgagggtttctcatctgtatgggaaatctcatctcgttcattactttcagaaacaaaaaggaaaacgactttaaagatacaggttaaaggccgaaggggtgtagaaccaccccccgcctccttccctccatccctcccaaatatcccagaacgagtcaaacctttcgaatctcgtagcacagataacaagcaactcagtaagactggacggggatgactgagggccaactcattacaggactacaggaaactccttagtcctaaacccgaatgcatccgtgaccatggtaacactccctacctgaccaaaagctatcaaacgctctgacaagtgtttacagctgctttctcgattactgaagtggctctgaaaagagcctttggggttaggtggttgatctattgcgtcccttgcacactcttacttcgagctggtgtacttggtgaccgccttggtgccctcggacacggcgtgcttggccagctcgccgggcagcagcaggcgcacggccgtctggatctcgcgggatgtgatggtggagcgcttgttgtagtgcgccaggcgggacgcctctcccgcgatgcgctcgaagatgtcgttgacgaaggagttcatgatgcccatggccttggacgagatgccggtgtcggggtggacctgcttcagcaccttgtacacgtaaacggagtagctctccttgcggctgcgcttgcgcttcttgccgtccttcttctgcactttcgtaacagcctttttggagcccttcttgggagcaggagcggatttcgctggatccggcatttttgcgcgaaaaaagagaaaagagacttaaagaagtaatccgaactaccgcaaaacgggctggttatgcgctacttatagagcccgtatgcaaatgaagactcgcaaagtgctgcgctttcattggttaacttacaacggtgtcgtcagagggggtggagtctatgtaaataatagattctagtcttgcttccttaatggtcactgtaacaaaagtcttgttatcctatcagaatggtccatttcacactaaccagttttaagctaggtgaagcgatagtttctacggcttggggttttttcttggttttcactttccattagacttgcatacggaagaaatcttaacgccagctagacaagttaactctcttgcctcgtttttgcatttttattctatactttgtggaaatttttttctcttccttgaaatactacctcacccatttttaaaaatcgccagatatttactcccgcccgcttaaattactattctggcttggacaccgcctgtagtatgcaatgaggaagatgctgagctttaattaagcttatagttcctaaataaaccaggaaacgggtttataatttttaagggactcgccccacccttacactcaggatcttccacatctagaaactccccatagtctcttgcccccatgcaaaactttacccacagaattgggagccggacctctagccttaaaccagcgtgaaaacgctcggccggaaccacaaggaccatgcctctgcggctttctctactgccggccaactcacggctgggctttgggttctgtaacgtcacccaccacgagtgcccctggcccctgaccgctgcgcaaggcagacgcacatcagatggagagccggtacagctgctcttgatgaaaacggcagtggctctgaaaagagcctttagatcgaccacttaaaaatatgccttaggcccgctccccgcggatgcggcgggccaactggatgtccttgggcatgatggtcacgcgcttggcatggatggcgcacaggttcgtgtcttcgaacagccccaccaggtaggcctcgctggcctcctgcagcgccatcacggccgagctctggaagcgcaggtccgtcttaaagtcctgcgcgatctcgcgtaccagccgctggaagggcagcttgcggatcagcagctccgtagacttctggtagcgccggatctcccgcagagccacggtgccgggccggtagcggtgcggcttcttcaccccgcccgtggccggcgcgctcttgcgggccgctttggtagccagctgcttcctcggggccttgccgccggtcgacttgcgggcagtctgcttagtacgggccatgctgtctcattgataggagagggtctaggcagtcatatttatagacatagtctcctcttgattgggcctgaaaaggaaattttcaaacttgtgatctcattggttaaaattcaatcctctttactggggcggaagattgttctgctaatctttcttcccttattatttccccctttcctgatttttttctgtaattttatcgatcacggattgtttttgaagactttcctttaaattagtctaacttttgtaaaagcaatgtataaagtgttttgcatcccattttaacagagattttttttttccccgaattcaagcatgcccttctatgagctatcagcctgtttcaggttacctgttactgtagctcttctaccatagctaacatttatttcatgtctggcattttgctcagcaagttagatgcattgtataccatgaatgaccgaagcttagcaaaaaaatatgtaattgaaggaatgaaaaaattgatcttatttacttgaccttggaacccagccaaagccatttcatgtgggtagtgtgctgacctatattgacctgatattagagcctctgccttcctttagtcttttctccctgcgatgtggttccttcttcctcaacctcacatcaatggccaattaggtcctgcagatgttaagcttctaaatcaaagaaggacaacaccag

SEQ ID NO: 936 - DNA, 4001 bp, Homo sapiens
acccagactggtgagtaaaaggagtgtgaccttgtgggggcagtcagaggacctagatgtctgacaccaacatccccaggttccagtctctgctcagttactactgggcctgagaagctgggtgcagagatagtgacccacccacctctgaaagtcactactttttgaagtcagaataccgcccatacattgtgggcctaagcaggttacgagggtctcggcagagacccagaggcatgctctagaaattgctgtgaccctggagcagaaacatgtggcagtccccagcagagctcacctacgctgctctcctcgcttaacacgcctcaggaaaggcaaaatggcagctttacaaaacgaagttttattccatttccccttctcccctcttaattctcatagatcgctgcagtgaatgcttttaacctgtcaactgtgatgaaacaaacagaaaaccgaagccctggcttcttctgaggtgcaaataaatgaccgagaaggtgttatctaagacctctacagccatttgtatctggccgtgtgtagagtgggctctgcaagaccctgcctcactttcccactaagaggccttggacttcccagctcccagagactgtagagatcacctctgtggcctcctgtcacgatttcctaaggcgaagagcttcatttgcccaacggaggcccacgttcttcctgtctgatctactgtcttcccaaggatctgaactcgggcaccagcgtctgcccacatgtccgacgaaaacaacgtaaaggaactactgagtctggacagaaaatccagacataccatgcagcttctaagaggaccgagtgccttcactggaatagtgaatctccttctgtggacatggacagggaacggctcgataaagcccagattcacaaaattccgcccacaccccgtgcccccgggaattttggcttaggggcaggatatgggggttaccactgtgctagtggaggtggcgcggggactgaacggcagccccagcgcagttctccccacgtttgtccgcagaaccccggcgaggccgaggtggtcatttccctccctagccggatggccgcgccgggtgaggccggtttgggcgcgaagcacgggcgtgtggcgctccacttccgcaaaggccagccgcgctcaggaccgcgagccctgagcgtccccctagtgacccctggcctcgtgcccgacgccccgtctctcctgccccggcccccccgccacgcagggccccggtcacgcgcggggggagccggaccgccaaagcccgcgagccggcgcccaggaaagcgtccgcagcccggccagtgcggataggccaattggccgaagtcggcaaagctcaagacggcaccgcagcagggggacccgaccccgttttgttgggagcctaagcggaagtgccttccccgctctaatgccggaggagcacggagggcaagcggtacagcttcttccaagtgctgatgtgggtggctctgaaaagagccttttggatacgatggaacctccggccgaaccgccacttcttaagcccgctctccacggatgcggcgggccagctggatgtccttgggcataatggtcacgcgcttggcgtggatggcgcacaggttcgtgtcttcgaacagccccaccaggtaggcctcgctggcctcctgcagcgccatcacggccgagctctggaagcgcaggtccgtcttaaagtcctgcgcgatctcgcgtaccagccgctggaagggcagcttgcggatcagcagctccgtggacttctggtagcgccggatctcccgcagggctacggtgccgggccggtagcggtgcggcttcttcaccccgcccgtggccggcgcgctcttgcgggccgccttggtggccagctgcttcctcggggccttgccgccggtcgacttgcgagcagtctgcttagtacgggccatagcgaaccaaaacacaggcttaccagcgcagcggcggggagaaaaacgagctcctagccccgccgcagccgtctttataagcacagtcttttcccgattgggcggaacaataattgaaaatcccgcgctggctgtccattggctgtgacgtcacccgtcctaaagtcaccggttggcttgggcagattcctccctaatcccgcccaccccgcctcactttctacttaccagttggcgaagtttcgcaagcttgtttttcccctttccttcagggtgaaagtcattttccattgcagctttgtcagattgttccctttccgcccttcgcttccttagaacacactgcccgcaataccccccctttcttgctgcgccctacagctcccgcgtggaacctcattcttccatttgccccccgcccccagttgctacttggcggatcgtttttcgcctgtcgggtgccttttgggtgggagaggtgcccgcccccaggacgcaagattccgcctccgaggcccttactctccgccgccagggcgctttggaaaacaaaacagaaactaagacttaagtcagctcagtgaagccaagacccagctccgccacactagcgagcactacccgctcagggccctccccatcgggggtggggacgaggagcacgtcccgctggtgccagactaggtctaagtgtccggccatagcctgcggaaaccactagggaagcgcgcgctccgcgcgcaacacttcagcgcgttgggtactgcccgcggcgctggtgtttgtgactgtgtggagcggaccgtggcggcgcccaggacgtttggtgcctgcacctgccctgggaagtcctaggactggggacccactcatcgaagagccaaggcagttacgtgctccagatggaagacggcgcgcacacacacacaccccgccccgccccgccccgtcccgtcccgtcccgtcccgtcccgtcccgtcagctccaggttcgctattcactactgaggaacgctggactgagagtggccagcattaacaactcttttatttgaaaacgtgggtggctctgaaaagagccttttgagttcacaggtgccccttcgagacgcgggccgggctgggcccacttgggccggacgtcagcctcacttgccctttgccttgtggtgactctccgtcttcttagggagcagtacggcctggatgttaggcaagacgccgccctgggcgatggtgactttgcccagcagcttgttcagttcctcgtcgttgcggatggccagctggaggtgacgagggatgatgcgcgtcttcttgttgtcccgagccgcgttgcccgccagctccaggatctcggcggtcagatactcgaggaccgcagccatgtagacgggcgcgccggcccccactcgctccgcgtagttgcctttgcgcagcaagcgatgcactcgccctaccgggaactgaaggccagcgcgggacgagcgcgacttggccttggcgcgggccttgcctccttgcttgccacgaccagacatgacagcgatagtagtcaccgagagaaactcctgcctggcgatcgggaaagtcgccgaaaacgccgctgcttcacctttttatagacagaacggcgattgtccacggagcactttgattggctcaagcaaattttgtcccgatagccaataggatagctcagccagaatccactcatttacataatctcgtctccctcgcattgcgcgccgcggaaaactcgcgaaccataacgcagcgtcatgcgcacagcctctgtaagtacacagtcgtttccggtagaccccgagcctaccgctctgcttgcgttctcgggggtcggtgtcggtcttgggtctggccatgcctgagcctgcaaagttcgcgccggctcccaagaagggctccaagaaagccgtcaccaaagcccagaagaaagacggcaagaagcgcaagcgcagccgcaaggagagctactccatctacgtgtacaaggtgctgaagcgggtccaccccga

SEQ ID NO: 937 - DNA, 4001 bp, Homo sapiens
cccagactggtgagtaaaaggagtgtgaccttgtgggggcagtcagaggacctagatgtctgacaccaacatccccaggttccagtctctgctcagttactactgggcctgagaagctgggtgcagagatagtgacccacccacctctgaaagtcactactttttgaagtcagaataccgcccatacattgtgggcctaagcaggttacgagggtctcggcagagacccagaggcatgctctagaaattgctgtgaccctggagcagaaacatgtggcagtccccagcagagctcacctacgctgctctcctcgcttaacacgcctcaggaaaggcaaaatggcagctttacaaaacgaagttttattccatttccccttctcccctcttaattctcatagatcgctgcagtgaatgcttttaacctgtcaactgtgatgaaacaaacagaaaaccgaagccctggcttcttctgaggtgcaaataaatgaccgagaaggtgttatctaagacctctacagccatttgtatctggccgtgtgtagagtgggctctgcaagaccctgcctcactttcccactaagaggccttggacttcccagctcccagagactgtagagatcacctctgtggcctcctgtcacgatttcctaaggcgaagagcttcatttgcccaacggaggcccacgttcttcctgtctgatctactgtcttcccaaggatctgaactcgggcaccagcgtctgcccacatgtccgacgaaaacaacgtaaaggaactactgagtctggacagaaaatccagacataccatgcagcttctaagaggaccgagtgccttcactggaatagtgaatctccttctgtggacatggacagggaacggctcgataaagcccagattcacaaaattccgcccacaccccgtgcccccgggaattttggcttaggggcaggatatgggggttaccactgtgctagtggaggtggcgcggggactgaacggcagccccagcgcagttctccccacgtttgtccgcagaaccccggcgaggccgaggtggtcatttccctccctagccggatggccgcgccgggtgaggccggtttgggcgcgaagcacgggcgtgtggcgctccacttccgcaaaggccagccgcgctcaggaccgcgagccctgagcgtccccctagtgacccctggcctcgtgcccgacgccccgtctctcctgccccggcccccccgccacgcagggccccggtcacgcgcggggggagccggaccgccaaagcccgcgagccggcgcccaggaaagcgtccgcagcccggccagtgcggataggccaattggccgaagtcggcaaagctcaagacggcaccgcagcagggggacccgaccccgttttgttgggagcctaagcggaagtgccttccccgctctaatgccggaggagcacggagggcaagcggtacagcttcttccaagtgctgatgtgggtggctctgaaaagagccttttggatacgatggaacctccggccgaaccgccacttcttaagcccgctctccacggatgcggcgggccagctggatgtccttgggcataatggtcacgcgcttggcgtggatggcgcacaggttcgtgtcttcgaacagccccaccaggtaggcctcgctggcctcctgcagcgccatcacggccgagctctggaagcgcaggtccgtcttaaagtcctgcgcgatctcgcgtaccagccgctggaagggcagcttgcggatcagcagctccgtggacttctggtagcgccggatctcccgcagggctacggtgccgggccggtagcggtgcggcttcttcaccccgcccgtggccggcgcgctcttgcgggccgccttggtggccagctgcttcctcggggccttgccgccggtcgacttgcgagcagtctgcttagtacgggccatagcgaaccaaaacacaggcttaccagcgcagcggcggggagaaaaacgagctcctagccccgccgcagccgtctttataagcacagtcttttcccgattgggcggaacaataattgaaaatcccgcgctggctgtccattggctgtgacgtcacccgtcctaaagtcaccggttggcttgggcagattcctccctaatcccgcccaccccgcctcactttctacttaccagttggcgaagtttcgcaagcttgtttttcccctttccttcagggtgaaagtcattttccattgcagctttgtcagattgttccctttccgcccttcgcttccttagaacacactgcccgcaataccccccctttcttgctgcgccctacagctcccgcgtggaacctcattcttccatttgccccccgcccccagttgctacttggcggatcgtttttcgcctgtcgggtgccttttgggtgggagaggtgcccgcccccaggacgcaagattccgcctccgaggcccttactctccgccgccagggcgctttggaaaacaaaacagaaactaagacttaagtcagctcagtgaagccaagacccagctccgccacactagcgagcactacccgctcagggccctccccatcgggggtggggacgaggagcacgtcccgctggtgccagactaggtctaagtgtccggccatagcctgcggaaaccactagggaagcgcgcgctccgcgcgcaacacttcagcgcgttgggtactgcccgcggcgctggtgtttgtgactgtgtggagcggaccgtggcggcgcccaggacgtttggtgcctgcacctgccctgggaagtcctaggactggggacccactcatcgaagagccaaggcagttacgtgctccagatggaagacggcgcgcacacacacacaccccgccccgccccgccccgtcccgtcccgtcccgtcccgtcccgtcccgtcagctccaggttcgctattcactactgaggaacgctggactgagagtggccagcattaacaactcttttatttgaaaacgtgggtggctctgaaaagagccttttgagttcacaggtgccccttcgagacgcgggccgggctgggcccacttgggccggacgtcagcctcacttgccctttgccttgtggtgactctccgtcttcttagggagcagtacggcctggatgttaggcaagacgccgccctgggcgatggtgactttgcccagcagcttgttcagttcctcgtcgttgcggatggccagctggaggtgacgagggatgatgcgcgtcttcttgttgtcccgagccgcgttgcccgccagctccaggatctcggcggtcagatactcgaggaccgcagccatgtagacgggcgcgccggcccccactcgctccgcgtagttgcctttgcgcagcaagcgatgcactcgccctaccgggaactgaaggccagcgcgggacgagcgcgacttggccttggcgcgggccttgcctccttgcttgccacgaccagacatgacagcgatagtagtcaccgagagaaactcctgcctggcgatcgggaaagtcgccgaaaacgccgctgcttcacctttttatagacagaacggcgattgtccacggagcactttgattggctcaagcaaattttgtcccgatagccaataggatagctcagccagaatccactcatttacataatctcgtctccctcgcattgcgcgccgcggaaaactcgcgaaccataacgcagcgtcatgcgcacagcctctgtaagtacacagtcgtttccggtagaccccgagcctaccgctctgcttgcgttctcgggggtcggtgtcggtcttgggtctggccatgcctgagcctgcaaagttcgcgccggctcccaagaagggctccaagaaagccgtcaccaaagcccagaagaaagacggcaagaagcgcaagcgcagccgcaaggagagctactccatctacgtgtacaaggtgctgaagcgggtccaccccgac

SEQ ID NO: 938 - DNA, 4001 bp, Homo sapiens
cctttcgaatctcgtagcacagataacaagcaactcagtaagactggacggggatgactgagggccaactcattacaggactacaggaaactccttagtcctaaacccgaatgcatccgtgaccatggtaacactccctacctgaccaaaagctatcaaacgctctgacaagtgtttacagctgctttctcgattactgaagtggctctgaaaagagcctttggggttaggtggttgatctattgcgtcccttgcacactcttacttcgagctggtgtacttggtgaccgccttggtgccctcggacacggcgtgcttggccagctcgccgggcagcagcaggcgcacggccgtctggatctcgcgggatgtgatggtggagcgcttgttgtagtgcgccaggcgggacgcctctcccgcgatgcgctcgaagatgtcgttgacgaaggagttcatgatgcccatggccttggacgagatgccggtgtcggggtggacctgcttcagcaccttgtacacgtaaacggagtagctctccttgcggctgcgcttgcgcttcttgccgtccttcttctgcactttcgtaacagcctttttggagcccttcttgggagcaggagcggatttcgctggatccggcatttttgcgcgaaaaaagagaaaagagacttaaagaagtaatccgaactaccgcaaaacgggctggttatgcgctacttatagagcccgtatgcaaatgaagactcgcaaagtgctgcgctttcattggttaacttacaacggtgtcgtcagagggggtggagtctatgtaaataatagattctagtcttgcttccttaatggtcactgtaacaaaagtcttgttatcctatcagaatggtccatttcacactaaccagttttaagctaggtgaagcgatagtttctacggcttggggttttttcttggttttcactttccattagacttgcatacggaagaaatcttaacgccagctagacaagttaactctcttgcctcgtttttgcatttttattctatactttgtggaaatttttttctcttccttgaaatactacctcacccatttttaaaaatcgccagatatttactcccgcccgcttaaattactattctggcttggacaccgcctgtagtatgcaatgaggaagatgctgagctttaattaagcttatagttcctaaataaaccaggaaacgggtttataatttttaagggactcgccccacccttacactcaggatcttccacatctagaaactccccatagtctcttgcccccatgcaaaactttacccacagaattgggagccggacctctagccttaaaccagcgtgaaaacgctcggccggaaccacaaggaccatgcctctgcggctttctctactgccggccaactcacggctgggctttgggttctgtaacgtcacccaccacgagtgcccctggcccctgaccgctgcgcaaggcagacgcacatcagatggagagccggtacagctgctcttgatgaaaacggcagtggctctgaaaagagcctttagatcgaccacttaaaaatatgccttaggcccgctccccgcggatgcggcgggccaactggatgtccttgggcatgatggtcacgcgcttggcatggatggcgcacaggttcgtgtcttcgaacagccccaccaggtaggcctcgctggcctcctgcagcgccatcacggccgagctctggaagcgcaggtccgtcttaaagtcctgcgcgatctcgcgtaccagccgctggaagggcagcttgcggatcagcagctccgtagacttctggtagcgccggatctcccgcagagccacggtgccgggccggtagcggtgcggcttcttcaccccgcccgtggccggcgcgctcttgcgggccgctttggtagccagctgcttcctcggggccttgccgccggtcgacttgcgggcagtctgcttagtacgggccatgctgtctcattgataggagagggtctaggcagtcatatttatagacatagtctcctcttgattgggcctgaaaaggaaattttcaaacttgtgatctcattggttaaaattcaatcctctttactggggcggaagattgttctgctaatctttcttcccttattatttccccctttcctgatttttttctgtaattttatcgatcacggattgtttttgaagactttcctttaaattagtctaacttttgtaaaagcaatgtataaagtgttttgcatcccattttaacagagattttttttttccccgaattcaagcatgcccttctatgagctatcagcctgtttcaggttacctgttactgtagctcttctaccatagctaacatttatttcatgtctggcattttgctcagcaagttagatgcattgtataccatgaatgaccgaagcttagcaaaaaaatatgtaattgaaggaatgaaaaaattgatcttatttacttgaccttggaacccagccaaagccatttcatgtgggtagtgtgctgacctatattgacctgatattagagcctctgccttcctttagtcttttctccctgcgatgtggttccttcttcctcaacctcacatcaatggccaattaggtcctgcagatgttaagcttctaaatcaaagaaggacaacaccagaaattcatttctcctttacaatgtagaatagtttgtaaattagtgcttattagccagattacaagttcaagtttcaaagcaaattattcatcaattgctgacttgctaacattttattcaataaagtattttataatgcttaaaagtttagttttttttctgttctctatgaagagagtaaagatgctttgctttttcaatttcatgtgctttgaagtatgtattgttcagaacagtaaatatcatagtggttatgtagaagcaactgatacttaaaagttgtagtagttaatataaaacttttaatcatatccttattttactaaaaaaatcattacaaactataaaaactcaaacctgagaaaagcaggcccgaaacgcttaaaacttactttgatggtgtcattatgaactatcttcctactgaagtcaaagtaaagtaaaagtgatttcaaggggacttcctgaacactaaacacaaagtagaaatctgtgagcttaattaatatcttcaagagtctctcatgggcagaagcatcctcctctcgagagatctaaaatgtacaaaagtgtaactgatgtgaacaaatgttatccctctctgtggtagttttgtaataatgccttacagacagcaggcactactcagtgtttaaagttcttctacatacactttatcatttaatccctactctgtgaaatagatgttactcttctcactttacagataagaaaactgagtctcagagaaattatggcttgtcctgggtaagtaacaaagcctgtgtaatattctaaagcaaaagaatgaaactgtaatgatgaaactttctatttcattaggcttagaggataccttttttttttttttttcatttgagatggagtctcactctgtcacccaggctggagtgcagtggtaggatctctgctcactgcagcctctgcctcctgtgttcaagcaattctcctgtctcagcctcctgagcagctgggactataggcgcaagccaccacccccagctaatttatttatttatttgtatttttagtagagacacggtttcaccatattggtcaggctggtctcgaactcctgacctcaggtgatccaccctcctcggcctcccaaagtgcttgggttgcaggcatgagccccacgcacccagccaacacagtttaaagcacaaaagcgttttcccatcaagcaatcacatcatctagtatttctcaaacatctacacccaactattcccattagaagggaaaactaccccatggaatctggatgatagcccaaagcagccc

SEQ ID NO: 939 - DNA, 4001 bp, Homo sapiens
ccccctttactatgtatctcagtaggacgccaatcattctgctctttattcagagtccgacacaagcccccacgtccatagccaagttttccccggtttcccagcagccagtgacttctgtagcattaggattcttatagtagttattgtctacatttctcagcagattgaatatgtactgcctcttactactggactgtttattcttaaatgtgtacagtatggatttatgtcgtctatatattatgcatttatttgtcttcttcgttgtgatggtaagctcctggagggcaagtcttgcatccactgctttgctggcaacccgactggtaagcttctggaaggcaaggcttgcatccagtgctttgctggcaacccgattgctaagtaccgtgttttaagcttagttcagtctcaagtgtttgcagccacatctgaagaccaataaagcaactgctggtttatcctttgggagctgacagaatttcttctcccaaatacatacacagtaaaatcataagcctggaatgaagaaaaaaaaaatcttacgggcaatgcaatggctgcaaaactataaggattagaaatgtgaacccacattttaatccaaattagggcaatttagaggtggtagcgtaaagaatagcttgctgtaatatacgccatgctgatacagaattggcttttggccttgtcaaaattaaattgtgctttctgtattgatggtgggcatgtttctgcaggtctctcattctaagctacaacaggccctaagaggtagaagtcacatacctgaattacctgtgaagttgctttcagatcatatcgttggttcactcttacagaaggatcactttaaaatatctctgcatttgtatccttgcaatgccacaactaaaagacagttatctcataggtccttgattaaattaggaggctttttattgaacacaagaaatgatacttttcaggcactgggcagataacttgctagaaaggcattttttaactgtgctaagattgagctgagtgcgtggctggagacaccacacaacacggacccttgctaaggcatctagtccacccgcttgttatgtagagggtgaaatgaagcccaaaacagtcaatcgtgaactctaagccgatcaggtgggaaagccggcatctctagaatgaaaacctaaggctgcttctcccactttgcctgagcaaatatagtgagattacacagcaaggcatgtgtaaattgccagtgcctatttctcagaaccagatttggtgatcgcaaagactgacgtggccctctaggtgtgcctatactgcaccagaagagcaagccgagaaagcagtgctcaaacctagagcattcaacctttcataccgataaaggctttaaaaaaaaaaaaaaaaaaaaaaaaagcccaggtaagtgaaaaagccgctttcggtcaacgacttaagtctttacggctgtgagcgctatgggccgcggtagctttccgttaacttcagatccgattgtcgccccactgccaaagttaccttccaacatcgttactgttgcactttacgcagtcaagtgtccaactcctcagatgagcaagtggtcggccctaaaaagggcctttgggatcgaaacgtgcaaagctggagcggcggcctagcctccgaagccgtacagggtgcgcccctggcgcttgagcgcgtacaccacatccatggctgtgacggtcttgcgcttggcgtgctcggtgtaggtgactgcgtcccgaatcacattctccaggaacaccttcagcacaccgcgggtctcctcgtaaatgaggccagagatccgcttaacgccgccacgccgagctagacgccgaatggcaggcttggtgatgccctgaatgttgtctctcaagaccttgcggtggcgcttagcgccccctttgcctaagccttttccgccctttcctctgccggacatgaccgctggagcccgatagacagcttctgtcaaggcgagcaccgtcttcccctgatatacaagagtatcggaccagattgaaaaccgaaagcgcgccggcgggaagcgttctcaattgtccccgccctctcgacatttcgtcatttcttttctgttttcctctccctcctcctccactctgctcaggtccctctcactcttttttttttttaaccgctacgccacagtccccgggagaattcagatcccaaccggggcttccggattctgtagtggctttggcctgtgtctggtctgaggacgcccggaaggcattgcactgaggctaagggaaaggtctctggagggagcctcaggaagagcaaatggaggccagagactggcaggagcgcgccagcgcaggatttaatcccgacgagcggattcagagccgtgcttatataaagcttcaggaagcgccgttccgacgatgaggtcgacacgcgagaggcgacctcaagagcggcggcgccagggatctgtgcgccaagggaggacgggagggagcaggttcgccataattcctggctccaggctctgttttgttggaccgagccactgtattttagctcacacaggagaattctggccctgggaaaattggtctcagcatgctgccaagctttctcatggacgtcagcgaatcccaacacactgtcggtcaaagccgtgctggaagaaacaaaacagttctccctcggtagaactgagaggggattggtccagggcccccgccgataccaaaatccaggttgctcaagtctctcatagaaagtggcgtagtatttgcacataactatgcacatcctcccgtgtactttaaatagtctctaaattacttcgtaacacctaatccagtgtaaatgctatgtaagtaattgttatactgtttttatttttactatcttttgttgtacttttttttaaaaaagaaattcatttgtttaatattttcggtcttggggaacccgcgtatatggagggcctgctacatagagaagactgagggatattctgtgcatccgtttctacggatcctctaaatcggcctttgttttcagccaggatttagtgcccagctgtgtcctttggaggccccacatggagctagcaaagtttgctaaatcgggttttgcaagaggactgtctgctccatactgggagtagttaccgcaaactgccctatgaaattggttggggttcttactgttagcatgtttattactttatcagggctctctgtaggagagtctatgagaaaatcttctggtttctgctgaaagaatcgtgttttgttggggtttttttcccgaaaaatattatttttaaaaactcttctgtgccctgtttaatctctcccttggatccaccttctgtgtgctcataaatcgtaaatctgtattcagacttctggactcgagacacgtagatccacctggtggttcttcagtcattttaagcccaaaactcaaaatctcccgaaatcaaaatgtttaaacttataatctccagggtgtgactcacgggggatgaggggagcaattctctccctccccgcataaagctggttctcctgtctgctcattgaacggttccactgcgcatcacagcatctacatgcctaaaccaacaccccagcattggcaacagatatcttcctctcccttggctgcttcaggacagggaagaaacatgcttgcccttttctgactctttagtaactctggccgaatctatcacattattttacatctctttacatcttactactcccccatcttggctgtgtgttccctactggcagtgatttttgtttattcatttttgtaaactgacacttagttcagtgtccaatataagctcaacaatagtttataaaaggaaaagttcctgcctttgattgcttttaaacactattagaaaagacataaccaaattgcaacatgataaaacaaccgcaaaacaaggctgagagaagtggtgatttctg

SEQ ID NO: 940 - DNA, 4001 bp, Homo sapiens
gccccctttactatgtatctcagtaggacgccaatcattctgctctttattcagagtccgacacaagcccccacgtccatagccaagttttccccggtttcccagcagccagtgacttctgtagcattaggattcttatagtagttattgtctacatttctcagcagattgaatatgtactgcctcttactactggactgtttattcttaaatgtgtacagtatggatttatgtcgtctatatattatgcatttatttgtcttcttcgttgtgatggtaagctcctggagggcaagtcttgcatccactgctttgctggcaacccgactggtaagcttctggaaggcaaggcttgcatccagtgctttgctggcaacccgattgctaagtaccgtgttttaagcttagttcagtctcaagtgtttgcagccacatctgaagaccaataaagcaactgctggtttatcctttgggagctgacagaatttcttctcccaaatacatacacagtaaaatcataagcctggaatgaagaaaaaaaaaatcttacgggcaatgcaatggctgcaaaactataaggattagaaatgtgaacccacattttaatccaaattagggcaatttagaggtggtagcgtaaagaatagcttgctgtaatatacgccatgctgatacagaattggcttttggccttgtcaaaattaaattgtgctttctgtattgatggtgggcatgtttctgcaggtctctcattctaagctacaacaggccctaagaggtagaagtcacatacctgaattacctgtgaagttgctttcagatcatatcgttggttcactcttacagaaggatcactttaaaatatctctgcatttgtatccttgcaatgccacaactaaaagacagttatctcataggtccttgattaaattaggaggctttttattgaacacaagaaatgatacttttcaggcactgggcagataacttgctagaaaggcattttttaactgtgctaagattgagctgagtgcgtggctggagacaccacacaacacggacccttgctaaggcatctagtccacccgcttgttatgtagagggtgaaatgaagcccaaaacagtcaatcgtgaactctaagccgatcaggtgggaaagccggcatctctagaatgaaaacctaaggctgcttctcccactttgcctgagcaaatatagtgagattacacagcaaggcatgtgtaaattgccagtgcctatttctcagaaccagatttggtgatcgcaaagactgacgtggccctctaggtgtgcctatactgcaccagaagagcaagccgagaaagcagtgctcaaacctagagcattcaacctttcataccgataaaggctttaaaaaaaaaaaaaaaaaaaaaaaaagcccaggtaagtgaaaaagccgctttcggtcaacgacttaagtctttacggctgtgagcgctatgggccgcggtagctttccgttaacttcagatccgattgtcgccccactgccaaagttaccttccaacatcgttactgttgcactttacgcagtcaagtgtccaactcctcagatgagcaagtggtcggccctaaaaagggcctttgggatcgaaacgtgcaaagctggagcggcggcctagcctccgaagccgtacagggtgcgcccctggcgcttgagcgcgtacaccacatccatggctgtgacggtcttgcgcttggcgtgctcggtgtaggtgactgcgtcccgaatcacattctccaggaacaccttcagcacaccgcgggtctcctcgtaaatgaggccagagatccgcttaacgccgccacgccgagctagacgccgaatggcaggcttggtgatgccctgaatgttgtctctcaagaccttgcggtggcgcttagcgccccctttgcctaagccttttccgccctttcctctgccggacatgaccgctggagcccgatagacagcttctgtcaaggcgagcaccgtcttcccctgatatacaagagtatcggaccagattgaaaaccgaaagcgcgccggcgggaagcgttctcaattgtccccgccctctcgacatttcgtcatttcttttctgttttcctctccctcctcctccactctgctcaggtccctctcactcttttttttttttaaccgctacgccacagtccccgggagaattcagatcccaaccggggcttccggattctgtagtggctttggcctgtgtctggtctgaggacgcccggaaggcattgcactgaggctaagggaaaggtctctggagggagcctcaggaagagcaaatggaggccagagactggcaggagcgcgccagcgcaggatttaatcccgacgagcggattcagagccgtgcttatataaagcttcaggaagcgccgttccgacgatgaggtcgacacgcgagaggcgacctcaagagcggcggcgccagggatctgtgcgccaagggaggacgggagggagcaggttcgccataattcctggctccaggctctgttttgttggaccgagccactgtattttagctcacacaggagaattctggccctgggaaaattggtctcagcatgctgccaagctttctcatggacgtcagcgaatcccaacacactgtcggtcaaagccgtgctggaagaaacaaaacagttctccctcggtagaactgagaggggattggtccagggcccccgccgataccaaaatccaggttgctcaagtctctcatagaaagtggcgtagtatttgcacataactatgcacatcctcccgtgtactttaaatagtctctaaattacttcgtaacacctaatccagtgtaaatgctatgtaagtaattgttatactgtttttatttttactatcttttgttgtacttttttttaaaaaagaaattcatttgtttaatattttcggtcttggggaacccgcgtatatggagggcctgctacatagagaagactgagggatattctgtgcatccgtttctacggatcctctaaatcggcctttgttttcagccaggatttagtgcccagctgtgtcctttggaggccccacatggagctagcaaagtttgctaaatcgggttttgcaagaggactgtctgctccatactgggagtagttaccgcaaactgccctatgaaattggttggggttcttactgttagcatgtttattactttatcagggctctctgtaggagagtctatgagaaaatcttctggtttctgctgaaagaatcgtgttttgttggggtttttttcccgaaaaatattatttttaaaaactcttctgtgccctgtttaatctctcccttggatccaccttctgtgtgctcataaatcgtaaatctgtattcagacttctggactcgagacacgtagatccacctggtggttcttcagtcattttaagcccaaaactcaaaatctcccgaaatcaaaatgtttaaacttataatctccagggtgtgactcacgggggatgaggggagcaattctctccctccccgcataaagctggttctcctgtctgctcattgaacggttccactgcgcatcacagcatctacatgcctaaaccaacaccccagcattggcaacagatatcttcctctcccttggctgcttcaggacagggaagaaacatgcttgcccttttctgactctttagtaactctggccgaatctatcacattattttacatctctttacatcttactactcccccatcttggctgtgtgttccctactggcagtgatttttgtttattcatttttgtaaactgacacttagttcagtgtccaatataagctcaacaatagtttataaaaggaaaagttcctgcctttgattgcttttaaacactattagaaaagacataaccaaattgcaacatgataaaacaaccgcaaaacaaggctgagagaagtggtgatttct

SEQ ID NO: 941 - DNA, 4001 bp, Homo sapiens
taatgaaaagatctctggaaggctacaccctctcctggccagtccttgcagttttgttttactgaaatggtgcccactcgtgatacacactgtgaatattgtgctgtttagatccacactgttggagcagctgcttaccaatttttggttcaaatagtttcatagcactgggatattttctaaagacatgcagatttgtggttagctggtgtccaggaagccctgacttgagtagacccaattttagtagggtaaatataaattatataatattcctgaataattttactggcctgtatttattattacaataaatacttaataattgctaattaccctgatctgataataaatgtattcaaagtatcactatgtaccccatataatatgcaattgttaggtgtcaattaactaaatactagcactttggggattaaagaaaaaataaaaacaaagtaggaattatccatattttgagaaatagattaatgaaaactgtacagataacaacagaagaataacactttctgagctctgattttgtggcaaacattttttaagggattatcgtggattaaatcaatgaacctctctcctccaggatttaggggctattaacacagccatttcagttaatttgcctggaggtctccgacgctcttaaaccctccattttataaggaaaaatgtagttacaaaccgttattttcctaaagtccacatgtatcatcattcatctggttctaacaatactcattttaaatttgcttaactcgcaaatttagttttccttttcaaaaacagtgtacaaattattttgttctccaattttagcaatcaatttaaggggatctttgattaatgtttgaccaacccgaattaaacaaactaaattcctttaaataattatcctattccaaattaagtcttcttaaaaggtttatacctttcagcatctactaatctggttccttttaagtactgaaactttcctcatgacctttagaattcccagccaaataaattaaatcttaacactggtggagctcacattgttaaaacttagcaatttaaatagaaatccatagacttactcttcagaattaaagtgcaaactacttagagatcataaatacttttaatatcagataaatcattaagaaattgcattctgtacttgatgaccacacgggaaccttgctagagtcaagagaacttgtcactagtaattatgaagacacctttacggtgagcgttattaaaaccctactagaggttttgggtgggactcaagagcaaggggtggccacctgtggacgagggttccctgttgttaacagaacacgttgcccacctcgcaagtatgcagcccaatcagtccccagggtctcggttcccgttgcgcccttccccatggccactgcgctcattcatgagcctagggtgatcaggcctccggcctataaagaactgcaggatcagtgcggctcttttctcgagatagtaggtggctctgaaaagagcctttatgtccatcaaaggggccccgggggcggcgggcggcctcacttgcccttggccttgtggtggctctccgtcttcttgggcagcagtacggcctggatgttgggcaggacgccaccctgcgcgatggtcacgcggcccagcagcttgttgagctcctcgtcgttgcggatggccagctgcaggtggcgcgggatgatgcgcgtcttcttgttgtcgcgcgccgcgttgccggcaagctccaggatctcggcagtcaagtactcgagcaccgcggccagatagaccggggcgccggcgcccacgcgctccgaatagttgcccttgcggagcaaccggtgcacgcggcccacggggaactgcagccccgcgcgcgacgagcgcgacttagccttggcgcgcgccttgccaccctgcttaccacgaccggacatttccgagtcaaggaaaaaagacaacggcaaccgaaaagcgagactaaaaacaagagggcagtgaaggccagcgagcccttatgtatggtacagaggtaggctagaccgcggcgttcgattggatggctatggtagccaatcagaaaaagaacctggcactcctaatttgcgtattcctttcccagcgatgacgtagaacaacgtttgatccaatcagaagtgagcaaatcctgagccttcatttgaatacaaaacgtacaaatagagttactccgagcgccgcgcgtttctgtttggagagactcagccatcatgccagacccgtccaaatcggctcctgcgcccaagaagggttctaaaaaggctgtcaccaaggcacagaagaaggacggcaagaagcgcaagcgcggccgcaaggagagctattctatctacgtgtacaaggtgctgaagcaggtgcaccccgacaccggcatctcgtccaaggccatgggcatcatgaactccttcgtcaatgacatcttcgagcgcatcgccagcgaggcctcccgcctggcacactacaacaagcgctccaccatcacgtcccgcgaagtgcagacggccgttcgcctgctgctgcccggcgagctggccaagcacgccgtgtccgagggcaccaaggctgtcaccaagtacaccagctccaagtgaggcgttcctcggcgtcctgaacccaaaggctcttttcagagccacccacacgatcaagaaagggtttcgaacacggtgaagggttatgtaacctaatgtgtctccatgcaccctagcggttgccgggtgcggccgaatctgagccgtgtgtgtgtgtgtgtgtgtgtgtgtgtgcgcgcgcgcgccggcacagaacgagaaaaactgctcgttacagaaatcggggtagaaactgctcaggtgatgtagctcagtaatgttgggaggcgatcaaggaccccctctccatcccctccctccgcgcagagctattaactcacgacgagatttcttttttttttctttctttctttttttttttttttttttctagaagaagtctcgctctgtctctaggctggcgtgcagtggcgcaatctgggctcactgcaacctccgcctcctgggttcaagcgattctcctgcctcagccttacgagtagctgggattacaggcacgccccaccacgcctggctaattttttgtatttttagtagagacggggtttcaccatgttggccaggatagtctcgatcttctgacctggtgatccatccgcctctgcctcccaaagtgctgggattacaggcgtgaaccaccgcacctggccccaaatgtcttttataagcaagtggtgcattcctggatgttgagcgcttgcgcccggttcaggaccgggtccaaatgaggttggcgtgcgccgtgcaggtgaggagtgcgggtcacctccccccaaaagaccctgtgccaacctccccaaccctacccgccccccatgggcgaggccagacgtggcgcaagaccacgggctctgaggccatgggtgttgtcactttcccctggcggtggtgcctggctctgcatttgcttaagacttttccatccctgcctggaccagacagacatgtttagatttaagcaatgaacattccgggaggatattttcctggcaggataccgcgatggcaggatgtttgataccgaatcgaagcacggcgtcaaagcagcgtcctgcgcgggggagccggatgtaataagcgaccccagctgccggtaactttaacccttatgggagtgggggtgggggaaggggttaatttaggaggaaaagaattccctttttctgagcaaatgtagctgcctccctctttagccacattattttctgcgaggcgttagcaacgcagaattcctttcctaccccctccaaattcacggcatttatttggggagtgccattttggcgcaggaaagctctttggcacgaagagttttcactttggaaagggcatcgtttacgttttcatgac

SEQ ID NO: 942 - DNA, 4001 bp, Homo sapiens
ggcaggagaatcgcttgaacccgggaggccgatgttgcagtgagcagagatcgcgccattgcactccagcctgggcgacagagcaagactccgtctcaaaaaaaaaaaaaattatttctcatttaactttattgaatttttattccctgctggaaatggtgacacaaacgctcagtacttcgaattttcacaacggtttgaggaagcaattactggaaatcttctttttctaaagaagaaaagccaagtcatgaaaacgtaaacgatgccctttccaaagtgaaaactcttcgtgccaaagagctttcctgcgccaaaatggcactccccaaataaatgccgtgaatttggagggggtaggaaaggaattctgcgttgctaacgcctcgcagaaaataatgtggctaaagagggaggcagctacatttgctcagaaaaagggaattcttttcctcctaaattaaccccttcccccacccccactcccataagggttaaagttaccggcagctggggtcgcttattacatccggctcccccgcgcaggacgctgctttgacgccgtgcttcgattcggtatcaaacatcctgccatcgcggtatcctgccaggaaaatatcctcccggaatgttcattgcttaaatctaaacatgtctgtctggtccaggcagggatggaaaagtcttaagcaaatgcagagccaggcaccaccgccaggggaaagtgacaacacccatggcctcagagcccgtggtcttgcgccacgtctggcctcgcccatggggggcgggtagggttggggaggttggcacagggtcttttggggggaggtgacccgcactcctcacctgcacggcgcacgccaacctcatttggacccggtcctgaaccgggcgcaagcgctcaacatccaggaatgcaccacttgcttataaaagacatttggggccaggtgcggtggttcacgcctgtaatcccagcactttgggaggcagaggcggatggatcaccaggtcagaagatcgagactatcctggccaacatggtgaaaccccgtctctactaaaaatacaaaaaattagccaggcgtggtggggcgtgcctgtaatcccagctactcgtaaggctgaggcaggagaatcgcttgaacccaggaggcggaggttgcagtgagcccagattgcgccactgcacgccagcctagagacagagcgagacttcttctagaaaaaaaaaaaaaaaaaaagaaagaaagaaaaaaaaaagaaatctcgtcgtgagttaatagctctgcgcggagggaggggatggagagggggtccttgatcgcctcccaacattactgagctacatcacctgagcagtttctaccccgatttctgtaacgagcagtttttctcgttctgtgccggcgcgcgcgcgcacacacacacacacacacacacacacacggctcagattcggccgcacccggcaaccgctagggtgcatggagacacattaggttacataacccttcaccgtgttcgaaaccctttcttgatcgtgtgggtggctctgaaaagagcctttgggttcaggacgccgaggaacgcctcacttggagctggtgtacttggtgacagccttggtgccctcggacacggcgtgcttggccagctcgccgggcagcagcaggcgaacggccgtctgcacttcgcgggacgtgatggtggagcgcttgttgtagtgtgccaggcgggaggcctcgctggcgatgcgctcgaagatgtcattgacgaaggagttcatgatgcccatggccttggacgagatgccggtgtcggggtgcacctgcttcagcaccttgtacacgtagatagaatagctctccttgcggccgcgcttgcgcttcttgccgtccttcttctgtgccttggtgacagcctttttagaacccttcttgggcgcaggagccgatttggacgggtctggcatgatggctgagtctctccaaacagaaacgcgcggcgctcggagtaactctatttgtacgttttgtattcaaatgaaggctcaggatttgctcacttctgattggatcaaacgttgttctacgtcatcgctgggaaaggaatacgcaaattaggagtgccaggttctttttctgattggctaccatagccatccaatcgaacgccgcggtctagcctacctctgtaccatacataagggctcgctggccttcactgccctcttgtttttagtctcgcttttcggttgccgttgtcttttttccttgactcggaaatgtccggtcgtggtaagcagggtggcaaggcgcgcgccaaggctaagtcgcgctcgtcgcgcgcggggctgcagttccccgtgggccgcgtgcaccggttgctccgcaagggcaactattcggagcgcgtgggcgccggcgccccggtctatctggccgcggtgctcgagtacttgactgccgagatcctggagcttgccggcaacgcggcgcgcgacaacaagaagacgcgcatcatcccgcgccacctgcagctggccatccgcaacgacgaggagctcaacaagctgctgggccgcgtgaccatcgcgcagggtggcgtcctgcccaacatccaggccgtactgctgcccaagaagacggagagccaccacaaggccaagggcaagtgaggccgcccgccgcccccggggcccctttgatggacataaaggctcttttcagagccacctactatctcgagaaaagagccgcactgatcctgcagttctttataggccggaggcctgatcaccctaggctcatgaatgagcgcagtggccatggggaagggcgcaacgggaaccgagaccctggggactgattgggctgcatacttgcgaggtgggcaacgtgttctgttaacaacagggaaccctcgtccacaggtggccaccccttgctcttgagtcccacccaaaacctctagtagggttttaataacgctcaccgtaaaggtgtcttcataattactagtgacaagttctcttgactctagcaaggttcccgtgtggtcatcaagtacagaatgcaatttcttaatgatttatctgatattaaaagtatttatgatctctaagtagtttgcactttaattctgaagagtaagtctatggatttctatttaaattgctaagttttaacaatgtgagctccaccagtgttaagatttaatttatttggctgggaattctaaaggtcatgaggaaagtttcagtacttaaaaggaaccagattagtagatgctgaaaggtataaaccttttaagaagacttaatttggaataggataattatttaaaggaatttagtttgtttaattcgggttggtcaaacattaatcaaagatccccttaaattgattgctaaaattggagaacaaaataatttgtacactgtttttgaaaaggaaaactaaatttgcgagttaagcaaatttaaaatgagtattgttagaaccagatgaatgatgatacatgtggactttaggaaaataacggtttgtaactacatttttccttataaaatggagggtttaagagcgtcggagacctccaggcaaattaactgaaatggctgtgttaatagcccctaaatcctggaggagagaggttcattgatttaatccacgataatcccttaaaaaatgtttgccacaaaatcagagctcagaaagtgttattcttctgttgttatctgtacagttttcattaatctatttctcaaaatatggataattcctactttgtttttattttttctttaatccccaaagtgctagtatttagttaattgacacctaacaattgcatattatatggggtacatagtgatactttgaatacatttattatcagatcagggtaattagcaattattaagtatttattgtaataataaatacaggccagtaaaattattcaggaatattatataatttatatttacccta

SEQ ID NO: 943 - DNA, 4001 bp, Homo sapiens
taataaagcctttcacaaataaatgattccaacctgtaccagagggagacaatccctacatccttatcctcacagccatcctcaggttttcctgacataagtctactattggatctgtggcctgctgccctagctgtaggatttctcagcaagttggtctctgtgtctctcatccccagagcactgccagactactttgtggcgctgggaagcctgtttcaaagtgctgggcacatgggccacgcctgtctgcgactgctcagtaaactgacttccagggcagagtgccctctttgaactttgggctggggtttcccagtattgatttcacttaggaattaacaatgcacatgcctagctgggcttctcacacacaactagctagtcatctaccctaacagaagacagggtgaatttacaacatacatgactagccagccttttaactgaatgggagattgggtatgttaacacatacaatgagatggacttctaacccgagatgggccaacaccacagctacatatgtgtgcacatgggtgcacgtgcacacacacacacccctagccagccttctaacctaatgggagatagcccaagttaaaaagatacacaactagccagccttctaaattaacaggaggtaggctgagttaaaacacacaagtagctggacttttttttgtttttttttttgagattgagtctcgttctgttgcccacgctgcagtgcagtggcatgatcttggctcactgcaacctccgccccctgggttcaagcagttctcctgcctcagcctcccaagtagctgggattacaggtatgcgccaccaaacccggctaattttagagatggggtttcaccatgttggccaggctggtctggaactcctgacctcaggtgatacacccgcctcggcctcccaaagtgctgggattacaggcgtaagctgctatgctggtgaagtagctggacttctaacttaaaataggccaagataatacatactacttgctggccttaacaggagatgggctgtcaaggcagaagactagctggactggtaacctcactggaaacaagctgcgtgtacacacacacacacacacgcaggacttctaacctaatttgaaagaggctgagctgagaacacacaagaccagccagccttccaacctaactgtagataggctgagttgacacaactagctggggttgcttacctaactggagatagaccaattaggctaccctcaacaccccgtccccaaaacagaccaaccatgattcttatctaaacggataggccaagttagccccacacactactagctggatttgtgactggagacaggctgagaggtaacgcgtgtgagtagctggcctcctaactggacagggtgaacacaggattcaccagcctcccaccctaatcagaagtaggtaagccagcacaggccagcggaaggaaccccccgaaacccaagagactagcttgctacagcaactcttcgaccaggtgggtggctcttaaaagagcctttggggtgaacgttgcgcaacctctcaggtggcgagatagccctcctaggcccgctccccgcggatacggcgtgccagctggatgtccttaggcatgatggtgacccgtttggcatggatgacacacaggttggtgtcctcaaacagccccaccaggtaagactcgcacgcctcctgcagcgccatcacggccgagctctggaagcgcaggtcggtcttaaagtcctgagcgatctcgcgcatcagccgctggaagggcaacttgcggattagcagctcagtggacttctggtagcggcggatctcgcgaagcgccaccgtgccgggccggtagcggtgcggcttcttcacgccgccagtggcaggtgcgctcttgcgagccaccttggtggccagctgcttgcgcggcgccttgccacccgttgacttgcgcgcagtctgcttggttcgggccatgaatccgaaactgttggccccgcggtgtcctctgcccagacctcagcggattgctcgcttttatagagcttgccgcgttcccattggctggcctcaggtggcgtgatggcccactgctctctgattggcccacagggaactccactcgggcgcctctcccttatattcatgcctgttggtcgtggccaccagagctggcaccagcattgtgaagggttgatgcgggtaggccgcggtggtggggatcatctctctccagcacaagcttcctcatgtcttctcagcgctcctcttctcccttccccatgacttgggtggcaagagccttccagaagccagcacatggcattccacttttttaaaaaattaatttatttttttattttttgagatggagtttcactcttgttgcccaggctggagtgcaatagcgtgatctctgcttactgcaacctccacctcccaggttcaagcgattctcctgcctcagcctcccgagtaactggaattacagggattacaggtgtccgccaccatgcctggctaattttttgtgtttttaatagagatggggtttcaccatattggccaggctggtctcgaactcctgacctcaggtgatccacccgcctcggcctcccaaagtgctgggattacaggcatgagccaccaggcccagctggcatttcacttttttttttttttttttgagacggagtctctctctgtcgcccaggctggagtgcagtggcgcaatcccagctcactgcaagctccgcctcccgggttcacgccattctcctgcctcagcctacagagtagctgggactacaggtgcccgccatcatgcctggctaattttgttttgtatttttagtagagacggggtttcaccatgttagccaggatggtctcgatctcctgacctcgtgatccgcccgcctcggcctcccaaagtgttgggattacaggcgtgagccagcgtgcccggccggcattccacttttacacagtgacaaagctctgggatgcagccagagttaaaggaatctcccactttttatgacctgcaaagaactcccttacctgtacggcttagatgagccttaggattctgaagaaggtaaagatgtgcctttctggcatattgtctattttgagataaaggcacttaaaaaaaaaaaagaagaagcaggtgtaggaagatcattctgaatttcttgttgtttcttaaatacaagagatgaaattcccatatgaaagatgttctccttatagtaaaagcaagggaacgttcttatcatcaaggacgggaggtggaagcttccaaatctcctccaactctcaagttgaaatttgatccctaaagttggagcccagggaggggggggccagtgggaggtgtgtgggtcctggggtgtcaccctctgaatagagtcctgccctcctttagggtgagttttcactctgttggttccctgaagagctggtgttgaaaagagcctggcacccctctcccctctctctctggcgtcctctctcgcggcagccctgtgacctctgcacatacatgggttccccttcaccttccaccatgagcagaagcagccagaggccctcaccagaagcagaggtgggccctatgcttgcttccttcctttctccctccctcccttcctttctccttccctcccttcctcactccctcccttcctttctccttccctcccttcctttctccttccctcccttcctttctccttccctcccttcctttctccttccctcccttcctcactccctccctcccttcctttttttcttctcccttcccctcccctcctttccctccttttttcatcttgctctgttgcccaggcccctcttacctcagcctcccaagtagctgggaccacatccagctaatttttaaatttttaatttttttgtagagatgggctgtcattatgttgcccaagctggtcttgaattcctgagttc

SEQ ID NO: 944 - DNA, 4001 bp, Homo sapiens
cacagtatagcccaaccccagagcacaagtgacaccctagtggacaggaactcctccctacactggctgctcagcaggaccatgaagaacagctgggacctggcctattaccttggcttcaggattcattttctgcctggaattgggaaactggaggccctgcaggggtccttctcctgggtccaactgtctccagggtgcaagaggggtgaaattaccaaatgaaagttcagataagcaattactggctgaaagagacacaggagggtcttcagatcaacactgacccagagctaataccacactgtcctcagagggacacacgatcactgacctgtattcttcacatttaagttgctagaattattcctccttgcccccactctctccctgcccccagcatacacataattacataaagacgtcttaaacaactgtagcacccaacttcttcagtctgggggagagccaggagatggtggggagctgtttgggcacacgtctgatcattacataatcacacaaacatgggctggagaacactgccatgcagatcagttcagcaaacacctcattctccctctttcctcttccctccccccgtaacacccaaaatgcacaccagagttaacaaaaccgaagcactccaggtagccagtgggcacctggctgctgtggttacaatgccaagggctaccagaaacgtcagcgtataccagaaagagggccagggtgctgctcacccagcgaccagatctgcagaccctcttcctgcaaccactgcccccgaagttcaaggaagggcctagccacagaaatattcctgacctgcaacagaaaccaaaccagctacgttaaaggaaaccaatgccgagcctccaagttcctctgcaccactgccacactcaggagtcctcagcagcctggacaatatcattagggaccattcggcaccatcagtgtttccatttaaaagatagtaaaatgtggggcataacttggaggggacactctctctgctagcagggaggcaagaatcccctatagaataggagtttggtttgggtttggttgggtcaggttgggggttgggaaatgattttgctttaggaatattttcagggggctaggattaagggggaaaaagaaagctatcccctctgtctcagcagccagcatcatacgaatctcactctcaaccaagcaggctactgcagtccgcctaaacaatccggagcagcagccaaggcagcacaagaaaacgccggtgccacggaacgcgatgcctaagccccccagccgaggctcctatggagccggccgccagtgcgcgggtgcagagcccagcagagcctgctgcaagcagcgctggagcgcacggcgcgcatagggttacagccccgccgccgccgccgccgccgccgcctgtgattgacgcgcgggggtcacttgaggctcgcgccgctccccagcaccaggccgagcagcgcgctcagcccaccgggggcactggccgccacgcgcagcccacccggccggcccctgcgtctcggcagccggacaccttgcctaagaaaggcatacacaaaatggaatcgcagctcgctattctgcttcgcggtgcggcctcaggcaaaaacacaatcacaaggtaaaatacagcgcaaggaatccatccgccgaataaaaacccagagtcccctaccttcggccttgggatggcaaactggtcctgtgttctctgacccacggatccagccccttcttcatgaattattccggccaggcaggattttgtgcatttttttcatgaacacctgtttcaagtaaggggtaaagaccttattgaaagaattgtccttaaaaaataacctgtgcatacgtatgtccatccaggcatgcatgcgtgtttgtatacacacatatgcacacggaatagccatgtacattgaagcaccaaactaggcagctggataatgggagagtcggctggttgtgagcatgctcgcgccgggaacagatccaccctctgttattcctctgaataaatataaatcacgatcagaaacccaaacagaagcatccctcttgaattcgtgctgctgaaaaacacggaataaattcagcctgcagacacagaatctaatcagcagctgttttctgaatccagagccaacccatgcctcgcttgtcttttccactaggagtccagaccttttttgaaagggggtttaaccttttaaagacacagtacaccaattatcacttcggaatagctgtcactcccagcgcaggaagccagtcccatgcctaaaggcacagtaggcttgcacacagtgataaggatttcatttattggtgctttttaaaaaacaacatatatgtataatatatgtgcatatatatgcacatatatatgcacacatattatatatatatacgtggagagaaaaaatgcaaatgcaagtcataaatatttattgcactgatgagcttctcagtactaattggcacgttatgtaaacactatgatccttcacttctgaacacccatgttcacgggtcagacgagacagggcactcttgtcagcaagcgtgtcacacctcaccagcctctggctgcagatcaggggccggggagcctcaacagtgcctgaagggagtggggtctctgcacctgagagctcaacacgggcactccttgccctgccctgccttgctctgcagtctcagggtccatgtccacaaatcaaagaatagttctggcactatttctaaagtcgaacataatccagagccacatcgcattccaagacatactttctttcaaccagaatcaggaatcagaactaccacctgaaccttagttagagtctttacgattcagacttaggcccttcttcaagattttgttattgagttctgttgttttgtttttcacttttcttttaagggtcagcatggaggtatggaggtagaaaaacagggtagggggagagacaacctccagcctaaatttttttgaaaaaaattattcttcgagtacttcagccacccagatggtgtttactgcagttttgttctggcttttaaagaggtagcgctgagaagaaacaagagtcctaaccttgctcacgtgtgttaagaaggcaaatgtctttgacagtttctttttcaccccagccccagagctccagcatggcgctgtctgctcctccgctggttcccgcctaagagcagcggcagtggctcacctcgggagctacaggggcgctcctacagccgctccagcatcacagcccattccctcccttgcctagtcctgccaggcaaaccgtgaaaacaagtgcactgtcaccctcccacctcatcacaggcgctcctgtgtggacccctcccagcgacacacacacactctcttccttcccctcttccagggccctttggcagaaaattatcatatttcatgtgtcatcgcccaagcaagctgggtccatcactgattggctgggccctggcagccggaaatgtcaccagccacacagcgtggagctggctctcccgcggccaccacagacctgagcccaggaggctctgtgacaaggcacagacctaccacagagagcctgtcactctctccctggtccagcccctgccccctgcttctccatctacccagccccccggggaataggggctgcgaggggatggtgaaggagtctcagtgacattcctattttcccagcatgtttgagaagaaactaaagatgtctccaatcaggtttataaatttggagaacttgtttttgacaaaaacattctgtcttcacactaaaaaaaaatcagtaagactgggtgaaaacaagatggtttttttttttttgttttgttttttaccccaggagagtttactagatgctgctgtttatttcccatctaacatctcaggcaccaaggtataatcatgtcacagggctgtccgataattcagaaggtgattc

SEQ ID NO: 945 - DNA, 4001 bp, Homo sapiens
taggcagtactctggagtttttccgtacctggaaacgtgtcttggaactgatgctgaactgaatttcttgggttcgagtttaagggactcaggattgcagaagcctcgttaatgggatctagagatgcgaagaactggccggccgagggctgcaggcctgagaggtgcaccccggcgggccgcccaccggttagcagggaagtgagatctggggacaagggaaaaggatagcaggttacatctcgggcacactcacactctccgctgatttgttcctccccttccccttgccctggattcacttttattgagcgaagtcaagagagaacccgtctaggcgctgaaacctctctctcccaacagttgccaaggagcgacgcacgaaaagttcctgtgtgtccctcacgtccatatgcatgtatatagtaagtaaaggctttacataaatcggcttacggcctcactttcacgtgtcttccaagaacgccacagacgcaaaacctccgccccaaggtggccccactctgcccgctcatctaggcggttttgtttattatttacatttcctgggtgaaatttttactagaaatcagataagtgcgaaagtgtttcccaaaaatgctttagctgtcagaaaatataattctgtctctagatacattattaaagagatcaaagtcatgttagcagataattacaccaaccacttttataaatattgattctaagacgtgtttttaaagaatccctggagtcattttttgtttgttttacatagaacaggtgagttttagacctaatgttttgtagttttcttacaattcgttttcttctctcccgttttaccgatttgtccttaattgtaaaaacactcaaaggcaccccaagccagcccggggtccggggagtgggtcagtggtcagaggcctgcagcctcccgcccaagacctacctctcagcgtgttgccttctttgacttttgggtcaaattctgcagataaaatgcggtcaattccaaatttgaggtctttgctggagggggccggggcagagccactgtggtgggggttcggaaccactcgcgtccccgaggccgggggctgcagggcgccagcccggggcggaggcggaggctgttgctgctgcggctgttgctgctgctgttgttgttgcgggtgatggtggtggtaggcggctgagagcggagacagccgctgcgggaagccagccgggacttcggagggcgccaccactggggtgggtcgaagcggggatctggccgccgcttggaaagaggcgtgcgggtgaaccgagcccaagtgcgcggtgagggcggcggccgaggcccctgccaggccctccggggccgcccccagatcccccacgccggcgtgcagaatgtctgcgatgcagaaggagggctttttgacggcggcggggtccaaggggaaggagcagccgcctgggccggccgaggagcagtaagcggccgaccagaggctgaagttggaggcgtagaagggagccagcccggctgcgaacatcctgccggggtgagccgcgcggctgccgcagtccagccggactgggtgggtgggcgcgcggggaggggcgcgcgagtcccggagaaggcggcggcagccgaggacgatccgctttcgcttctccgcccgcactgaggaagagaggccgggagccctagcgccaccgagggaggaggcgagggccggatctcggccggtcaccgcctcgctccctggcctcgctttaaaggcggcgcggcgcccgcactcctcgcgggctggatgagagcgaggggcgctggggccgcagggcgggcgggggagccagggagacgggagccggacaccgcaagaaaacccaaatagctaagccctaagagctaaatttaaaacaacaacaataatagtccgttagttagggggggggaaaagtaatagaaaaaaaaaaaaactcgtctctaaaaactcccaaagttttggcaggagctttcgagtcaggcccggggtaggacctcgatccgagcgctcattggtcatcctcgtgaccaatgggagcggggagtggaggggaattaggaacaagggggcctggccggaccctagccacgccccggccacgccaaagtttttgctgcggccgcgtgggcttagtagcgcacatcgcagtgcttcttgctactctgcgtaggggccaggcagccgctccggagggctctgactctcttctaacttctgcagctccgaaccgccacggggcaaggagggttgatcacaggagctttcctgaagcgcttgtcacccggggcgagttgggggcgtggggaagggacggtaatctcactctttagggctctgcaaagcccgcctcccggtggagagcggagcgcgctttggcccctttgcttcccttctcttgacctcattctgcttttattccaggagtccgtgtcctcggcaaagcccctcatctttcctgggcccttgcccaaatgttgccgccctgagtcccggcccaactcagcaccgcgtccgcctcgtgcctcccaggagatcctccgggaagcgaggaggaggggcggccgcaaattggttttattctgagctgtcacacagtgacaaattgaacgagtgacttttcaaacaaaataagacggatggctccaaacgtctctcttagacgcagccaaacctttccccggagcctcagaggctacaaaacaggctgcctcccgaaacccgggagagcggcacgcgcttccatcctttgcaggaggttgtaggaaatgttagcctcacccctccaccacatctccggatcacgtggggttcgttgttttgcaagtgcccacaagagcagatttccgtggggttcaatactgctttcaattctgtgacagcttccccaggaaccccttgggcctggttgcaggaggagctgcgtggtggtcaacgtcttccattcgtgccttgggtctttagaacgcagggtagtggtggtggaggttttgtgcaacatcgacatatctattttaagaatttcttctctttaaattatagtcagaatgaatttccccacccctctcccaaacaaaccacaggccacccagatgagctgttcttgcacattttcaggaagaaaataaaataatacgaataatgaaaccacgaaaacttttgttttcgattgccctaataagcatctcctaacagggattctgtgacatttttatttcccttcagcacgaaggctcctcaccaaataaacccagaaaagcaagtgaacttgccatgcctatctcgagttcagggtttgggcttataaaattaatttctggtgttttctctagccccttgatgcagatgctatccttttaagcttttgactttctcctggaaaattatcaatcacttctgatcagccagcactaagatctctccctctccctctctctctccctcctcccgccctccagctctcccgctctcgctctccatctctcttttactgaaaggttttcttcccctgctccacgcaaccaggagagaggtgctatttccagagatagatgggtgtgtttggctgaaggtaggggtacctggggcgagagacgtattaagaccagtttttctgtgtcaaggtgaaggcaaaggagcgacaagtacaacatgggcaattgaggcgctggctgagggttctggtgagccttcggtgggagtgtgcgtagcggaggccgtgagccctctgctttctagtgccacttccagtttgattgcgtttctaatttgactgcaaacatttagacctcagcctaagcccaaactcacggttgtgaaagaggtgcatttactccttacccgaggcagcgccgcgcgccctcaccctctctcttaagaaataagactcccctatcagctttcaccctttccaaggtttgcgacgctccggggtgggcacgggatacagacccgggggaatgc

SEQ ID NO: 946 - DNA, 4001 bp, Homo sapiens
ttagagaaaaaacaaaatttcacttcattttttagctaacttcagactcatccatctagaagaaacatactcaaggtattccgaaataacaaaaacctcaaactgcatcacagttggcatcttgacatttaatacattgaaaatcacaacatatgaagtgtctaagacagtaaacacagtaaataatcattcaattctttattcaaatataaataatattcatgtttaaccaatgtagaaattacaaatatatgtaattacatatatgtaatgtatgtatgtgtatgtgtgtgtatatatatattacatatcccagaagagtagtacagattgttttcatcatgtgaagagcatgaaaatccgagagttctatatatctttaaatttctcccagtgccattgtttaatagttaaaacctgccatatttaatacctaccaataatttgaacttatatacttttgctaaatgcacaggaaggaatttcagattgccgatatcacactctcgttgtgaagaggttgtgtcaagttcttctagtgaagggagaatttcaaaagcaggaaaagtgtgggagaacagtgggggaggactgttaagaaatcactgcttcatttcttcaactgggcagcaacttgtgctaatgaaactcaggtggacattagactgccagccccagggtttcccttgcaaggctaccctcagctatggcaatgggggctcctataagcctcacagagaggtgctactttaaagagaaactgaaaaaagtaaataggatcatattacagtggagctgctgaaacctacggctttagggcaaaaatgaagttatttcacttcaactacctttaaaaagcacagacattccgaattacaagcaattctaccgcaggagacatggatgtaatgtttatacccatctgtgaacctatctaatgatgccctggtgcaaagatgaatagattcagttaagaaatgattggtttctctcttttcttttcatgtcttcagttccactagtagttactacttacaggcttccttgtgtctcacacaacaggttttttcccctcttaaatgagagttaccctcagagtgtgctttcaatctggatgttagcccctagagcttcgctgctataaattcgtgtccaagtctgccttcgtaattaaacatgctttagttctaaaatctaagtgagttaagtgattttgatgtcgttgcccaagatttttggttttgtttttcgtaactccacatttccaggtttgaggaccacagtacaagttccctaaacaagccatctccaccagggctgagacttaagtaggtatcaatgagcaaacccagacgccagcaagtaattctttgttacaactattttcagctgcacatttttttaaaatggttttgaaacttcctgacaaacaatttcattcacagcatgagaaataatgtaatcatgagacatagcaaagacaaagtataaatatttcccttacctggatcatggaaaggcaccaacgcaaagttgaaaagaggtcttttaggtcttttcaaagacgtctccaaaattttggaagccccttcaatcacctgaactaaatcatcatacatagaaccagtcacatcaaacacaaaagccaacgtggaggccccctcgggaatttcctcagctctgatctctgactgggggctcgcatcttgagctagggaagaataaagaagagcaaacaggaatactgtatggacaacttcccaggaaatcattttcttttttttccccctctttttccccctcagcgcctaagcactgtgctcagtcctcctcaacaacaggcagagggtttcctctcagagtaactcatcagactcttggaatctctgaactagcaaaaagtttggcgctgagaatcagacggggacaagcaccaaactcgaatccctccaggggttgggcagggcagggatgcggcagcttttgtctggatgcggcttcctcctggactgctatctgcccgcgggccctggacagcctgtggcggagtgcgggcggcgcgtcgggtccatgccccgggggcagctctgagcctgcggcgccgcggcccgaatcccgctgccctcgccgccgccgctgctctccgcctgggccagcgactgaggttcccaactttccactgtttgcagctcacgagcgacgaggggaagcctggctcggcctcgcctcctgattggccagttgccgtcctccctcctttgctctggaggcccccccggagggtgacttttccctccactgattgtagggtcaattcagtcccagggaagcgcttacggtgtcagctcggttcccaccggcaccgttcctaacctgcaaaacgctagtgtaaacaatggctttcaagaatgtgtggcaaagacccaaaccgagggacaccacactagcacaaagggaattttgtttttctattgtgtacaacgcggctttagacacctctttcctaattccccccaaaagtcaagacgccccagcccagcctcctgcctctcagcccacaactcggcccagccaggagggggagctggaaaattctctcagctgcgaggcagccacactatcgctctttgatctcctctgagactctggactgcagggaaggaagggaggacaacgctgaaggggcaagaagcccaggaagaggaaaggggctgctgagggaaatgagagacaagaactaggtagtcactaactgtagaggggaatgtgaatacaggatggaagccccgtagaaaggacaaggaggaggggcgagagaggtgtggggaaagatgagacataaaattcatattaaagagaaaattgattttttaattgtattatcaagattcacatttgctgagcagtttgaatcctacgctcagcatagtaaggcagaataatatccccgtttcagatttcctcccctggaacagtcatgcctcaggtctcagccaaagatctattggaaaggtgctcccctctatggcattttcttgccagtcaagaaggaaacctcaccctggaagacatgccaacgtttttccgtgttgtgattgctatatacgttatagtactaataacagagataagaggataagcaaagaaagtctaccatgaactaaggattctttatgtcattttaataaaaacgcatttccttcctggaaaaggagttgttgtccagatcccagcatttaaagaggggcaaacaggcatcttgatctctgtttggatgtatattagaccgcccacccaacggagatgcagcctgaggaagagttagctcccaccaaccttttgtaatctacaactgtcttctctttcagtcccagcggctgtggaacccgagtttatgatacctataagtcatgtcacttaaaggaagcagacaggccatttgggctgagtgggaatatgagaggaaagggggaaggtacttccttctcaagcagtatttagagaatgctatttgagtctcccattccgttgtttatttaaaaaggatttcattctaagtcttagagacctgagctattccaggtgctcaagggaggccacagagcctagtgattaagagttctgggtcagataccctgggttgaaagcccagctgtgacatttaactgtgtgaccttcaagaaggttaccaaactttttcagacctgtgtttactcagctgtaaatgggaataatgatagcacccacctaataaggattaaatgatctataaatgttccatgtgcacttgaaaagaatgctgttgggtggaatgttctataaatgttaattaggtcaagttgtttaataatgttccaatcttctatatccttactgatttctgcctatttgttctatcagtttttgagagtggtattgaaatatctgacgacaattgtggatttgtgtatttcttcttgcagttctatgagttttagcttcatgtatttgaagctctgtgg

SEQ ID NO: 947 - DNA, 4001 bp, Homo sapiens
tttctgagatcaaaagatgggacatgaggaagaactttaatgaaagtccacatattcatcagactctgctcaggctcagacacacacacacacacacacacacacacacacacacacacacacacacacacagagtagcttatctgtgcctcttaaccttccatccctctcatgataagatccaggaagattaacccacaatagctatcgggaagctagcagatttaagaagaaaaggcagtaaaagggaaaagctatgtcaaccttttggtgttgtcaaagttccaacttggaggatgaagcaggggaagtccttgtttaggggagcttaggaaaggtaaataaatctggcttcctaaatcaatgctgtgtgctgggtatctaagagttgcccttccagatcccctttccagccttctccaacctctcttcaaccttctctggcctgggaagctggtctgtatgagccacatcagaggatcccataccctctggtttccatctcactttggtcaatggggccctcaggagatcagagatggaggaaagttaagtcaaggcatttattctcctggatccccaccccagggtcacttggagctggttctgtgtccctggactgaaggtcactggtcctcataaggtgtcctctctaaatgactctctccttccagtacaggcattgccccctttctttatctcctcctgcctagggtggtaaaactctacttttatgagcctctgaggtctctgctactttcccacactctgccctcaccaatcattttaatttgagtggccatctgtttcctgcggggaccctgaccaaagtaccatggttttagcctttcaccatgtaggcatcagtttaatagagaagagtaatgagcttctggagatccaagtgcctggcagtcacacagcctagagcaagcatgcctgcaaggacagtagcatgaccagaccacatgcccgggaagaggtgtccaatattccctagattatgagatgacctccaggcaggagcattggtctagagggccaggtagtaaatatgataggcttggtgaaccacagggtttctgttgcaggtacccagctctgccactatacctcgaaagtaaccatagaaaatacctaaaccaatgagtgtggctatgttccaataaaaccttatttttaaaaaataggctgcaagctgggggtcgtaaatctgccaactcctcgtctacagatgtgagttcagtattttcaaacatcttgattgcagtctgcaataagaaatacattttacatcatgactcgtttacatacatacatacttaatatttatataatgcttaatatgagccagtctctcttctaagcactttatgtacctcattccattcagtcctcataacaagcctatgggagggctatttttatctccatacaaggataagtgaattcagatgaaggtagcaaagcacagagaagatatagagataaaaaatttctacttgtgtgacatactcttattttctactctgttgtagtcacctttactttatgttgttatttaaaatgccacccacagactgacctcatgacccactgatgggtcacactccaagaatggatttgaaaaacactgtccagacaagctgagagggagcttccgcctcggagactgtgagatcctctttacttggtggcagtaacatgaagtggaaagaacatggccttttaagccagacacatataagttcaaattctagctttgccatttactagctgagtaactttgggcaagtctagctcattacaaccatatctctaaaaagtagtgaggtgataataaagccatgaggattaaacaaattgaaatgataggaataaaaacagatggcactccccctctccagtgtgggctggacttagccacccactactaatgaatagaacatggaaagggacaaatagtaactttacagcggggaaatctggcagacaccactttaaccaagtgatcgaagtaagcatcatcaataacaggtcatgttgagatcacagaacccctttctgtgttgccataataacagcatctcaccgccatgatattcttcccaaaaatccatagccaaggtctatgaaaaaacattagacaaactgaaataaagaacattctaccaaatacctgatcagtacccttcaataatgtcaagattttaaaaaaccagggcaaggctaagaaactgatgcagattggaagaaaccaagaagacaggacaaatgcaatgagagatgctagactgaatcctgtgacagacaaaaagtgggccactggtggaaatctggggaaatctgaataaaatgtttcatttagttaatagtactgtaccattgctgatttcttagtttttatgcatgacccagggttatgtaagatgccaacattagggaatcggggtgaagggtatacaggacatttctgtatgatctttgcactcttatttcaaaataacatttttttaaagaaaaatctttccagttgatagcaatgtgcagccagggtaaagacaccctgctcttgatccatcatctccaggaatcacagggccagattttaccctcaattacagcagcatatgctcttagcatatctctgtcaaagtatctctcagattttgcagcatgatggaatcacctaagctttccaaaaccctcagtgctcaggccacagcaacaacagcaaacatacctggcataagcatgtgtatgtcaaatgctttgaaacttccttcatccccctcctgccccttcctctgtggagtgggactcactggttgcatttaccctctgaacaaggcatctgcaagtggcagaagaatgcctctccaaagatgctggcgtcctaagccctgaaacctgtgaatttgttccttacttggtaaaagggactttgtagataagattactctaaggatttagagctagggagatgatcctggattatcaggtgggcctgatagaatcacatggcctttgtaagaggaaggcaggagtgtcacagtcagaggagatgtgatgagagaagcagaggatcagaggtggagagagatttgaagatgctacactgctgatattgaagacaagggaaagaggccacaagccaagaaatgcaggtggctactagcagctggaaaaggcaagcaaaaggattgtcccctagtgccaccagaggggctcagtcctccccacaccttgatcttggcctgctgaaacccattttggattctaacctccagaattataacacaataaatttgtgttctttaagcccttaaatgtacagttatttgttaaggcagcaataggaaactagcacagtatctttctcctctggctgctggtctgtaacttttcttctgccattcttaacccctgcttgtgttaatgaagaagacacatttgagggtgaaagttttataccacggcatattcaatttgttgagggaaaagaacatgatatattcaatcctgcacactcttcttcactcgctgactcattaagtcactaattcactaattcacttagcagttaattcactcttacgttctttcagttcattcactcactcatgtactcacacacccatctcaataaatagctgttgagttgctggagcagtgtggctgctgctttgatggccagtgatgaacagtgtttgagggatggatgtgtcccaggaaggagggtggtagtccagggaatcatctgaattcacttggatcgctacatagtaagaaaccagatagggaggccaggccataagcagtcagtccaaggctctttggcactgacctcgtgccaggaactgttaatcaatcagatgtgagcacaatattttaataaaaatgatgatcatactttgggtacatcatctctggaagcctggaagcgtgaaaagagagattaatttatccaaggccacacagcaataagtggcagagccagg

SEQ ID NO: 948 - DNA, 4001 bp, Homo sapiens
ctcctgcctcagcctcccgagtagctgggactacaggtgcgcaccaccacacctggctaattttttgtattttagtagagacaggatttcaccaggttggccaggctggtcccgaactcccgacctcaagtgatccacccacctcagcctcccaaagtgctaggattataggcatgagccaccacgcctggtgagccatttacatattaacccatactgtcctctcaacaatcttatcaggtaggaactatcatcatccccattttactgtaagaaatctaaggccccacttgggaggctgaggcagaagaatcgcttgaacctgggaggcagaggttgcagtgagctgagattgagccactgcactccagtctgggtgacagatgacagagcaagacaccgtctcaggaaaaaaaaaaagaaagaaaagaaaagaaatctgagacccaaagagattaagtaatcttcccgaggtgacatggggagttactcactgaggcaatatctaaacctggcagtgtggctctagagcacaagctcctaacctctgggccactgttgcctctttaccaccgttcgttcggtccacagtcttctcctggttaaacatcccgttcctcctctgtaaagctctgctcagagagggtccccctaaccacacaagtactgtgccacagtgtcctgaggtatggtgtacctgcatcaacaccaacagcgaatactgactaaacccagtgttaaactacaggccagggactattattatcccaactccgtaggtgaagaaactaagcctcagaaaggttacccaaaaatcacaattagaaagtgacagagcttggacttgaacccatatctaggcctaatactaatactggttcctatgcttggaaccccatggagggccatctcattacaccaaatatttcttaaaagcttattaatatctactattgcgtttaactttccaagttggaattgccatcttcattttacacatgagcaggtggtgcaggtgaatggccaagtaaagatattaacgtggctttctgagagggacccagtgccaggagtgtatttttccctctatacagttataactccttctcaactccctaaggtaaaaataccaccaccgactgatcacttattaggagccagaacactgccagatgtgttacttacattttctctaatttccaaaacaaccccaagggaatgttgtccgttttacagacgaaagagctgaggtttagagaaagtaaataactatgtcattaagtctagaaagtggcagaactattgggacaccctagcttcagcttttattttttctgctccatacagctacgtctcccacactttttctgcgctgagaatgggagaggggaaaacatcaggatcgaacaggatcaaagtgcaattccaagggaatcacagcttggctccaatcaacgcaagtcccgctcggtaggctgggatagttccccaagcatctctaaaagcaacaacagttggaaatggagacgaaggaaatggaagcgtgttcttgattttcactaatgaagagttggagaggtctgaagttcaattagagggagaaaggggccagggtcatcggaaagggccctgggcggggaatcagggcacctaggatggcgtcccaggtctccatgacccagacaagtcactccacctctccggacctcagttttcccatccccttcaaaggatttgaggggaaaagggagggtccaggactccaacgccctcccgactctggcctgagagctgtccggcctcgcctctaagagagcagtcaccacgggccaagcccccaaccctgacagtcagagtgcctgcagggccgccgcctcggcggctcggggcacttacagcccggagggacgccaagcccaccagtcgccgcggaagcgccttcctcattgctgccatcttggcccagaatcccccgcggcagtccagctgggccccgcgtgaccgatggctcgtctggtgggcgcggccccgcccccgcccctccgccgtgacttccgaagctggctccacccccagcctctctccgttttgattccgagcgcctcttccatgccaggccaagtgagacgctaggaatataaagatgaacagaatcagcctggacaccatgtaatcctagcactttgggagaccgaggcgggtagatcacctgaggtcaggaattcgagaccagcctggctaacatggcgaaacccccgtctctccaaaaaatccaaaaaaaaaaaaaaaaaaaaaaaaaaaaaaaaaaagccgggcgtggtggtgggcgcctgtaatcccagctacttgggaagctgaggcaggagaattgtttgaacccgggaggcgaggttgcagcgagcggagatcgtgccactgcactccagcctgggcgacacagtgagagcctgtccaaaacaaaaaacccaaaaccaaacaaacaaaaacatgaaaagaaattaaccaaattctgtggcttcttgtgtttagagtgtgggaggtgtgaggagacacatattaatagttacacaaacagttgtgtcatttctaacttgcactataagaagcaacgatttgctactcactgttccgagttcttagcacggattaactcacgcatcacgatcttcaggattcaaacacaggcaggcagctccagagagggggcatccttagatttcataccttaaaaaaatgattaagatttatctaggtgtactttctgaagggctgaaaaaaaaaaaaatctatccaggtgaagaggatacaagaaaaactttccagacggtgtagcattcgcaatggccctgaggcaaagaaaatgctgagaacactgtttttctctcttttgttttgttggtttgttttgtttgtttgagatggagtctcactctgtcacccaggttggagtgcagtggcgcgatttcggctcactgcaacctccgcctcccgagttcaagagagtctcgtgcctcagtctcccgagtagctgggattacaggtgtgcaccaccacgcctggctaattttagtgtttttagtagaaacgaggtttcaccgtgttggccaggctggtctcaaattcctgacctcaggtgatccgcccgccttggcctcccaaaatgctgggattacaggcgagagccaccgcccccggccagagcactgttttcaaactgtatgttgtaccccactaattggtcacagtatcaatttagtgggtacaaactttatttaaaacaaagaactagaattttatctatctatcatctatctatctatctatctatctatctatctatctatccatctatatttatttattaagacgaagtctcactgtgttgcccaggctggagtgcggtggcgtgatctcggctcactgcaacctctgaccccggggttcaagcgattctcctgcctcagcctccggagtagctgggattacaagtgcccatcaccgtgcccagataatgtttgtatttttagtagagatggaggatttcaccatgttggcctgggctgaagcaatccaccctcctcggcctcccaaagtgctgggattacaggcgtgagccactgtgccaggccccaaatataaaatattgctctataaaataataaaagagtgatctaaaaaaataaaaataataataaaagagaaaaggctgggtgcagtggcttacaccagtaattccagcactttgggaggtcgaggtgggaggatcacttgaggtcagaacttgaagaccactctggccaataaagtgagaccccaagtctattcaataaataagaaaaatagccaggtgtggtggctcatgcctgtaatcccaacactttgggaggccgaggtgggcggatcacttgaggtcaggagttcgagaccagcctgaccaacatggtgaaaccccgtctctactaaaaatacaaaaattagctgggcatggtggtgcgtgcctg

SEQ ID NO: 949 - DNA, 4001 bp, Homo sapiens
gtgctttctctaaagaatgatcactttgtgtaattttaaatcatttttctcctggtgttgcccacttcaagaacatgcaccacacctttacttctgtattccatcttgcctccttcccttgtgtttcaaaattaattactacacttcaggcactgtgctgggaagggtttgtgagggttgaacaaaggggttggacaaagaaaagaagagggtgaggttcttgagacctccttgaccagtgtgaggaatgataagcacacatataacccaacttcaaggcagaatgtggtcaggcccacaaaaaggaatgtgagcaaaatctacaggagttcaaaggaagcagagatttcagtgggttggaggatcagagaagcttcgtggaagagaccgcatttgaggcaaaccttgatggatgacagacttctgccagtgaagaactggaggggaatgaaggggcagtggccacggcagggggtgactgaacaagtaaggaaccctggagatgcaggtgtataggggagcagggagacaatatgtgagaaatacagtaagtggagggcacaagtcttaccgaattttgaagacagcaaagcagatgctgagatgaaagtctcttttaggttggagttagagccaatgtgggttggattaaaggcgattagacatatagagaaaaggtgactcatgaaaagcaatattagttcaagccatgcataatgggattaactgtgaatataccagaagggaaatgggaatgattccaagagtttgaaccaagggagtcagaatgttggggaggattgatgtatgtcttttggctgatggccaactattgctattaaaacaagaaacccacatcaatctcttcttcacaaatatagaaacaggttaaatcctgagctgggacatttaacccacatgcagggtttggcagtgcatggggagagtgagatgatggtagcataatgaaaaatataagaaagctatgtgcatttgcctctaccatgcacatctatacacccaggttccttgggtatttggcaaggaaagacactaggtcaaaatcatttttctaaatatttagtagtcatagaatatagagtaaaaatgtaaggaaataaagaactagtcccaatgtgtagtggatggtttggggattagacagaaacacataggtggctgggagcctgaggcactaacgatagctgtgttaccatcatcgctgacaatggaaaacataagcacttgagccatgttcagggactatttacaaagaaaaggagtgtgcatgttcttcttgcaaagagcatgtacacatacacacataaacacacatttccccttttcataaaattggaacacaaggcaaacacagcttctcatcctcagtccatttctgattctgctgcagtgatataaagtcactggttttactaacactgcagttggcacaaggtcctgtggttctaggcagaggctaggggtgaaggtgggaatggtggtgtagagaggaaagctgtggcctggtactgatatttctactgcttcatgcagctggcagagtaaaagttgccattgctcacaaacacagcatgtgtcagaggtttgggctcttctcactctacagctgaaagggattgtctgtttagagatgaggtaactgagaccctttaaagttaacttgcttgtctaaggctgctgtgcacaagccttgccaaattttgagtgggattctagtgagttttccccaatagcagggaaaaactatcttttactagttacaaggtgcttctcagaaagtgactcacctttggtgggctactgggagcaggcgagcaggtgtgagggaggtttcctgcaccgctcttgtcagttgcagaatgcgcttcactggagtcaacagacgctgcatctccagaggagcaagcagaaacccagcagttcagaaacccagcagaaaccttgaaagagatgcccagtggtgcccggcaggactttataaagccccaagactcctgcctccctaagccccgcctctgctcaccgtggctcagtctgcttctaaaactgggtcaaagggctcactcagaacacgggcgagtcaaagacaaacagcatctctccaacatgtacatagctgccctgctcctgagcatgtgtgggaatggctgggcattgttcctcctactccatcaggctctgtggcagccttgattctgcccagctacctaagcaggaggttatgatgttccttgttgtatcacatcccaaggtaaccctatgtgtcttgttttagaccctggctccttatctgtattactctcactgggtgttccacactcctctctgtggtgttagttgttattattttaatgtgctatgcattataagaaacatctttctaaaccaaagggaaactcttttaatagtagcttttcaaggagttgggagtgagtgttggcacataggccaagggctgggcgttagagtatgtggaacctactatatttctcctgtttattgtccacccttttacttgtacagctctacacaatttccaagtgggatgaaattagtgttgtagtaaagggacaggagcctcaaagaggtgacagtttgaagctcaatctcctaaggaggaaaggtttactttatagatgaggtcagagttatgtataaaggagtcattttcccaaagacctgcagctaggaagttgcagaatgagaactcaaccatgtcttttgactccagattctggtccttctgctttgctcttctactactcaataaaaaggctcctgccatctgattttccaaatgaatgtctccctccactcctcccacagcaccaatcttcctctaccttttgtgagtcatgcattcactccttagttcattcagtcatccccatcaccaaccccctgtctaatatgagtgtgtagggaacacagaaaagagctggagtggttcctgctttaggaggatatagttgacttcatgttcctacagacagagaatgtctaggtgcccccagcagtccaggatatctaggtcttccatcttatctttaaattcttatctccatatatcttggtgtgttggtgttctaactcaatctcctaccttgctgtgtcacctcctgctcttacactcagccttttgcaaagttctgtcgtcagtgaaattcttcatttccaatctcttctctgaaatacctgttgcttcttgtcaatccaatgcactttaaatgcttacaacaaggcctgtgtcctctttgcttcatactatctcttccagggtatttctcctcttcctcctctcaaaacccctgctgtcttaaagcacatgctacagtctgtgccacccagtgcccttattcttgcagtcaactaactgtcatgttccactgtccctcattgataaaatttaagcacatagatcactactttcctctccaccatcagtcatctcaatggatgtgagatgtcaatctccacataagataattcacctgccctagcctctcactgaagctcccacagccatgtccgtgttcatggacatgactttagcctcccactccacagtcataatgtggactttgttattacagtgtctatgccacctccaacattttagtttcatgcattccaatttccaaccacctctatattccctgctcctgtttaaagtaccctcacacctttttctcccactgagaccaccactgactcctctatgtttttagcatttgttacacctcatcacctcttttctctccttatccagatcagattaaccatggtgcctcaccataagcaatcccttgcacacactttgcaatttgtgctctctgtcggactggcctagcaaaccttcaattttggttaaacccaactcttaatctactctgcgcctgcatctgagcagctaaacatagatgaagaaaaacacaactttgtactaacttgttagctttaaatttacaaacatacatctc

SEQ ID NO: 950 - DNA, 4001 bp, Homo sapiens
aatttgctataatctttagtacttagaatttcctaagtaacagaagaataaattagtttaaaccctggggtatttaatatttaaatgcagattttcctataaactaacaacagaattcttgatcaggaaaccaacgttatgaatgacacggacgaggtaagctatccacacagtttataacctccattaatggaggcaccattatgctaattaagttaaggcactaaggacagtcctcattctgtgaaaatgatcagttccaatgttagcacttacctttgcaggggcctttttaggcttgggctctggctttggaggagcaggtttctttttttggcaggaagagaggaaaaagtgaacatcagtacaatggactgaagaaaaccacccacaaccaaccaaaagtaccaagggtagagaagtttctcctcctcctcaaaagtttttgtggttggctttcttctagaatgttggatttccagaagcccactcaaatgtcccactttggctacaggcatcagaatttcagaaccagcaaaacccaaaggggcaagagtcccaagtagaggcaatgattcaaaaccaggcactaaccataattcatggaagcaaagggaattgttttttgatgttttttagtttcagggacaagcacgaaaattcaaaagcatacacttacagcagacaacctcgcggatcttctctgtggctattaaagacaacgagaaagttagaaataggacaggtaagtcgctttgaaagtttggtatcaatttgctctagattataggagtgtaaattcaggacacaggttacggttaatcaccgagtccagtggcctctgctagtccaaggctttgacccttgaagagagaatgacttacttcgtccttcacctttgctttatctcccttagcatccccttcagcctataagaaacaagaacaaaaaactgcagattttgaggtggttcttaattacttcccaaactttagagtgctaaaaatgaaaattaaagcagtcgtccacacaacttttctaggacataaatgagtgagcccgacgttcgtataagaacgaagcgcgcgcaggagctccggctcgccgaccccgagaagcgagggctggaccggagcgcagccggggagggcagcggagcccgcaccaccgcgacaggcaggagcaacagctgcagatggcgcaaacaaaccccctccggaggcggagcccagcgccgttgctatggcagccgtcgagggcgggagagggaggcgcgcgcagcccggggaactcgtgggcggcgacagcgcgcgtctcgtgcgcggggaacgtgggcgagggggcggggccataccgcacaagccccgcccctcacggcggcggttttttggcggcagcgctttcccccgcccgccaaccccgagcgccgccttcccgccctttcgggtttgaattgcccgcccgcagggaggggagggaaggggccctcgcgatgggggagggggcacggggcgggggcggcgagcccgaggagagcgggataaacagccgccaacatggctcctcccgccgcggccgccgctcctccaatatggcctctggcgcccgcgggcagccgagccgctcagggttagccccgagctgcccgacaccgtctccagcccccgcgcggggaggctgcgctggctcctgctcggcgccgattctcgctccctgcaccagggaggcggcggcggcggtggcggcagtggtggcccggcgcctggggccctcgcgccacgtacctttctcttgggcatggtggcggcggcgacggcagcgggacgtaggtgctggacgcgggatgcagcggcgcgcgggctttggtcggtccgggggtcgttctcgcctcttcttcacactgctcgggctccggggggtttataaagtttttatagcgctgggagccccggaccggttagaaccggatttcacctcccgccgccgttcattggcccagctggggtcacgtgggcggggtttaaactcacctcctctggagggagtgaggaggggggtgtgtggggggggtagtgcgcggagacggcggcgcgccgagggggtgggggcgcagtcggggtggcgcgcgtcgaaggcagtaaatgaggaggggtgcgcgagtcggcgggctccgggttccggctcccgccaagagctgtcttttgcaaactagcaagttccttccaccttatgcaacccagcaacccacttctccaagccgtgcgacactcacggcgcatctcagcggctttccttcctgctcccgctgggggccccagaagaggggtttgcgaggcctggctgcactgccctgctcctctggaagcaggaggaagcgcgcggctggaggcacaggctgcagttcccagagcccaggctgacgccaaagtgggaaaaaggcggggaaaccagcttggcgcagccggacgtgcatccttccgagctgccacttcggagaagcctttcgtgcacctcacctgaaagacggtcccactcgaggtgggctaggggtttcagggggagactttccatgcagaggtgccttttgggtgccgtgggtcaggtaggagctgtcctttcagcacccgttgcgcagccgcctccccaaatgctatcgaagcccccacccccaactcctctcgggtggctcccttaaggtccctgtattcccaaacctccagaccccgccacagtatggtggagagcggccgtcgaggtctaccagcactcacttccccctacactctacccctctcggagacattttgcccagctgcccaacccgacgcggccaccaagcctgggcactgcagccgcagctggcgaaatccctccttccacactgtcaagctggctgcctttcacttgcgcgaggaaaggagggtggaggaaagcgcccggggattaggaaacaagtagaggaacaggtggtgtgatggcaaaagggctcttccggtgccccctagtccaaagccagggtcttggagctagccaagtgcacctgagggagggtaggcaattgcagcagcaaaagaaggtgttcttccgttgcagttagcaaacaagttttacatctaagaatctttaaaaattctatttgagacccagcacacaagaatacgatagatgtcctcaaatgggggcttggctcacaggtggaaggacactaaattggtcccatctgatttcttgaggcaagggttgaacctggcttgcacaaatcacacctgtccaaagcaaccacgagttctactattttgcagcccttgctgctgggcgacgacgacgacctctctgcctcttctttccaccactacatcgcctcctggggcagcttctccctactccaccctgtgtacctttcccagaatacagaacctcaggccaaagagagatgccagccccattaatcacctctactgtaccccaatcatattacggaaagtcagacccaggagacaggactcaacagccacgctcatagggcagattccgtttgctgcctccagcccctcattcccgccttaattgtagggctctgcattatagccgcataattcatgcctccctaattatggctgtcaacagccccattgtaaagctgtaaaatgtacagcacctgctctccaggaaccctgtgccagggattggtagaggggagtgccaggtgtggatgggggctttgccaaagggttcactgattggcttctcaatcgccgtgtctggcatttatgcttgattctgggagcatggacaatagccaagaagtctcttgccgccaggtatcccgggacagaaaggggaagaggcgggtggggtataggaaagttaggggtttcctgtgtgctcttgctacaacttgcaagatttcacctctcccctagagggagctgctagggaaacagcttgcagaaagtaaaatgggaagtctggcatggtggctcatgcctgtaatcccagca

SEQ ID NO: 951 - DNA, 4001 bp, Homo sapiens
aagtcagtgtggcgattcctcagggatctagaactggaaataccatttgacccagccatcccattactgggtatatacccaaaggactataaatcatgctgctataaagacacatgcacatgtatgtttattgcggcattattgacaataggaaagacttggaaccaacccaaatgtccaacaatgatagactggattaagaaaatgtggcacatatacaccatggaatactatgcagccataaaaaatgatgagttcatgtcctttgtagggacatggatgaaattggaaaacatcattctcagtaaactaaataacaaataaacaaaactaaactaaactaacaaataaataaactaaataaacaaaataagaaattattttggagacagttgataaaaaccatacatcctttttactgttaagtcataaagaggtgtcaaaattaaaaggaaaaattacagggtaagacttaggacaactactaggggtgtcaagggaagtgaaaatgggactaggcacagggcaatatgaattaatgaacatgggaaggacaaagatggggagaacagtaagcatgtgctgaagatactaagggagaggatctggtgaaaaatttgttgttagacaagctcctaggtaaagaaacaatgggataagatttctcaaccccactatgtgcttaagagtcatcctggccattggtgctgtctctgtcatcctctccttcctcagcctctttttcatcatccttgatcaactccagctggtcatccccctgatcttcattaacatcatcatccagtgggtccccctcctcagcagagtcttctgcacccccctcagactccatcttcacatgagtctcatctttcttcatggagctactgctctgctcctcttctgacttagcatttttcacctctacctcttgtttgctctgttccttttcaattttttccaggttttccaggagagaatccactttctgttttatctgggtcaactcctgcttaatggcctgaaggtcatcacctttcaactttccagacttggaagatccccgctttccactcttagaattgaagccacttttgccccttcgtgaggtgtttcctgatagacgttgacgtttcgagggcactacagccagagcaatgggaggaggaggaggtacacgtgctgggaaactgtacattccatcataataatcccgttgaaagccatagtccaagtcaaaagaggagccgtacatctccgctgctgatcgtttcacacctgcgtttcctcggttcacttttggctccgcagccaggttaatatctacaacctggctagcaatcattctgccatcctctcctgctacagcagcccgggcatttttctccttatcatattgaacgaaggcaaagcccttatgaacagagcagcccgcaattttgccatacttggaaaagatcgcctccacatccgatttcttgacaacaagagtgttgagattcccaatgaacacacgggagttcatggagtgaggatccatcttgttggtaacgttgctggccattgtgttggatgataaggtttctcaaaaagccaaaaacaggaggcgggagggagaagagattcgattctaagtctcctactgccgggttctacggggagaaactgactgcggctcgaggccagaaatgcagccaaaacagctcagtcttcgtctcttcacaaaatggctcccaacaagaattctgaaatgatgtaaagaaaagcacaacaacatttttgaaataaagacaaaattgcatttagaaaaaaaatcaaagcttcaaagtgttcatatgaaaaaaagaaaaaaagacaggatatagttctgtgccgtcgtaggctgcactgtcaccgttctagaccggctgactgtaggtcagatgggagtgtccttccagaaattagtgacttaccagatctggttgtagtttagacctctggttgtagttgtagctcagacctcaggaagagccaagcaggaactccaggcttgaagactttgagtctgtcctgtgggtctttagaagcttttattgacctttctaatcacaactcccacccacgcccctccacatatccgctgctagcttccaatcaaaaagcgatatctgattgcatttctgaagctccactcagttaatcctgattgggtttttggctgtccgaagactaatggattgaaccaggtatccattcatatcacatatgcatattcatttcatgaattaagaaattgacagcgttagggatagagtggaagtcaagaattcattcactcaaggccagatgaggtggctcacacctgtaatcccagcactttaggaggccaaggtaggtggatcacctgatgtcaggagttcaagacccgcctggcccacatggtgaaaccctgtctctacaaaaatagaaaagttagccaggcacgatggtggctgcctgtagtccagctactcatgtggctgaggtgggagaatcccttgaaccctggaggctgagtttgcagtgagccaagattacaccattgccctcctgactgggtgacggagggagattttgtcaaaaaaaaaatgcattcattcatgaaatccacaaacactgatggaattttactgctatgtcgccttcaggtcctgagtgtgaggcagggaaggggttgatctgttccggacattagacagaaaaataaaacctgaaagtagtgttgtggggagatctttggccacatcaaaattataaaaatgctttctagttaaaacaactttataaaaacggagtcatccctacaaaataagaataaagatctccatgtatggaatggtcttgtgggttttatatcacctaaggtagcagtttcttcactcgtgctggtggaagagaggtgccactcagggcgtgagtggtctcagtgcttaggttaaggcttctttggaagaaattgaaacgatacctataaactttataaatttaatcagtgaagaagggagggggagaaacaaaaataaaccaagcttgcagcgcattcagcattcaccatgaggtcagcttgctctctgaccttcttcctcatggttgctggcagcctactgtccccaaatcatttagaccttagattacagttccccttaactgccctgcagacaacaatttaagccttgtaaaacattaactttttcatttgagatattcttacgttctgcatgtcagtgaaagtactgatgccagctgatctgaagggccctacaaggcaccaacgcaccaaagaatgcagttttgacatcctgatgacttcatccctcttaactctatatcaactttccagccccttgctatccaggatccactggaaaccctcagtggatctcctccttggggagatgaatttgaggatctcctcctagcttctcatttagccaccctgtgatcattaaactctctgctgcaaactctgctgtctcaaaatattggtaagctactgtgcagcaggcataggaatctgatggtcctgtaataaaatcatgtcaaaattgcaaaaggaagtgagggtagaggatgggcttggttgagcttggtgttttaatgggatcctgggagtgaaccaagacttggtaaacatgttgggggttactgagggggtggaggaggaatctatccaatatttcactgatgcccctttggttttgattattaggaccaaggatgagcctttcaaaacaatttatataatcctccttatttttcctttcaaaaccttcatcttctatttttctcccaaaataatctcacatccattcccaatgctttgctcatttcaggataaacatcttttttctttttttcttacacagtctccttctctgttaagtagaccatatattttgttgccacaaaatgtcatttggactgcttcaaacacaggaattttctgaatttcatgtgaaacccctcctcagaaatatttt

SEQ ID NO: 952 - DNA, 4001 bp, Homo sapiens
ctttaaattgctggtttaataaagagttgtttattttcagggaaaaggtcccaaacatcaagctgttcacaaaaataacccacggtatcaactttagaaaacacatttgaagactataacaccaattatgtttctgaggatgcatttgacatgccaactctcattcacaaaaatacattgttagatttttgttgaactgccccacacagcacactaatatggggtgtaacacacatacttgtaactccaagctgctttcaggagctactcaactcaatgagattgcctttgcagttagggaagcaactactgaacttatgtatgaaagaaaagaactgtattccctgcataacaagagattattttggagacagttgataaaaaccatacatcctttttactgttaagtcataaagaggtgtcaaaattaaaagcaaaaattacagggtaagacttaggaaaactactaggggtgtcatgggaagtgaaaatgggactaggcgcagggcaatatgaattaatgaatgtgggaaggacaaggatggggagaacagtaagcatgtgctgaagatactaagggagaggatctggtgaaaaatttgttgttagacaagctcctaggtaaagaaacaatgggataagatttctcaaccccactatgtgcttaagagtcatcctggccattggtgctgtctctgttatcctctccttcctcagcatctttttcattattcttgatcaaatgaagctggttgtccccctgatcttcattatcatcatcatccagtgggtccccctcctcagcagagtcttctgcacccccctcagactccatctttacatgagtctcatctttcttcatggagctactgctctgctcctcttctgacttagcatttttcacctctacctcttgtttgctctgttccttttcaattttttccaggttttccaggagagaatccactttctgttttatctgggtcaactcctgcttaatggcctgaaggtcatctcctttcagctttccagacttggaagatccccgctttccactcttagaattgaagccacttttgccccttcgtgaggtgtttcctgatatgcgctggcgtttcgagggcactacagccagagcaatgggaggaggaggaggtacacgtgctgggaaactgtacatcccatcataataatcccgttgaaagccatagtccaagtcaaaagaggagccgtacatctccgctgcggatcgtttcacacctgcgtttcctcggttcacttttggctctgcagccaggttaataactgcaacctggctagcaatcattctgccatcctctcctgctacagcagcccgggcatttttctccttatcatattgaacgaaggcaaagcccttatgaacagagcagcccgcaattttgccatacttggaaaagatcgcctccacatcagatttcttgacaacaagagtgttgagattcccaatgaacacacgggagttcacggagtgaggatccatcttgttggtaacgttgctggccattgtgttggatgataaggtttctcaaaaagccaaaaacaggaggcgggagggagaagagattcgattctaagtctcctactgccgggttctacggggagaaactgactgcggctcgaggccagaaatgcagccaaaacagctcagtcttcgtctcttcacaaaatggctgccaacaagaattctgaaatgatgtaaagaaaagcacaacaacatttttgaaatcacgacaaaattgcatttagaaaaaaaaatcaaagcttcaaagtgttcatatgaaaaaaagaaaaaaagacatgatatagttctatgccatcgtaggctgcactgtcaccgttctagaccggctgactgtaggtcacatgggagtgtccttacagaaattagtgacttaccagatctggttgtagtttagaaggtgctcagacctcaggaagagccaagcaggaactccaggcttgaagactttgagtttgtcctgtgggtctttagaagcttttattgacctttctaatcacaactcccacccacgcccctccacgtatccgctgctagcttccaatcaaaaagcgatatctgattgcatttctgaagctccactcagttaatcctgattgggtttttgactgtccgaagactaatggattgaacgagatatccattcatatcacatatgcataatcattttatgaattaagaaattgacagagttagggatagagtggaaatcaagaattcattcactcaaggccaggtgaggtggctcacacttgtaatcccagcactttgggaggccaaggtaggtggatcacctgaggtcaggagttcaagaccagcctggcccacatggtgaaaccctgtctctacaaaaatagaaaagttagccaggcacgatggtggctgcctgtagtccagttactcatgcggctgaggtgggagaatcccttgaaccctggaggctgagtttgcagtgagccaagattacaccattgccctcctgactgggcgacagagggagattttgtcaaaaaaaatgcattcattcatgaaatccacaaacactgatggaattttactgctatttcgccttcaagtcctgatgtgaggcagggaaggggttgatctgttccagacattagacagaaaaataaaacctgaaagtagtgttgtggggagatctttggccacatcaaaattataaaatttataaaaatatttctagttaaaatagctgtataaacacagaggagtcgtccctacaaaataagaataaagatctccatgtatggaatggtcttgtgggttttatatcacctaaggtagcagtttcttcactcgtgctggtggaagagaggtgccactgagggcttgagtggtctcagggcttaggttaagtcttctctggaagaaattgaaatgatacctgtaaactttataagtttaatcagtgaagaagggagggggagaaacaaaaataaaccaagcttgcagcgcattcagcattcaccatgaggtcagcttgctctctgaccttcttcctcatggttgctggcagcttactgtccccaaatcaagtagaccttagcttacagttccccttaactaccctgcagacaacaatttaagccttgtaaaacattaactttctcatttgagatattctttcaggttctgcatgtcagtgaaactactgatgccagctgatctgaagggctctgcaaggcaccaactcaccaaagaatgcagttttgacatcctgatgacttcatccctcttacctctacaccaactttccagccccttgctatccaggatccactggaaaccctcagtactacttggggagatgaatttgaggatatcctcctagcttctcatttagccaccctgtgatcattaaactgtctgctgcaaacactgctgtctcagaatattggtcagctactgtgcagcaggcataggaacctgatggtcctgtaataaaatcatgtcaaaattacaaagagaagtgagggtagaggatgggcatggttgagctgggtgttttaatgggatcctgggagttaaccaagacttggtaaacatgttgggggttactgagggggtggaggtggaatctatccaacatttcactgatgcccctttacttttgattcttaggaccaaggttgagtctttcaaaacaatttgtataatcctccttatttttcctttcaaaacctttgtcttcctttttctcccaaaataatctcacatctattcccattgctttcctcatttcaggataaacacatcttttttttttttttttctgacagtctccttctctgttaagtttaccatatattttgttgccactgaagatgagtaacttggttttatggacaggaagggtgaaaaggatcccattcctcaacagctggaggtgatatgaaggtcattgttattctttgtcata

SEQ ID NO: 953 - DNA, 4001 bp, Homo sapiens
gagttcaagaccagcctggccaacatggtgaaaccctgtttctaccaaaaatataaaaattagccaggcatggtggcgggtggctataatcgcagctactcaggaggctgaggcatgagaatcgcttgagcctgggaggcagaggttggagtgagttgagatcatgccactgcactccagcctgggtaacagagccagataccatccccacccctcaaaacaaatgttttgtagagatagggttttgccatgttgcccaggttggtctcgagcccctgggctcaaatgatcctcctgccttggcctcccaaagtgttggaattgtaggcatgagtcactgctcccaccaagaatttttttctttaaattcctggtttaataaggacttgtttattttgaggaaaaaaggtcccaaacatggagctgttcacaaaaataacccacagtatcaactttagaaaacacattttaagagtataacactaattatttttctgaggatgcatttgacatgccaactctcattcacaaaaatacattgttagatttttgttgaactgccccacacagcacactgacatggggtgtaacacacatacttctaactccaagctgctttcaggagctactcaactcaatgagattgcctttgcagttagggaagcaactattgaacttatgtataaatgaaaagaactgtattccctgcataacaagagattattttggagacagttgataaaaaccatacatcctttttactgttaagtcataaggaggtatctaaattaaaagcaaaaattgcagggtaagacttaagaaaacttctaggagcatcaagggaagtgaaaatggaactaggtgcagggcaatatgaattaatgaatgtgggaaggacaaggatggggagaacagtaagcatgtgctgaagatgctaagggagaggatctggtgaaaaatttgatgttagacaagcacctaggtaaagaaacaatgggataagatttctcaaccccactatgtgcttaagagtcatcctggccattcgccctgtctctgtcatcctctccttcctcagcccctttttcatcatccttgatcaactccagctggttgtccccctgatcttcattatcatcatcacacagtaggtccccctcctcaacagagtcatctgcacccccctcagactccatcttcacgtgagtcttatccttcttcgaggagctgctggtctgctcctcttcagacttagcattctttacctctactccttgcttgcaatgttccttttcaattttttccaggttttccaggagagaatccactttctgttttatctgggtcaactcctgcttaatggcctgaaggtcatctcctttcagctttccagacttggaagatccccgctttccactcttagaattgaagccacttttgccccttcgtgaggtgtttcctgatatgcgctggcgtttcgagggcactacagccagagcaatgggaggaggaggaggtacacgtgctgggaaactgtacatcccaccataataatcccgttgcaggttatagtccaagtcaaaagaggagccgtacatctctgctgctgatcgtttcacacctgcgtttcctcggttcacttttggctctgcagccaggttaatatctacaacctggctagcaatcattctgccatcctctcctgctacagcagcccgggcatttttctccttatcatattgaacgaaggcaaagcccttatgaacagagcagcccgcaattttgccatacttggaaaagatcgcctccacatccgatttcttgacaacaagagtgttgagattcccaatgaacacacgggagttcatggagtgaggatccatcttgttggtaacgttgctggccattgtgttggatgataaggtttctcaaaaagccaaaaacaggaggcgggagggagaagagattcgattctaagtctcctactgccgggttctacgtggagaagctgactgcggctcgaggccagaaatgcagccaaaccagctcagtcttcgtctcttcacaaaatggctcccaacaagaattctgaaatgacgtaaagaaaagcacaatcaacatttttgaaataaagacaaaactgcatttagaaaaaaaaatcaaagcttcaaagtgttcatatgaaaaaaagaaaaaaaagacaggatatagctctgctctgtcgtaggctgcactgtcaccatgctacatcggctgactgtaggtcccatgggagtgtccttacagaaattagtgacttaccagatctgggctcagtttgcagggtgttcagacctcaggaagaaccaagcaggaactccaggcttgaagactttgggtctctcctgtgggtctttagaagcttttattgacctttctaatcacaactcccacccacgcccttccacgtatgcactgctagcttccaatcaaaaagcaatatctcattgcatttctgaagttccacccagctaatcctgattgggtttttggctttccccagattaatggattgaaccaaatatccattcatatcacatacccatattcatttcatgaatcaagaaattgacagcattagggatagagtggaaatcaagaattcattcatttaaggccagctgagttggctcatgcctgtaatcccagcactttgggaggccaagacaggcggatcacctgaggtcaggagttcaagacaagcttgaccaatatggtgaaaccctgtctctacaaaaatacaaaattagccgggcatgatggcggctgcctgtaatccggatacttgggaggctgaggtgggagaattgcttgaacccaggaggctgaggttgcagtgaaccgagattgcacactgccctccagactgggtgacagagggagactctgtcaacaacaacaacaacaacaacaacaacaacagaatgccttcattcacgaactccacaagcactgatggaattttactgatatgtcaccttcatagccctgggtgtgaggcagggaaggggttgatctgttctggacattagacagaaaaataaaacctgagaatagtgttgttgggagatctttggccacatcaatattttaaaaatgctttatagttaaaatagcttcctgaccttccttaacctgaactgcttggttccctagaagcagaaattgatcatattagaacccaaactcataccaaccttgaccttcatgaagtactcaagtgtttctgctcttcttcctcatgtgatgtagaaagtattaaaagtgatgagtttaggccgggcacggtggttcacgcctgtaatctcagcactttcagaggccgaggtgggtgcatcacctgtggtcaggagttccagaccagcctgggcaacatggtgaaactctgtctctactaaaaatacaaaaactagttgtgtgtggtggcctgtgcctgtaattccagctaactgggagactgaggcaggagaatcacttgaaccgggaggcagaggttgcagtgaggcgagatcgcaccattgcactccagcctggaaagcaagagtgaaactccatctcaaaaaaaaattaataaataaatacattataaataaataaattaattaatgctttaaagaaaaaagaaataaactttgcctacaaatttcatatgcaattgaatacctcttaaattttgatgtgaaccgaccaggcatggtggctgaggcctgtaatcccagcactttgggaggccgaggcgggcagaccacgaagtcaggagattgagaccatcctagttaacatggtgaaaccccgtctttactaaaaatacaaaaaattagccaggtgtagtggcatgcacctgtagtcccggctatttaggaggctaaggcaggaaaattgcttgaaccggggaggcagaggtcgaagtgagctgagatcgtgccactgcattccagcctggtgacggagcgagactccat

SEQ ID NO: 954 - DNA, 4001 bp, Homo sapiens
ggagttcaagaccagcctggccaacatggtgaaaccctgtttctaccaaaaatataaaaattagccaggcatggtggcgggtggctataatcgcagctactcaggaggctgaggcatgagaatcgcttgagcctgggaggcagaggttggagtgagttgagatcatgccactgcactccagcctgggtaacagagccagataccatccccacccctcaaaacaaatgttttgtagagatagggttttgccatgttgcccaggttggtctcgagcccctgggctcaaatgatcctcctgccttggcctcccaaagtgttggaattgtaggcatgagtcactgctcccaccaagaatttttttctttaaattcctggtttaataaggacttgtttattttgaggaaaaaaggtcccaaacatggagctgttcacaaaaataacccacagtatcaactttagaaaacacattttaagagtataacactaattatttttctgaggatgcatttgacatgccaactctcattcacaaaaatacattgttagatttttgttgaactgccccacacagcacactgacatggggtgtaacacacatacttctaactccaagctgctttcaggagctactcaactcaatgagattgcctttgcagttagggaagcaactattgaacttatgtataaatgaaaagaactgtattccctgcataacaagagattattttggagacagttgataaaaaccatacatcctttttactgttaagtcataaggaggtatctaaattaaaagcaaaaattgcagggtaagacttaagaaaacttctaggagcatcaagggaagtgaaaatggaactaggtgcagggcaatatgaattaatgaatgtgggaaggacaaggatggggagaacagtaagcatgtgctgaagatgctaagggagaggatctggtgaaaaatttgatgttagacaagcacctaggtaaagaaacaatgggataagatttctcaaccccactatgtgcttaagagtcatcctggccattcgccctgtctctgtcatcctctccttcctcagcccctttttcatcatccttgatcaactccagctggttgtccccctgatcttcattatcatcatcacacagtaggtccccctcctcaacagagtcatctgcacccccctcagactccatcttcacgtgagtcttatccttcttcgaggagctgctggtctgctcctcttcagacttagcattctttacctctactccttgcttgcaatgttccttttcaattttttccaggttttccaggagagaatccactttctgttttatctgggtcaactcctgcttaatggcctgaaggtcatctcctttcagctttccagacttggaagatccccgctttccactcttagaattgaagccacttttgccccttcgtgaggtgtttcctgatatgcgctggcgtttcgagggcactacagccagagcaatgggaggaggaggaggtacacgtgctgggaaactgtacatcccaccataataatcccgttgcaagttatagtccaagtcaaaagaggagccgtacatctctgctgctgatcgtttcacacctgcgtttcctcggttcacttttggctctgcagccaggttaatatctacaacctggctagcaatcattctgccatcctctcctgctacagcagcccgggcatttttctccttatcatattgaacgaaggcaaagcccttatgaacagagcagcccgcaattttgccatacttggaaaagatcgcctccacatccgatttcttgacaacaagagtgttgagattcccaatgaacacacgggagttcatggagtgaggatccatcttgttggtaacgttgctggccattgtgttggatgataaggtttctcaaaaagccaaaaacaggaggcgggagggagaagagattcgattctaagtctcctactgccgggttctacgtggagaagctgactgcggctcgaggccagaaatgcagccaaaccagctcagtcttcgtctcttcacaaaatggctcccaacaagaattctgaaatgacgtaaagaaaagcacaatcaacatttttgaaataaagacaaaactgcatttagaaaaaaaaatcaaagcttcaaagtgttcatatgaaaaaaagaaaaaaaagacaggatatagctctgctctgtcgtaggctgcactgtcaccatgctacatcggctgactgtaggtcccatgggagtgtccttacagaaattagtgacttaccagatctgggctcagtttgcagggtgttcagacctcaggaagaaccaagcaggaactccaggcttgaagactttgggtctctcctgtgggtctttagaagcttttattgacctttctaatcacaactcccacccacgcccttccatgtatgcactgctagcttccaatcaaaaagcaatatctcattgcatttctgaagttccacccagctaatcctgattgggtttttggctttccccagattaatggattgaaccaaatatccattcatatcacatacccatattcatttcatgaatcaagaaattgacagcattagggatagagtggaaatcaagaattcattcatttaaggccagctgagttggctcatgcctgtaatcccagcactttgggaggccaagacaggcggatcacctgaggtcaggagttcaagacaagcttgaccaatatggtgaaaccctgtctctacaaaaatacaaaattagccgggcatgatggcggctgcctgtaatccggatacttgggaggctgaggtgggagaattgcttgaacccaggaggctgaggttgcagtgaaccgagattgcacactgccctccagactgggtgacagagggagactctgtcaacaacaacaacaacaacaacaacaacaacagaatgccttcattcacgaactccacaagcactgatggaattttactgatatgtcaccttcatagccctgggtgtgaggcagggaaggggttgatctgttctggacattagacagaaaaataaaacctgagaatagtgttgttgggagatctttggccacatcaatattttaaaaatgctttatagttaaaatagcttcctgaccttccttaacctgaactgcttggttccctagaagcagaaattgatcatattagaacccaaactcataccaaccttgaccttcatgaagtactcaagtgtttctgctcttcttcctcatgtgatgtagaaagtattaaaagtgatgagtttaggccgggcacggtggttcacgcctgtaatctcagcactttcagaggccgaggtgggtgcatcacctgtggtcaggagttccagaccagcctgggcaacatggtgaaactctgtctctactaaaaatacaaaaactagttgtgtgtggtggcctgtgcctgtaattccagctaactgggagactgaggcaggagaatcacttgaaccgggaggcagaggttgcagtgaggcgagatcgcaccattgcactccagcctggaaagcaagagtgaaactccatctcaaaaaaaaattaataaataaatacattataaataaataaattaattaatgctttaaagaaaaaagaaataaactttgcctacaaatttcatatgcaattgaatacctcttaaattttgatgtgaaccgaccaggcatggtggctgaggcctgtaatcccagcactttgggaggccgaggcgggcagaccacgaagtcaggagattgagaccatcctagttaacatggtgaaaccccgtctttactaaaaatacaaaaaattagccaggtgtagtggcatgcacctgtagtcccggctatttaggaggctaaggcaggaaaattgcttgaaccggggaggcagaggtcgaagtgagctgagatcgtgccactgcattccagcctggtgacggagcgagactcca

SEQ ID NO: 955 - DNA, 4001 bp, Homo sapiens
aagaagcagggcgttggtggctcactggtgtaatcccagcacattgggaggccaaggcaggtggatcacttgaggttaggagttcaagaccagcctggccaacatggtgaaaccctgtttctaccaaaaatataaaaattagccaggcatggtggcgggtggctataatcgcagctactcaggaggctgaggcatgagaatcgcttgagcctgggaggcagaggttggagtgagttgagatcatgccactgcactccagcctgggtaacagagccagataccatccccacccctcaaaacaaatgttttgtagagatagggttttgccatgttgcccaggttggtctcgagcccctgggctcaaatgatcctcctgccttggcctcccaaagtgttggaattgtaggcatgagtcactgctcccaccaagaatttttttctttaaattcctggtttaataaggacttgtttattttgaggaaaaaaggtcccaaacatggagctgttcacaaaaataacccacagtatcaactttagaaaacacattttaagagtataacactaattatttttctgaggatgcatttgacatgccaactctcattcacaaaaatacattgttagatttttgttgaactgccccacacagcacactgacatggggtgtaacacacatacttctaactccaagctgctttcaggagctactcaactcaatgagattgcctttgcagttagggaagcaactattgaacttatgtataaatgaaaagaactgtattccctgcataacaagagattattttggagacagttgataaaaaccatacatcctttttactgttaagtcataaggaggtatctaaattaaaagcaaaaattgcagggtaagacttaagaaaacttctaggagcatcaagggaagtgaaaatggaactaggtgcagggcaatatgaattaatgaatgtgggaaggacaaggatggggagaacagtaagcatgtgctgaagatgctaagggagaggatctggtgaaaaatttgatgttagacaagcacctaggtaaagaaacaatgggataagatttctcaaccccactatgtgcttaagagtcatcctggccattcgccctgtctctgtcatcctctccttcctcagcccctttttcatcatccttgatcaactccagctggttgtccccctgatcttcattatcatcatcacacagtaggtccccctcctcaacagagtcatctgcacccccctcagactccatcttcacgtgagtcttatccttcttcgaggagctgctggtctgctcctcttcagacttagcattctttacctctactccttgcttgcaatgttccttttcaattttttccaggttttccaggagagaatccactttctgttttatctgggtcaactcctgcttaatggcctgaaggtcatctcctttcagctttccagacttggaagatccccgctttccactcttagaattgaagccacttttgccccttcgtgaggtgtttcctgatatgcgctggcgtttcgagggcactacagccagagcaatgggaggaggaggaggtacacgtgctgggaaactgtacatcccaccataataatcccgttgcaagttatagtccaagtcaaaagaggagccgtacatctctgctgctgatcgtttcacacctgcgtttcctcggttcacttttggctctgcagccaggttaatatctacaacctggctagcaatcattctgccatcctctcctgctacagcagcccgggcatttttctccttatcatattgaacgaaggcaaagcccttatgaacagagcagcccgcaattttgccatacttggaaaagatcgcctccacatccgatttcttgacaacaagagtgttgagattcccaatgaacacacgggagttcatggagtgaggatccatcttgttggtaacgttgctggccattgtgttggatgataaggtttctcaaaaagccaaaaacaggaggcgggagggagaagagattcgattctaagtctcctactgccgggttctacgtggagaagctgactgcggctcgaggccagaaatgcagccaaaccagctcagtcttcgtctcttcacaaaatggctcccaacaagaattctgaaatgacgtaaagaaaagcacaatcaacatttttgaaataaagacaaaactgcatttagaaaaaaaaatcaaagcttcaaagtgttcatatgaaaaaaagaaaaaaaagacaggatatagctctgctctgtcgtaggctgcactgtcaccatgctacatcggctgactgtaggtcccatgggagtgtccttacagaaattagtgacttaccagatctgggctcagtttgcagggtgttcagacctcaggaagaaccaagcaggaactccaggcttgaagactttgggtctctcctgtgggtctttagaagcttttattgacctttctaatcacaactcccacccacgcccttccatgtatgcactgctagcttccaatcaaaaagcaatatctcattgcatttctgaagttccacccagctaatcctgattgggtttttggctttccccagattaatggattgaaccaaatatccattcatatcacatacccatattcatttcatgaatcaagaaattgacagcattagggatagagtggaaatcaagaattcattcatttaaggccagctgagttggctcatgcctgtaatcccagcactttgggaggccaagacaggcggatcacctgaggtcaggagttcaagacaagcttgaccaatatggtgaaaccctgtctctacaaaaatacaaaattagccgggcatgatggcggctgcctgtaatccggatacttgggaggctgaggtgggagaattgcttgaacccaggaggctgaggttgcagtgaaccgagattgcacactgccctccagactgggtgacagagggagactctgtcaacaacaacaacaacaacaacaacaacaacagaatgccttcattcacgaactccacaagcactgatggaattttactgatatgtcaccttcatagccctgggtgtgaggcagggaaggggttgatctgttctggacattagacagaaaaataaaacctgagaatagtgttgttgggagatctttggccacatcaatattttaaaaatgctttatagttaaaatagcttcctgaccttccttaacctgaactgcttggttccctagaagcagaaattgatcatattagaacccaaactcataccaaccttgaccttcatgaagtactcaagtgtttctgctcttcttcctcatgtgatgtagaaagtattaaaagtgatgagtttaggccgggcacggtggttcacgcctgtaatctcagcactttcagaggccgaggtgggtgcatcacctgtggtcaggagttccagaccagcctgggcaacatggtgaaactctgtctctactaaaaatacaaaaactagttgtgtgtggtggcctgtgcctgtaattccagctaactgggagactgaggcaggagaatcacttgaaccgggaggcagaggttgcagtgaggcgagatcgcaccattgcactccagcctggaaagcaagagtgaaactccatctcaaaaaaaaattaataaataaatacattataaataaataaattaattaatgctttaaagaaaaaagaaataaactttgcctacaaatttcatatgcaattgaatacctcttaaattttgatgtgaaccgaccaggcatggtggctgaggcctgtaatcccagcactttgggaggccgaggcgggcagaccacgaagtcaggagattgagaccatcctagttaacatggtgaaaccccgtctttactaaaaatacaaaaaattagccaggtgtagtggcatgcacctgtagtcccggctatttaggaggctaaggcaggaaaattgc

SEQ ID NO: 956 - DNA, 4001 bp, Homo sapiens
agaagcagggcgttggtggctcactggtgtaatcccagcacattgggaggccaaggcaggtggatcacttgaggttaggagttcaagaccagcctggccaacatggtgaaaccctgtttctaccaaaaatataaaaattagccaggcatggtggcgggtggctataatcgcagctactcaggaggctgaggcatgagaatcgcttgagcctgggaggcagaggttggagtgagttgagatcatgccactgcactccagcctgggtaacagagccagataccatccccacccctcaaaacaaatgttttgtagagatagggttttgccatgttgcccaggttggtctcgagcccctgggctcaaatgatcctcctgccttggcctcccaaagtgttggaattgtaggcatgagtcactgctcccaccaagaatttttttctttaaattcctggtttaataaggacttgtttattttgaggaaaaaaggtcccaaacatggagctgttcacaaaaataacccacagtatcaactttagaaaacacattttaagagtataacactaattatttttctgaggatgcatttgacatgccaactctcattcacaaaaatacattgttagatttttgttgaactgccccacacagcacactgacatggggtgtaacacacatacttctaactccaagctgctttcaggagctactcaactcaatgagattgcctttgcagttagggaagcaactattgaacttatgtataaatgaaaagaactgtattccctgcataacaagagattattttggagacagttgataaaaaccatacatcctttttactgttaagtcataaggaggtatctaaattaaaagcaaaaattgcagggtaagacttaagaaaacttctaggagcatcaagggaagtgaaaatggaactaggtgcagggcaatatgaattaatgaatgtgggaaggacaaggatggggagaacagtaagcatgtgctgaagatgctaagggagaggatctggtgaaaaatttgatgttagacaagcacctaggtaaagaaacaatgggataagatttctcaaccccactatgtgcttaagagtcatcctggccattcgccctgtctctgtcatcctctccttcctcagcccctttttcatcatccttgatcaactccagctggttgtccccctgatcttcattatcatcatcacacagtaggtccccctcctcaacagagtcatctgcacccccctcagactccatcttcacgtgagtcttatccttcttcgaggagctgctggtctgctcctcttcagacttagcattctttacctctactccttgcttgcaatgttccttttcaattttttccaggttttccaggagagaatccactttctgttttatctgggtcaactcctgcttaatggcctgaaggtcatctcctttcagctttccagacttggaagatccccgctttccactcttagaattgaagccacttttgccccttcgtgaggtgtttcctgatatgcgctggcgtttcgagggcactacagccagagcaatgggaggaggaggaggtacacgtgctgggaaactgtacatcccaccataataatcccgttgcaggttatagtccaagtcaaaagaggagccgtacatctctgctgctgatcgtttcacacctgcgtttcctcggttcacttttggctctgcagccaggttaatatctacaacctggctagcaatcattctgccatcctctcctgctacagcagcccgggcatttttctccttatcatattgaacgaaggcaaagcccttatgaacagagcagcccgcaattttgccatacttggaaaagatcgcctccacatccgatttcttgacaacaagagtgttgagattcccaatgaacacacgggagttcatggagtgaggatccatcttgttggtaacgttgctggccattgtgttggatgataaggtttctcaaaaagccaaaaacaggaggcgggagggagaagagattcgattctaagtctcctactgccgggttctacgtggagaagctgactgcggctcgaggccagaaatgcagccaaaccagctcagtcttcgtctcttcacaaaatggctcccaacaagaattctgaaatgacgtaaagaaaagcacaatcaacatttttgaaataaagacaaaactgcatttagaaaaaaaaatcaaagcttcaaagtgttcatatgaaaaaaagaaaaaaaagacaggatatagctctgctctgtcgtaggctgcactgtcaccatgctacatcggctgactgtaggtcccatgggagtgtccttacagaaattagtgacttaccagatctgggctcagtttgcagggtgttcagacctcaggaagaaccaagcaggaactccaggcttgaagactttgggtctctcctgtgggtctttagaagcttttattgacctttctaatcacaactcccacccacgcccttccacgtatgcactgctagcttccaatcaaaaagcaatatctcattgcatttctgaagttccacccagctaatcctgattgggtttttggctttccccagattaatggattgaaccaaatatccattcatatcacatacccatattcatttcatgaatcaagaaattgacagcattagggatagagtggaaatcaagaattcattcatttaaggccagctgagttggctcatgcctgtaatcccagcactttgggaggccaagacaggcggatcacctgaggtcaggagttcaagacaagcttgaccaatatggtgaaaccctgtctctacaaaaatacaaaattagccgggcatgatggcggctgcctgtaatccggatacttgggaggctgaggtgggagaattgcttgaacccaggaggctgaggttgcagtgaaccgagattgcacactgccctccagactgggtgacagagggagactctgtcaacaacaacaacaacaacaacaacaacaacagaatgccttcattcacgaactccacaagcactgatggaattttactgatatgtcaccttcatagccctgggtgtgaggcagggaaggggttgatctgttctggacattagacagaaaaataaaacctgagaatagtgttgttgggagatctttggccacatcaatattttaaaaatgctttatagttaaaatagcttcctgaccttccttaacctgaactgcttggttccctagaagcagaaattgatcatattagaacccaaactcataccaaccttgaccttcatgaagtactcaagtgtttctgctcttcttcctcatgtgatgtagaaagtattaaaagtgatgagtttaggccgggcacggtggttcacgcctgtaatctcagcactttcagaggccgaggtgggtgcatcacctgtggtcaggagttccagaccagcctgggcaacatggtgaaactctgtctctactaaaaatacaaaaactagttgtgtgtggtggcctgtgcctgtaattccagctaactgggagactgaggcaggagaatcacttgaaccgggaggcagaggttgcagtgaggcgagatcgcaccattgcactccagcctggaaagcaagagtgaaactccatctcaaaaaaaaattaataaataaatacattataaataaataaattaattaatgctttaaagaaaaaagaaataaactttgcctacaaatttcatatgcaattgaatacctcttaaattttgatgtgaaccgaccaggcatggtggctgaggcctgtaatcccagcactttgggaggccgaggcgggcagaccacgaagtcaggagattgagaccatcctagttaacatggtgaaaccccgtctttactaaaaatacaaaaaattagccaggtgtagtggcatgcacctgtagtcccggctatttaggaggctaaggcaggaaaattgct

SEQ ID NO: 957 - DNA, 4001 bp, Homo sapiens
aggattactctgaaaatgagataaacatgactcctcacaattacaaaacactattaagactcgatagcccttaatagacgcagactgtggttaaattctgggtggatgtttctcaagacaagcttcaaattctgatgaactagcaaaaacggaaacattcgaaatgtcacacttttgatcaagaaactgtattgtgtgagatgaatacgtttactgattaacacgacctatttctataaagatgcatcctaaaacacaaaatctccttgcgaacataaggttctgttttcccatgctcccccatccccacatactaccttaagatcatcagaactcaaaagttctcagtatcacaagacccttacagcattgtacctaggaatactatcagtcacagaaaagaggcaaatttttaacagaaaagttcaatgaacatctgttaaggtggggtttttaagtatgtgtaaagcaaaaagacaagttgtgtattaagtacaagacagaaatatttatgcctaccatttcattgcaaaggctctacaagttgatactgaaattggttaaaattttcaaaaaaagtttgtaaattttaacaaaaaaaccgtaaaataattagattccagaaaataaaaccttcggatcaaggaaagccctctctcttcaagccaaatacaaaatgctcattttgaaaagactttttatgtcatatgagaccatttgaaactcattcaaatgtggcattcaacacaatgccacacagccaaaccatatttctggatgcagcaaatatactaacgtgactggagtcatttgatctaaacatttttgcaaaaaaaaaggagacatttaaagatttaaaagggctgctgggagattcgggatgtcagcactaactcctccctgactttttctgaacctctctgtgcaaattcttcatattaagagacgggctttaaaagaaccaacgaaatgagactaacggttatctcatggcttaggagtgtcgagctctcatcctacgactgactcatgagacatcaattcagccacttgaggactgcaaaaatctcaaacaggtagtgtgaaaggactgaaccttccaagaagccctgggcttttttaaaaatttggcaatacggccactaccgtgtaagaaaaaggatcgcctttccaatttggtgcgcctctgacagtctcagaattatccatttcaggcgccgcttggagcctaagttctacggcctctagtagtcattttttccttcaaatctcagcccgcggcatgcagaatgtgggaggggagggaggcttcccacacaaatcggcctttcggtttctgctcacacaaaacttttctcccggctcagataaccctgggatctgcaccccgccttccgccccccacccccatcccctcaggcccgtccggatcatcagcacatccctctcgggctaggccggccgcggcgggagcgaagcggctccggcggggagaagcggcagggccgcgggcgcctcaggcccttcgcgggatccggccgcatggagcagcgagcggaggcgggaaaagcacggccggccccagcaggccgcgcggagagcgcccagcgggccggaccgcgggctaaaggggcggggggaggaagagcgagggcgagaagcgtttcggccgggctaggcccacagccgcgcgggcggactagaccgaagccgcccccagcccgtccccacccccaccccggggcctcggagcgcaaacgaaacgggaccaggcacggagcccgggctgagtcgggtcgcatcggggctcccggcccctccccccacgggccggcgcgagactcaccagggcagagcgggggccggcagccgggcccgtgagaatcagcgcgaggcgctttgaaaacgactagaaatggcgcgcgcgccaccccctcccccccctgatggactgagacgcgatcccggcagcacgcggggtttcccggaactgcttccagggactccgagctacggggcaatcgcttggcgaggcggcctgacaggcagctcagacgaccagtagtatccaggcaaaacggaccacgccggacgactcgagagccaatcgatgaagctgccggctgaaccaatgagggtgctcagcgcccctggctggggcgcctccggggcgggggcaggcacacaaaggggtctgtggtggaagcccttggtggctgcaaggcttgggggcgctgggtcctgggtggacgaagctcctccctcttcgtctgccgccgatgcgaggccgaaaatctaggcctcgcgccgcgtggccgcctccggagccccgccccctatggtcagcactggcccagctccgccatggcgcttgcgtcccgccaccggccgcccttagcccccgagtcctccctcgcacccccgcggccggcgttccccccagacacgcccatagccacgcgttcgggcctctttcggtcatcttttcgcctctagtgagcacacgatttaaggatgatttggctcgtcattttgctgaggattttgtctagataatcattccttggaacgatcggagaaatgcctctttccctccctggctgccgtccacacatcgttggtggcagactgtgagggaaatcgttaaaatgactcaaaagcaatgtgtaacacaagtgatagagcagggagcttttccccacagggtttggagctacttgatattcataaaataaagcagctatatacatctctgaagccaaaagagccatgcaggggaaaggggtaattcccaaaggacactataattcgtgttagtcctaaacctatttctcacctgccattcctactgatttgttccctgtccttagtccaaacctgtctcgtctcatagaaaccttccgaactcacttctgtggtgcaagcgcttttttcccaaccccaaactccaatgccccacccttaggaagtggaggaagtcaagcagtggtctgcagatttccagatgcactcaaggatgattaaatttctcagaacctacaaacctatatttaattattgaaaacgggcggggcgtggtagctcatgcctgtaatcccagcactttgggaggccgaggcgggtgtatcggtcagaagttcgagaccagcctgatcaacatggtgaaaccctgcctctactaaaaatacaaaaattagcccggtgtggtggcacgtgcctgtaaacccacctactccggaggctgaggcagaaaaatcgcttgaacccgggaggcggaggttgcagtgagccaatatcgcaccactgcactccaccctagggaacaacagcgaaactccgtcttaaaaaaaaaaaaaaagaaaaagaaatattgaaaacgactactatgtgcccagtaccaagttaaatctctgggtagatccaagttttgtgttatggggtgtgagatttacagaaatgctgggagtcttaggccgggcgcggtggctcacgcctgtaattccagcacttagggaggccgaagtggacgatcacttgagcacaggagttcgagaccagcctggccaacatagtgaaaccccgtctctactaaaaatacacaaattagccgagcgtggtggcgcgtgcatgtaattccagctacttgagaggctgaggcaggagtatcgcttgaacccgggaggcggaggttgcagtagccgggattgcgccattgcactccaacctgggcgacaagagtgaaactccttctagaaagaaagagagaaagacagagagagagaagaaaaggaaagaaaaggaaaagaaaggaagaaggaaagaaagaaatgttgggagtctttaagaaaaatcatattaaatgacgaatacaaatttaggaacagagtcttggaagggcattgtaaaagtgagggaggaccccgaagcttaactttttttttttaatagagacacgggaggtgcggagggaatctcgctatgttgcccaggccggtcttggc

SEQ ID NO: 958 - DNA, 4001 bp, Homo sapiens
gatttggctctgaaagacagaattgtctcctgatacagctttccgatcaacgaacgaataagggatgagtaaaactaggtgagcatcctatacctgctatacttgttctcttcaatgtactcaaaatatccacggccatgatcttctcgtggtcttttaacacccctctttttatctccgcctttctgttctgttttgccgtcccctaaaacacacacgagccccataaaggccaagcctctaaacaacaaaaaaacgcttttccgttccgagaaccaaagcagctcgactttatcctgctttttaactgaggttttaaccgaggactcaaatgtgaattcaaagaacaatcaactacgaattcgattggcgctagtgacgcagtctaaagacattactaattttgccagtctcctcgatgattcgagaaagccaaagaaaaactgcgcggcccaggcccgaagcccacgtgtatcccgaagagagcgcagagagggggaggggccgagcccggcgcggcggcgctcccctcccccgcgggcccgcgctccccgcggccgcattgtactgatcttccgccccccgccccgccccgcccggctcctcccgccggaagtgacgtcacgccgagcccctgcgctccttgcacaatacagcggcgaggagccgccaaagcgcgcccgccccgggacctggggcctctcccctccccccgagacatgtgcccgcaccgcgcgcacgcagcgcgacggcgccaccgcgggccgaccgggctccctcccgccgcccgcccgcggctcctccccctacagcggcagctgcagctccccccggctctcgagccacataatggaggcgctgccaccgccgacacacacacacacacacacacacacgcgcgcgcgcacacacacgccccgagcccgaggcctctcggctaatctgggattccccgcgccccctcccccaccctcaccgcggcgccctcccgcccggggctccctccccctgcggggctccggcaggcctggggcacggtccccaccccgcgcgggcctcccgccgcgcgcaacgtacaacgcagcactcacccgccgccggagccccggggcgaccgccgcctccgccgccttccgccttcttcttacctcccgcctgctgctggccctgcctcgccccgggcggcgccaccgtcaccgcgaacagcgaggtggggccgctgctcttccccgcggcctccttggcggccccgcgctgctgttggggctgttgctgctgcgtcgccggcggttgaggctgctgctccccgtgcccgttctcgtcgcccgcgccttcctcttcgtccccgagctcatcttccccttcctggaaaccctgatcgtcgccgttctcgtcttccgaggcggcctcctcctcctccatcgggcccgagtcggccgcccccgcggccccgttctcctctcctagctccatctggtcgccgtccagagcggagattccttcctcctcctcttcctcttcctcctcctcttcatcgccgccggccgcggcctcctgctcgaggcctgctcccgagcgcccagcggaatccccgcccaggtctaggctgccgttcccgggctccatggcggggcggcccccggcctcctcgtcgtccagcgcagcctggagtcgctccatgagctcggccttgagacccttgtcagaaaggcgtcgcttcttgagctcctctttcagctccgacaccttcagcttttttacattaacaggcgaggaactcatggtgagggccccgattcaccgctaggcgctgcctcaaactcggctccgctcactcggccactggtggcggctgctgcggctgctcctcggcccgggcggcggctgcggctgcggctggagatgggttcgtgctgcagagcggatccgcctggtgtcgaacggcgccaattcctttcaccgagttcgcgagggagacgcggagactcgcctggcgcgagcgagcacgcaacgtcctctcgcaggagcggcgccgcgcacgtaatataggcgccccgccccctgcgctgacgggagcactgcgcaggaggaaagccggagcgcgcccgcgctcggccccgcccattaccgtacttacctccccgcccccacgccgaacccgggccgagagcgcggtggaggccgcgcagtgcgcttccaattgggactgagcaaatggaggaaaaggaaaccgcctttcagttcaaccgactcactgcatgatatattggcctttctgggtctttggtggctatactcgtttggcttttctccttcccagcttggaggctgctttatccaaatgctttcttcagtcctcaacttggcgtttcaacccgaatccgccttttcttccatcttagatctgccttcttatgtgtttctccagctcttcgtttaaaactccttcaaatcgtatttcagttttgactggtatagcatacattggcaactgttacacgcagcggctcttttcctcataataccgtatttggtttaatttgtgtaagtcctgccttgcgaattggattttaagttcgagaagggcaagggcagaaccgttcttttgtctgttccacaccccgggtgcggggcctgggaagtagaggctttgcttactactccatactgcaaaccttagtgtacctgcctttgcagggcagctattctcatgctcttaataaccctgaataaacctcagaattgcatttccaagttttctgtagctaccacaaagacggacctccagtaacacttgttctgtccactttaggacctggtcatcagctacgaagtcccagtagctaaccgtgagggtgagacccaactaggtctttgattataggcccacttgattctcttcctattcctgtagaaatactcttgaccaaattattctgaaacttaaagtttacgaaaaatcaagggctgtgattttgtaaaaagaaaaatggactatcgctcttgaaatccgttattttatatgttagaagtttactttttctctttaaagaaaagatgtgatgtctcgaagttttagatagggaagtcagaatttagattcgtgatagaagttaacattttaaaccctagataatctgcagtgtccagccagtgttccatctgactaaggagatggtttatacccactgtttggtgctctaggtggcacaataatattgccccattattaatttgaaatttggaagtaaacacattgaaatttctcccataggctaatatgatttaactaattgatacattttatttttgaagtttattttcggtagcttttatgaagcattctaccataccttgcagtcatgtatacgtgaaatattaacacttgtgaaatgatttgacttgaaattaatggactatgtacagtactactgataatccccagttcaagttaagtggtgaggatagcccccaaaatagaaacttccaaacagtgccagaaactcattttagcctttggttataattttgaaggttatgaataagccacaaactggaatttgaaattttgtcttcgttcagaaatgggaagagagctacagggggtttacatgttcacaaactagataactaatcccttaatgaatcagagttaaatacaattatgatggttccttaaatttatgtgtcctagatattatttacacctttaaatattagttatatgaaaacaaatttcatttactggaaaacactaaactatgaaaacaaagattgtatatctacatatagtagatctgtaacagtcactcttggaacattaagtcagttgcaaaaataaacatgaaatacaacttttgatgctcacaagaaagttctatggctttatctccaaaagttttggagaactttagagctggatggggcctggagatcgatctgcagtcctgttcattttactgcccaggaagctgggaccctcaccccccacaccaatgggc

SEQ ID NO: 959 - DNA, 4001 bp, Homo sapiens
aacagtttgcacggtcattcaattttctccacagtgctcagcagcccaagagaggactgaagaaaacgaccaattttactctgttatctgtgattccttatcatttggtttacaacatatttgcagcttttacggaattttaccttccactgtaattacacacagctctggctaccactccagtcctccccagtgcctagctcaacattggaagtcaataaattctggttaaaagagtggatacagtcacataatattttaaaatattacaacacaaaagaaaatcctgtgcttctccaccacctcacatgtaaatcaatgacatcataaagactaagcttaacacttcagtcaattgaggtttacaataatgtagcagattcggatacaccctttaattagtctgttttaacaaaacaaatcattaaaagtaatgttgccttgtttctacgacagtcttaaatacagcacttccaccccaatacctatttcaaatgaaaattcagctgaacagttagctaattgcttttaactcacaaaccctaaatatttgcattccactaaaagcaaaagttatttacttacaaagtgtaaatgctttaaattatggctatttccaataggcttcacacatttccataaacctagatttctcattctttggaattagatgcattagatcactagggaatctcaaccgattacagcctcctgatcccgtctgtttacattccatctgcacacactcccctagacgcaactaaacaactggtttgggatgagcatcatcaacagcaccttgtggctcatcaaacaccatctttactcaatatgggttaagaaccacacctgaatgccagcactgatatctaagtaactctaagaggtgggatgtcattttgctgactggaatattgaacaatctggggacagatatgcctgtccagacccaacacaaattaacaaaaatcctaaacacagataaatcctaaagaaaaatgtcaactcattttctttaaagaaaatgctgtccatttagaggaggagagggccagcgagaaaaagggaaaacgacccccgactcccaacacatctttttctccatacgggaaatacaaacatctctttgaagcggcttctacaaaatcggatgttctagagtcctgaaggagcattggtccgggaactaaaacagccagccacctcctggccacctgtgtccaggtagagcaaggtagtttgaggatgcagggttaggtttcggaaagggtcttcacgcccaagcggaccaaggcaagagagtcggcgatccagaaagtggagggctcgggcgctgttcagggggagaaaatggggcagcggggagaaaagaggatgggtgcttggttcatatcccagctgttagggcaccaggcaggtcgaatcctctggttgagaccagagcctccactgttacgctcccagagcttcctttacccccacccccggacaccaacccgcgcccacacacctgcccgtcgacccgcaggtggcattctctcggtcaagggcacgaggtgagaagggcagggtgcgccgggaccctgtgcaggtagccccagctcacctgggagaaccgggcgccccaggctcctcgcctcggccccctggccccctcgccctctcgcctcctcgcactcacccagatcatgaggctgtcgcacaggggcagcttaggctgcggcggcggctgcgtctcctccatggccggcgccgccgtcgacgacgccgcggacaccttcacactccctcctaccggctctcctccaggagccggcgtccacgacctgctagcccccaggaaagctcggtaccaggcccgacccgcgcagctcacgcgcgaaccctcgcgctgtcgacgcgtccggcgtcaccccctcctcacccgcccccgcctcgctccagcgttcgccccctccccttcctgggccccggccgcgctgccaggcacctgagccccgccttctcccacccctcccctcctcccacccgtcctgcccactcccgcacacctcgccccgccgccctgagtgacctggccgcgcaccagtcacagagacggtaggtacccgggggggcgggcggggcggggcgggggcgggaagaaccgggataggttgcgcaggggggattgctgattggacgtgccctcgtgggctctggccaatcaacgtgagacaagcctgagccttgggtagagagtgagagtgggtgggaagaggtttatgacctggcaggtgcagtgagggcgggggtgggaggttgcgcgcgggaagcgagcgcgcgtgcgcggcggggattggtaaggctgaagctcagccccagtggccgaagaggcagaggggcagcagggcaccggctgggctcaggcgtcttccctccttcttcgcggtagcacgccgcctcgctacacctgtggagggcccacactctgcttccacattgtcttcagaaatagatcctaccggctgggcgaggtggctcacgcctgtaatcctagcactttgggaggctgaggcgggtggatcacctgaggtcaggagttcgagacccgccaggccaagatggcgaaacccattctctactaaaaatacaaagattagccgggggtggtggcacatgactgtaatcccagctactcaggaggctgaggcagaagaatcgcttgaacccgggaggcacaggttgcagtgagccgagatcatgccactgcaccccagcctggacaaaaaaccgagactctgtctctaaaaaatatataaaacaaaataaagaaagaaagaaatagatcatacccatgaattaaaactcttcgaggaaggaagagctgatttcctcctaggcactcattggaaagggatgttttcatttgcacacgtggcaaatatgccacattaataaggaaaatagaatccgtcagtgctccttaaataagctctcacgggaccatagatcatgagcaattttattttacatggggcaaaagggaagaccgttttcaagtagcaaaataaacgaaatgttttgaaaaacatggaagatattaatgtatccattttcctttgtcagttgaaaatttgctttttccgagaatgttgtggggtggaggggggtcgggggaggtgacctgaaattggaagctctccaaggtattgatagatggcttaggtgattgaaaagggctagactattcttagtcttgctgtcacttcactcattcataaactcatcaattcatgctctgagtaagaaaacagctggcttttttttatattgctgcgtttttatatttagacactgaaaatttaaaactgatggacgactgcaattaaaagcccccaagtgtaaatcagtctcattctaaaaatacagtatgtacgtttgctattgactcccttaacattattccagaactttcttaacgcctctggagtcactttatatgctggaactaggtacattggtaatgtgatttaattaaaactacaagatttaggaattgaagacctggtctgaatcttgactttattccccactggctgctctcctatagcccccaacctccacattcctaagatcattgtaattaaaatgtaaacatacatggtaaatgtaaattataaactttgtaaatatgagttactattatcatctatacatatgggaaacttctcaacatatttatcactgagagccacaagtgaccaaatttctcaaataaaataattcgtgagagtaacttggtggggggggcaattaagttatgcttctggactttatagagagtaaattatcagggaaggaaaaatttaacaatttttatcaagaaactttaaaatatccatatcatttaaacccatgattccaatttattctgcgtcagtcataaattctgttgaaatcatcagaagtgcatttggaggctttgaacaatgatatgtatggcaatgctatgtattgat

SEQ ID NO: 960 - DNA, 4001 bp, Homo sapiens
cagtattcattaatacctaatgtaaattaaatgtgaatgagcaatttaatgcaatgcagcaaacatccaatagaattctcaattaatgccgggcgcggtggctcacgcctgtaatcccagcactttgggaggccgaggcgggcggatcacgaggtcaggagatcgagaccatcccggctaaaacggtgaaaccccgtctctactaaaaatacaaaaaattagccgggcgtagtggcgggcgcctgtagtcccagctacttgggaggctgaggcaggagaatggcgtgaacccgggaggcggagcttgcagtgagccgagatcccgccactgcactccagcctgggcgacagagcgagactctgtctcaaaaaaaaaaaaaaaaaaaaaaaaaaaaaaaaaaaaaaagaattctcaattaattcaaaatacttcagcaaatatcttcatttcttaaaacatgcagtttcctggtatcataaaaccctcaaatagttgagccctaacttccaacagagtatttgagacttcaagaaacaataaaagcagctattattaagatataccaaaatacaagaaatcataccatgggagtcctctgcaactgggcagtggccatcttcttctgataaagtattttctttaattcaaccttgtgacacaaatacaagctttaacttagagctcatttttttcctctaacatttcagtttaccacatataaaattcaaaacaattttatgtgaataaatttgaatttctttaattaaaatagagtcttcaaaaacgtagaggtcgatattgcagtagaaccattttgagtagggtcctgatttgaagccatttgactagcaagtctcaaacaaatgggttattaagaaactgtttaagagaactttttaaaaaggcacaatcttcctatttttattccctatacaaattcaaacaatgacaacattgtacaggtaggtattcagtaatgaaaaattgcctggcaaaccctctaaactttttcagttttatttgtttttatttttcatttttttgagacggagtttcgctctgtcgccaggctggagtgcagtggcgcgatctcagctcactgcaagctccgcctcccgggttcaagcgattctcctgcctcagcctcccgagtagctgggaccacaggtgcccaccatatatatatatacaattttttttttcgagacggtgtctctctctgttgcccaggctggagtgtaatggcgcgatctcggctcaccgcaacctccccctctgggttcaagtgattctcctgcctgagcctcctgagtagctgggactccaggcgtgccaccacgcccagctaatttttgtatttctagtagacacggggtttcaccatgttggccaggaaactcctgacctcgtgatccgcccgcctcggcccccaaggtgttgggattataggcgtgaagcaccgtgcccggccgctaatttttttttctatttttagtggagacggggtttcgccatgttggtcaggctggtctcaaatgatcctccggcctcagccgcccaacttgctgggattacaggaagttgtgtgtccggaaccactgtgtccggccccagtttcacttttcttaatcagacaattcagctggaagagtttactaaagaggcaaacttcatagaagaacctatttacgttaaacgtttaaatttatcctgacaaatcctgaattcgccgtccgtactcaccccatctcaagaacctctgttgacaagtaagtgggtatacatttttaccgcaaatgttttaccactaagaccttaagaaacttaaaagtagggggaagctgacagacaaagagattaaaaagtaaaatatacgcacacacacacagatatatacacactaatatatattacattacgtctgaggggcgggcgccggagaccagaagagctgcacgaggctgcacgcgctgtgcccgacgcgcatgcgctttccttcaacggtcacccgctggggcgcgacagtggctttttgacccctggtcgaggtcacctttcccgccaagcgcagcgcaaggcgcactgggagcctcagacacgggaagcctcagcgccacgtctcaggcagtggaaaagccagacagaagggggaaggttaagtaactgcatgtgcagttactgaatttctgattgtttttctgacttttgattttctttcttttttttttttttttttttttgagacggagttttgctcttgtcgtccaggctgaagtgcagtggcatgatcttggctcactgcaacctctgcctccagggttcaagcaattctcctgcctcagcctcccaagtagctgggattacaggcgtccgccaccatgcccagctaatttttgtatttttagtagagacggggttttgccatgttggccaagctggtctcaaactcccgacctcaggtgacctgcctccctcggcctcccaaagtgctgggattacaggcgtgagccaccacacccggctgacttttgattttctcattggaactaccacaaattgcattcccaccttccaatctcctgtatcttcaggaaaccatttgctttagcagtcttctacttagccacttccactgtgttatgtcattggggacaatggatagctttgaatgtaatttgtctcatttagaaacaaaataaaatcagagtgggtaggtattaatagttggagattattcagtagtacaagcttcttagtttacagattattatatatccaaatacatttcttaccagtgtaaacattcaattacaggcataccttggagatattgcaagttcagttccagaccctccaataaagcaaacaacataataaagcaaattacacaattttttagttttccatgtgtataaaagttatgttggctagatgtggtggctcatgccaataatcccagcactttgggaggctgaggcggaacaattgcttgaggccagaaattggggatcagcttgggcaacaaagtgagaccctgtctctacaaaaaataaaaaaaattaggcagaggttgtggcacacacctgtagtctcagctactcaggaggcttaggcaggaggatcccttgagcccaggagtttgcagtggcagtgagccctgtttgagccactgcactcctgcctaggcggcagtgagacttgtttcaaaaaaaaaaaattatggttacactattaatatcttaatatatatatataaatttttttttttgagacggagtcttgctctgtctgtcgcccaggctggagtgcagtggtgcgatctcggctcactgcaagctccacctcctgggttcacaccattctcctgcctcagcctcccaagtagctgggactacaggcgcccgccaccacacccggctaatttttttgtatttttagtagagacagggtttcaccgtgttagccaggatggtcttgatctcctgacctcgtgatctgcccgccttggcctcccaaagtgctgggattacaggcatgagccactgcgcccagcccttaatatatttattgtacatatcttatgctttctgtagtctgttaagtgtgcaggagcataatgtctagaaacacaatgcacatactttaattttaaaatactttattcctaaaaaatgctaatgatcatctgaacaatcatctttttgccggtggagggccttgccttgatgttaatggctgctgactgatcagggaggtgtttgctgcatgttggggtgtctgtggcaatttcttaaattaggacaacaatgacattcaccacatcgattgactcttccttttataaaagatttctctgtagcatgtgatgctgttttacagcattttacccacagtagaaattccttcagaattggagtcagtcctttcaaaccctgctgctactttgtcaactaagtttatgtaacattctaaatcctttgttaccatttcaatcttgttc

SEQ ID NO: 961 - DNA, 4001 bp, Homo sapiens
gatggtctcgatctcctgacctcgtgatccgcccacctcagcctcccaaagggctgggattacaggcgtgagccaccgtgcccggcctattcatgtttttcatcttggtttttatatgtgccaaaaataaacagtctgagtttacttgtggtttacatggtcctcttatgaacatcagcttgcttaaacttaatgttacaacaataacaaatatttgctttttgtcaagggaaatgcttaaattaaatcggttgtttattttgagacagagtctcagtctggagtacagtggcatgaccagggatcactgtagcctcgacctcctgggctcaagcgatctcctcccacctcagccacctgagtagctgggacttcaggtatgcgccaccacagccggatagtttttgtattttctgtagagacagggttgcccaagctggtctctaactcctggattcaagcgatcctcctctttggcctcccaaagtgttaggattacaggtgtgagccaccatgcacggctttaaattatttgaatgcaagcaataaaaaaaagtattgtagaaataaaaagccccaaatttcagttttaatttatttcctctacattaagagaaggctgtagaaaagtgaggagtttaacaacgtatttcagtttactgatatccttgataatatgcattttagggaaagcactataatttcacattttaccataaaatatatgtaatacatgtcattagtgatgcgctgaacacctcacattgttcccaatcttaagtcattcactacactcagatttaacgagtcatgtcacaaaaagcatgcctgtaatttgactgctgacaccacttgtttttcattttcaaatgtaagttatataagcaaacatatactcagtgtctgttttgggcatagatactaaggacactacagtgtctcatctcaataaaatcacaatctaactgggtaaggagttaaaactttcatccggaaatgaagagttcagtatacgttctccactaacttccagccctacaatcttccaagcaagcttaaaaacaaagccaaaaccaaccaacccagcaaactttaaaatgttacttctattttgaaacaaattacactaaacttttgagaagagcaatgaaaaatcaaaaagctaacaagttttttgcctatgtcaggttaaacaaaattagagcacctttcaaaaatgacactagtcacctctaatttcactctaagacaagacagcgtgctcaaaaagccccaggcgatttttagacgttatttcgaattggattctcactttttaatgcaatgcaaagtcaggaagcacaataaacaacagagagaacgtgcacgcggatgcggcagcacagttcacccggtccggtctccgtacgggagacaactctttctcaaaaaggttaagtggctgtccccggtcacagctgttaatgcagtaccaaccctcagatctggggctctcacctcaccactcctgcctccatctcttacaaacgctcagatgggcgactgtaactttctgacgacctaccgaggcaccgctctcattcaaaccccaccgcctaaggtggcgagtaaccagttctacgtttcccaccgggggagcgagactcaaggccgccgtcgcggagcagcaaagcgacagccgacagccccgcccgcagaaggccgcgggaaggacggcaagagcagcggagacaaagcagcgaggcgaggtagctacaggccacagcggcgaacgcgcacggcgggggagagcgcgggccgccagcgaggcggggaaagctcggaccgcggacaccgacggatgaggctggggctcggcgcggtgacagttcggggctcacgctcggcagggacaccgcggcgcccgccccggcgacggaagcagcggcggaacgcgagcctcggcgctccgcacactcaccactgggagctccgtaatggcggcggcgggggcggagaacccggggggcgggcccgccgcagccagtcaccgccgccggcatctttcgaaccggctccgaaaaccgctgagggagtggggtgaggggagggcgcgggcggacgccggaccgcggcgggcctcggagcatgcgcagccctcagccaatcggggcgggcagaggacgccgacgcaggcgcgctgggacgcagggtcgcacggccagagaagagctccccctcctcccccaaatccaaacaaaacaagggcgggagcgcgcgcgccggagggcccctgaggaggagtccaccaaaagggcagggggctaggtcgcaggagagaggaagggagcggggcggagcggccgggtaaggcagacaaaaggcgccacctccggggacccgggcgccccgccccctcctctctgggagcggcgtcggcgccccgggcgagcggcctccgccactcgccttcggggcccagcgagcccgcgcccactccccggccgcctgttcggtcctgcgttacctctgcgttcggccggtcctggcgcccgcgtcccgcacggcctctcggcgccgctcccgccgccgctagtcgcctccgccaccgctgtcctccagtcccagccgccgagctctgccgccccgcccccctacccgcggccccgcgcgcgcccccgccggccccgcctcccgcgcgtggggtgcgagggggcgcgcggggacgggcggacgccggcggagcgcggggcgtcggcgcgcgttcccggcgctgcgtggtggcgcccattgccttggcgtggcggggcggtgtcggtttcctcggaggggcgccgctttcccccgctaaccttcgctttctgtgctctccagggcagtcccttctcttaactgggtttccgcttctgccactcgtccgcctttagcggggctagcctttcccgcttctcagtttaggcgcagctcaagagcaaacctttttttgaagaccgtagaattggaaaactagagagcggagaattcactgcctcgcactcgctcccattaagtctccagacggtacagggcagagtagtgactcgggactcagaactgaaaagttgaaacgggctttccgggctccctaatcctcacatgcagggagagttccccagaatgaaaaccctgagattagaagacgggattccctttgaattgtcatattgcgttgctatcagcgtacttaaacaacgtacatacgaaggaaaagtacagctcttcaaagctagtttggaaagattgtttttaaagtttcaggtgttgggggacaggggagggactgggtaataaatgtaaggaaataccagtagaattgtcccaagcttacagtagatgaccagtactcaaacgtatgtgccaaggtttataaagacttacgacaccatttaagcactcacccagtcgtctggccctgccattagcataattgtctcaccagctttccctgccacagccaccccactctatcagttcaaatttcacagccagcataaaaaattctttacgaggtgtgcgttatcattcatatcctgatggcattaccagtctttagtactctggtgtcatattccagctgttcagaaggggttttgctcttttatgccattcttcattctgctcactcccttcgttgttaacgtttctgttgtcttccttttcaaagacttccatttttatgtattcgtacatttaaaacatcctaccgttcttcttttaccctaaaatgtctttagacccatctcatgtaagaagcagactcagatgagagcaaactgggagatgtttcctcctccacagatttttgcttaaaacaacaacaacaaaacttaggccgagcatggtggtttacgcctgtagtccctgcactttgggaggccgaggtgggaggattgcatgaggcttggggccaggagttcgaggccagccagggcaacataattagaccccatctctaaataaataaataagccaggaatggtggc

SEQ ID NO: 962 - DNA, 4001 bp, Homo sapiens
tcaggtcacacagccatggcattatgaggctgactcctagagttgcccacagaggtgcagaaaaaccttctgatcctcctccgtcctacccactgccttctcattgcctcacatgtgcctgctcagcactgaatatacccgcagcccagacactgccctgttctccctctgacaggtgtgcccaacaagaggcagcagagggaggtgttactgtgggctccagagtcagatcacctaggtttgaatcccagctcctcctcttaccagctatgtgaccttgggcaagttccttaaactctctctgccttatctttaaagtggggtaataacagtacttacctaagaggattgttttggggattaaattagttaatatgtgtgaagcacttagaaccatggctgcatagataagtgctacataaatgttaaataaataaaaatgacttacatatacccaggtgccacaaaactcatgcaaaaactgtgcaaatgaatgtataccgataactgtatgcttcatagctcaccagatccacaccctggatcccatgccactcacgtaccagcccacgcccacccatgggtcagcatgcctccacacatgacgacattccctctgctccacaactcacacgaatcgacacatggcaccacgcacaactcccataccctgtgcatcaagacacaccagcccacgaccccacatgtctcacacatgccatcacacgccaactcgcatgccgacacctctcacatggccagctgcacgtgggaccttcaggcacccttgccatttttctttgttttccttctgttttcccaggggtgctgccaggtcccaggagagggagctgcaaaccttcccagacctgctcggggccccttttccaaggagaccccccaccaagcccatccaagcctccccaacacttacccttcatctagtcctgaaaggtcccctgagtgcaggttagattgtggaggctgagtagaaggcaatgaagaggaaacagccagccagttctgcacaaggatgtaggcgtgtgtgcaggtgacccccacccacttagggcaaggaggggcctccttgtgcatacatgtgcatgaagctctgcacacatgtgaatgggtgtgttgtgagtgcatgtgctcatgcatgatgtgtgccgctggtttttgcattgcatttgcctgccgtgtctttccatctatgtccctgcatgtgcctcagatgtgcatgtgatcaggtatgcacccgtcacagcgtgagggaatgagcccgtgtggccatttggaggacccgtgtgtgtcctcggcggtgtgtcacatgcatgtttctgtaagttggtgcccctcctttctagaccagcctcttatggcccaggctaaggacccaccggacaagtgagtgggaaagggctaaggaaatgagaagggctggggcatgtcccgcactgccctcctcaaggtccaaggaactgggtcaccggggtgggggcagagagatgcgcggagcaagagagctcctccagtgccccctgggccctgccaccctcggagttgcccctcccggttgcaagaagattcagctgcccgcaaagacctccagtcccccatatgggaagaaccccctcagctcgacctgagaagccagccccggggacccgctccaaacctccctcagctctgtcccccagcccccgcctccatccgctcagcactaggacagcgcccggcgcgtggcccctcctggagggggcgctccagggcggtcgaacgcggttcctaggggccggccactcggcggtcaggaccctggagagcaccgcgcgcttcccagtccccagcgcccccgccacccggggcaaggattcccgggaagcccgggagcggcggtgttgggaagccctggacgtgggcccccagctccgggaaccccctgccctcatcccccggccccggctggagctgcccccactcacccagcgacgcggagacaccgactgcgcagggaaggcggcgctgctgcggcgcgcgcggcaggggcggcaggaggggcgggcgggactgcgagggagacgccccgcagcgctcacccggagcccctcccctgggggggtccccgccagccctgggggctggggagcggcgcgctgggctccgccccccacccccgccccggagagaaggggacgccctcagttccccggtccccctcgagggagcaccctgcccggggaggaggatcgcggcgcccctctcctcggcacctcggctctggtggccggaatggagggacacggtagtgccaagaggtctctctcctgagccgggggcgatcccaggccactccgccccgcttccttccccatacccacctgggctctgagccgcacgtcgcttcgagggccgaattggcaccctgggcaccctccctgctcctgcgcctcaactcccaactaacggagctgggagcgtggagcgcccattcctccagctactgaggtcttcggggtaggggaccagacacgcccccttccccacctccaccttggcgagccggcccccatgtcaaacccaccactccagacctcaccccgacccccctctcagaattaatcccacctcccaactttggtgtcagctgctcctcccactcccccttccaatcaaggaaaccccctcccttcctccctccccagcctctgattgtgcaggccatgacaggagggcagaacatctgcctggggatcctgtggcacctacccactgcctgccgaccgcacagctcctctccagagtcgatgacccctagcccagctcctcctgcccccagcctcagcaacattctccgcatgctgggctgagattttgtcctttttccatttctaggggttggtccttattgtccccatgaagaaatgggctcaaaggggttaagtgatttttccagtgtgtgcgccctcatccattcattccacaaatacatataaaacactagttctgcggccagcattgttctgtctagatagtgggactacaggcgcagacaataaacaatggacacaatatacatgtcgatattagacatgtgtttttaaacgttgggatttgggtgtggcagttagaatggtaactgccattggggccatccagggccttggggcctatgacaatgactttaggctttttattccagatgagatgggaagtcctggggggctttgagcagagtgagagggtgtgacctccatgtggacagcttccttgggttattatgtcaagaagagactttgaggagttgggggcaaggtgggagaaggggccatttcaggctgagagatggccggggtgggtctggtttctggatttacttcgcaggtaaagccggcagcatttgccatctgcccagagggcccttcccagcccagagtttcttcagcatcggcagctcagcccctcctggcaccccagggctccgcctccaggctcccagactgagcctctcaagtcctcagagtctagccttagtccctcctgcttggaggcaggtggggaggtctcggctggaggaactgaggagccggggtggggtggggacagctgggctctccggaacaccggcttcactgtgtgccttggctctgatgttgggacccccagtggaggcgtgagagacaccagatgagcgtgggtggttcccagctgcctcctgcgtgaggacctgggggctgggagagactcgctgctcagcccccaccccagggccctccagtggcaagctccctcccatttccccaccaggcctggggggccagctgtgctggggtcggggagacggtcccaccctccctcacctcctcagccccctcccccatcaccccttcctctctctcctgagtggtctggatcctcctctttatccttgggggactcagtttatccccatcttgggctgctcagctccctctttgccttctccccacttccccagttcagcc

SEQ ID NO: 963 - DNA, 4001 bp, Homo sapiens
ctaggggaaggaagggttcaccccaggtcaactatagcccatcagcagcaaagtgaaggccagaacccagctggggacatgctctgctggagctgtggccctgctgaacatgggcaggctcctctgcttacctcttgagggctgtcctccagctatgaaggagctgggactgtcccatacacaaaaccattgtcccagtgtgcccagaggtttcttcaagagggctaagggctgtgggctttgaatggagaggtggctgaggctttgaatgggagggactgaaggaggcaataatcccacaccctcacccagcttcagaggagctggtactgaggtggttgccatggtgacaatagctccctggtcaggagattttttctctctttcctctcctccctttgctcttccccaagcagcagcaatagcagcagcaaccaggtcttttccctcttcttcttaatgagaggcaggggatgacaaacaaagagtaatcccagctggccacctacaatttggagctgtccatgtcaggatgggctggtggtctaggagggactcctaatagaaggggcctggagaatgtgtgggaggaggtagcctgtacctaggctggttaagaaggaatgtgtcttcagtgagttctaaaccaaccccgcccccctcaggtctcctctctttaatgtcctcttggttcaggatcctgtttttccataatcagccatagaaccagagtgtctcagtgccagaaggctgttcaagttcatctcacccagtctaccctctctgttatacctctccccattttcatgaaggatcagagaggggagtgacttggccaaagtcaaactttggctgtacaagatttgaacccagctcatctgccctccaggtatagttcactttagggccaagagcaatacagcccacatggcaccttggcaaggtccccacggagcagcaggaaggtgggagagagggagcaaatagtcatacaaattagaaagacatttgacaggcagaatgagaggatttggtgcctggctgtgaggggggagggaggaggtatggaggttggggccttggcagcaactggactgacggtatgggtggtctgctgggggtggtgtctttggttcatcctcccgccaggatgagagatgccaaatatggggcctctgcctagcactgggggccactggggagggctgtcgagactgtgaggagaaaaactggggaagggggattgtccccccctcaggtatgctgtgggctctgtcagcttgaggggtgggatgtggggacagtgtctggggacaacaaggagggagcgctctgtggagggggaggctgtctttgggggcaggggctccctgatgagaagtggctaggggctatccgtggaggtgggagtttgccatggtgctgggcagacaacccatatccaaacaggagggagggtgaccagcgcctccagctagcaccagcgccaccacacccccagatgtgtgtgtgtgcatctgtgtgtgtatgtgtgtttgcgcgcgtgtatgttgggggccatagcaatggttgttctcacctgagctggggataagtaggcggctctgcctccttctctgcacccatgggcctggactgaggtggggggtctcctgcccaggggtgggctcttcagttgctgccgcctaaggcggaaccacgggtcagggaggtgaatcagggcaggacatgaggatgggaagggagagtggagggggagggggccagggcctccgcccggtgggtttgttgccttgaggacccggtcccactcgcattacctgaggccggtcgccgggtcgctggatggctccgagcctcggcgggccgcgggaaccgaggctggctcgcgggccggcagctgtgctctccaaggtctgcgccggagccgccttccagctcttgtatcactatgtgcctcccgaaggcgacactatttgcataagccccgccccatcccgggcaggttgcacggctattggctcctctggagcggagtggcaggcggggtttcaggtggggaccgggtggccggcgaggcccggccgcaggagcgcgccccgcctgcccgcgctgaccttcccggagtcgccgggaagcgggagggctgcacccccatctgcacccctgccctgaggctcagcccccggcttacaagtctggggtggaaagggtcgacgatgaaagtggattctcaaaaacaacctcaccgttgctatggaaacgggagaaccacagccgaatctctaagcttcctttcctgggccccagcatgggtgggggcggaagaggggatgagtcacaagatgagacccccccccacacccatatcccacccgaaattgggaggggccaaagaggagctggggaggagctgggtgggagagggaggaggtggctggtcagcagtccacatctctgcgtcccccctccccacgcatccactcccctcacgccgtggggcagagaggagggtgctggttgcgcgcggagagcgcggtatgggtggcgaagtcccagcctctacctagccccgcgctagtcgtgggttccctccagccacccctctggcccttcattccggtccctccccagacgggccctcctcctttctcatggacccccaagaggcctctcgcgttctcccccgaaggacccctatgcctagccatggatcctccattccccaccctcccgttttcccgtcccgcagacggagccggtccccagccgccgccagtctccggcctcggatgttgacacaaacccgaggcggtttacactgagcgggtctggaagctttcagggccccggcaacacctcctccccgcacttgggggtctccccacagcccgggccggccgcctgggctgcactggcgtctgagagctcctgacacaaggctgtgggaaggaacccttttaagccaaactgggggcaaaaggggagccagacatccccgggctgggccacgtgcggggcagggacttctaaggatctgtcgaaagtcggggcggacggctggggattggcctaatcggagcgcggacgctgaagagcagcggtgagaggcggggcttctgtccgcgcggcgaaggtagaggtgggctgggcggggcgatggaggatggggtcagacctgccgcgagtgggggcgaggcttctggagctggtcccagaaatgcctgggccaggctcgctgggggaggaacccgtggacgtcccttttctttaggacctgtcccgttgccccttgaaacggttttgctctaccattttcgaggctgcggactatgccttctctctgcggccttagcgggggctgagggctccaaggaacctgcagctgtaggagaaggcgcgtccttggcactatgggttggtgactcatgaaagacaggtgtttgaagctctaactctttcacttctctgataccttctcagctctgggtcttggggacccagagatgagcgagaaccccccttgctcacagttaaccataatccaaggcgtgaagaagtggggagaggcagcacaggttactagaagtggtatctgaaaccctaacattgactgacccaagttcatattgctaacattgagtctcatttttgccaatgattccatttacgaccgtgggcaaaacccttctcattctgggcctcccagtctgtgaaatgtgggagctggctcaagaggtccagaggagcagggggaaattttcaaccaggtgggtgaagaaagactgtcccttggacagaagtatgtggacatgaatctgactgctccacttaagagtcctgagccccttaacaatagctaatgtgtatcgagagcttactttgtgtcaggtgctattctagcatattatatgttaccatataatataaattgggaataagttactcaatttattccccataagagctctgtgaggcaggttctattattactcctactt

SEQ ID NO: 964 - DNA, 4001 bp, Homo sapiens
taagggctgtgggctttgaatggagaggtggctgaggctttgaatgggagggactgaaggaggcaataatcccacaccctcacccagcttcagaggagctggtactgaggtggttgccatggtgacaatagctccctggtcaggagattttttctctctttcctctcctccctttgctcttccccaagcagcagcaatagcagcagcaaccaggtcttttccctcttcttcttaatgagaggcaggggatgacaaacaaagagtaatcccagctggccacctacaatttggagctgtccatgtcaggatgggctggtggtctaggagggactcctaatagaaggggcctggagaatgtgtgggaggaggtagcctgtacctaggctggttaagaaggaatgtgtcttcagtgagttctaaaccaaccccgcccccctcaggtctcctctctttaatgtcctcttggttcaggatcctgtttttccataatcagccatagaaccagagtgtctcagtgccagaaggctgttcaagttcatctcacccagtctaccctctctgttatacctctccccattttcatgaaggatcagagaggggagtgacttggccaaagtcaaactttggctgtacaagatttgaacccagctcatctgccctccaggtatagttcactttagggccaagagcaatacagcccacatggcaccttggcaaggtccccacggagcagcaggaaggtgggagagagggagcaaatagtcatacaaattagaaagacatttgacaggcagaatgagaggatttggtgcctggctgtgaggggggagggaggaggtatggaggttggggccttggcagcaactggactgacggtatgggtggtctgctgggggtggtgtctttggttcatcctcccgccaggatgagagatgccaaatatggggcctctgcctagcactgggggccactggggagggctgtcgagactgtgaggagaaaaactggggaagggggattgtccccccctcaggtatgctgtgggctctgtcagcttgaggggtgggatgtggggacagtgtctggggacaacaaggagggagcgctctgtggagggggaggctgtctttgggggcaggggctccctgatgagaagtggctaggggctatccgtggaggtgggagtttgccatggtgctgggcagacaacccatatccaaacaggagggagggtgaccagcgcctccagctagcaccagcgccaccacacccccagatgtgtgtgtgtgcatctgtgtgtgtatgtgtgtttgcgcgcgtgtatgttgggggccatagcaatggttgttctcacctgagctggggataagtaggcggctctgcctccttctctgcacccatgggcctggactgaggtggggggtctcctgcccaggggtgggctcttcagttgctgccgcctaaggcggaaccacgggtcagggaggtgaatcagggcaggacatgaggatgggaagggagagtggagggggagggggccagggcctccgcccggtgggtttgttgccttgaggacccggtcccactcgcattacctgaggccggtcgccgggtcgctggatggctccgagcctcggcgggccgcgggaaccgaggctggctcgcgggccggcagctgtgctctccaaggtctgcgccggagccgccttccagctcttgtatcactatgtgcctcccgaaggcgacactatttgcataagccccgccccatcccgggcaggttgcacggctattggctcctctggagcggagtggcaggcggggtttcaggtggggaccgggtggccggcgaggcccggccgcaggagcgcgccccgcctgcccgcgctgaccttcccggagtcgccgggaagcgggagggctgcacccccatctgcacccctgccctgaggctcagcccccggcttacaagtctggggtggaaagggtcgacgatgaaagtggattctcaaaaacaacctcaccgttgctatggaaacgggagaaccacagccgaatctctaagcttcctttcctgggccccagcatgggtgggggcggaagaggggatgagtcacaagatgagacccccccccacacccatatcccacccgaaattgggaggggccaaagaggagctggggaggagctgggtgggagagggaggaggtggctggtcagcagtccacatctctgcgtcccccctccccacgcatccactcccctcacgccgtggggcagagaggagggtgctggttgcgcgcggagagcgcggtatgggtggcgaagtcccagcctctacctagccccgcgctagtcgtgggttccctccagccacccctctggcccttcattccggtccctccccagacgggccctcctcctttctcatggacccccaagaggcctctcgcgttctcccccgaaggacccctatgcctagccatggatcctccattccccaccctcccgttttcccgtcccgcagacggagccggtccccagccgccgccagtctccggcctcggatgttgacacaaacccgaggcggtttacactgagcgggtctggaagctttcagggccccggcaacacctcctccccgcacttgggggtctccccacagcccgggccggccgcctgggctgcactggcgtctgagagctcctgacacaaggctgtgggaaggaacccttttaagccaaactgggggcaaaaggggagccagacatccccgggctgggccacgtgcggggcagggacttctaaggatctgtcgaaagtcggggcggacggctggggattggcctaatcggagcgcggacgctgaagagcagcggtgagaggcggggcttctgtccgcgcggcgaaggtagaggtgggctgggcggggcgatggaggatggggtcagacctgccgcgagtgggggcgaggcttctggagctggtcccagaaatgcctgggccaggctcgctgggggaggaacccgtggacgtcccttttctttaggacctgtcccgttgccccttgaaacggttttgctctaccattttcgaggctgcggactatgccttctctctgcggccttagcgggggctgagggctccaaggaacctgcagctgtaggagaaggcgcgtccttggcactatgggttggtgactcatgaaagacaggtgtttgaagctctaactctttcacttctctgataccttctcagctctgggtcttggggacccagagatgagcgagaaccccccttgctcacagttaaccataatccaaggcgtgaagaagtggggagaggcagcacaggttactagaagtggtatctgaaaccctaacattgactgacccaagttcatattgctaacattgagtctcatttttgccaatgattccatttacgaccgtgggcaaaacccttctcattctgggcctcccagtctgtgaaatgtgggagctggctcaagaggtccagaggagcagggggaaattttcaaccaggtgggtgaagaaagactgtcccttggacagaagtatgtggacatgaatctgactgctccacttaagagtcctgagccccttaacaatagctaatgtgtatcgagagcttactttgtgtcaggtgctattctagcatattatatgttaccatataatataaattgggaataagttactcaatttattccccataagagctctgtgaggcaggttctattattactcctacttaacagatgaggaaatcaaggcacagagcggttaagtgactgacccaagttcacattgctagtaaagagagctccagtgctgggatttgaaccccagcagtctagcctcagagcccacactcctaatcagtacacaatactgcctcttcttatggtccttcaagtccttaagggtaaggaccttagattggaatatttgtttctgattccccaaggtattagaaag

SEQ ID NO: 965 - DNA, 4001 bp, Homo sapiens
tgccagtggctgacacacaacaccctctgtttacgtctcaggtcagctctaattggagtggtggcatcactctggagtaggtagttgggctcaactctcacccagcccctccccacctgagtggtcgctccctagggggagaggaagcacaggagaagatttgttctgttttaaattcctacctcaaatacgaaataatttatttagggttatgttacatacggagtgaaacaatacagaaaagcaaagggctaataatgacaggatttgaggagtgggtgggaggaaatagaatcacagcgggacacagggaggactcgaaagtattggttatgttctatttcctagtgtgtaattcttttattgttctttgtatcttacatatttattatagactgtatataagaaatgttttagttttaaaaaatcccacctctttggagcccaatgagagacacagcttctggcaggcactgatgaaatggaagtcacacctgccccccggaggcaaagcctttcactagttgggcctcctgcagatgttcctcagttctgtgctggtctccccagagctgcaggacagctggctgcacccagccctgggcatccttaggcttcctggctcctggcagattgctcctgtacggactgccacagagctctgatgttgccctgaccaaagccagtggccccctgcctctgaatcagctccaggaagaaagtgtcctcagtaaaaagggacttggtgaagacctgaagcagaaacttgcctttatcaccatctagcaggatcccctgtcgagcaagcagatgaggctcgtgccctgcagctcggatctgcctctcctttcctggctgctggtagtatgccccagggggagccaggaactggcctccagcagttgccaccccctcagtggcctccacaatgttaggcgtatacagccccacgtgctgcaggcctggccccttgtgccgggccaggaactgctccacctggtcctgtcgtgtcgtcgcccccggaagggactcagccagaacaagagtggggacaatgctgcccggctgggcctgcagggctgtaagcctcagtcccccaagcccaaaccctgctgtcatttcgaggcccagctcgggatcctcacctgggctcagcggcaagtggcaaaagcccaggcagtcgtggaaccagcgcaaaagtgtgggggagctgccgggggtgcaggccaaggtcaggtggtccacgcggctgacccacccggggccaggcgcagaggacacgggcctgaagccgggtaggaagggtccgcggtagccagcgcgctccagcaaggtcaggctgaggatgccggcaggcgagctgaccacggcgtaagtggcggcaccctgcgcgtcccgcacgcgaacgggagggacaggcacgctgcagcccagcgctgccagctcccgggttgcagcgccggcgtccgccacgtcgaagcacaggtttgtggcgctgggcacggcgtgacgcggatccaggccgtacagcggctctccagaccctgcgccctcgttcaccaaaaagaccgcgtcgccgctgcgcagggctagctgccgccagccgtccacctcccgcgaagccaggggctggaagccgaagaggcgctgcaggttccgggctaggggctgcccggcgggcacgtggaaggcgatgtggcacaaacgaagggcgggcgcggccatggcgctctggacggcgacctagacttgtccttctggggccgcttacttgtggttggggacttcggggctctcagtcctgggctgatcgtccggagttggggagtccggctcaccccgcagagcgcgttcctcgctttcttccggaaagaagtcacccgccgacccctgagagctcgcggttctccctgcagcgccaccccagccaggagcagcgtctggaccaccgggtctcagtgagccgagctgctggttgtgagaaccacgcggtgcctgtgctcgcgccaagcaggagaaagagggcggagcccgtgactccgcctttgactccccaccccctcccccacaccctgtcgcctcggatactgcggggtcgccgcgctgctctttccccgggcctcacgcctggtcacatccttgggcactgagcctcccttccccagcccaggaactcacaatggctgccttcactcggcgccaggcactgggctcccactcatccccccaacctcacagcgaagggactcagcccgggttcagggaaagagttggaattctctctccacaagcacggaattttttagcactttcatgttttttctttaagttctggagtttgcctctaagtcttaatgttccctggaatacacacacacacacacacacacacacacacacgtttatatgttttgagacagggtctcactctgtcacccaggctggagtggcacaatcacagctcactgcagcctccacctcctgggttcaggcgattttccttgcctcagtgcacaaatagctgggaccacaggcggacgccaccacacccagctaattaaaaataatttttttttttagaaatggggtcttgctatattgcccaagctggttttaaacccctgggctcaagccatctttccacctcagcctcccaaagtgttgggcaatctctcaaccagtcctgtctctttcttcaatcacccttctgtcaacatcatttaaccccttgtcccaagcaagatttggaggaaaaatctgacggttcgggatctgaaaggaacagctgcctggctgtcattccccttccccatcctttgaggactggaacacaggccctccttgctctttgcagcttcctgacttggcattgagccagagatttctgtggtgggggcacttctggctctgaaacccagaattgtgtgagatgactggattgaggaatttgtagtcttctggaacttcaactgagtggcccttgaagggttagggaagggcatccaagaagggcaaagggcataagcaaaaactcagtaagagtgtgagccagactcttagaggagcaatgggccatgctgttagggaggcatttaggatgaatgccacagtccaaggcatcacaagaaatttttttgtcaggcagcctgatctactgggtttcattggcaagagggagaaggatgtcataggggacaggggctagctggatgtcatggtgttcaggcctgcaggcaggagggcagtacccaggagctggtcagggtggtaaaaggtacttggtgctactctgcagaccagtgaatgtgaggacatgagttccaaaagccagacggacctgggtttgaatcaccagcaacacttactgtctgtatgggcaagttgcttaacgcctctgagccttaatttgcccatctgtaaaaatggaaataatagtacctacttcaaagagttgtgattaagtgaggtggagtaagtgttcagtaaatagtagctgttgctattgtagttactgtttttttttttaattaattttattttcccacatattctaatatttatttattttaaaaagtttttcagagctgggcacagtggctcacacctgtaatctcagcactttgggaggctgaggcaggcggatcacctgaggtcaggagttcaagaccaccctggccaacatggtgaaaccccatctctactaaaaatacaaaaaattagatgtaatcccagctactcgggaggctgaggcaggagaatcacttgaacccaggaggcggaggttgcagtgagccaagatcatgccattgcactgtagcctgggcaacaagagagaaactctgtctcaaaaaaaaaaaaaaagaaaagaaaaaagtttttttagagatgaggtcttactctgtcacctaggctggagtgtagtggcatgatcacagctcactgcaggctccaactcctgggcttaagcaatccttccacctcagtctcccaagtagcttggg

SEQ ID NO: 966 - DNA, 4001 bp, Homo sapiens
gaagttatggagcattcaaggaactgaaggaaattcaggattgctagatttagagtttgaagagtcaagaaatgtggatagagagacaaatagggactagattatgacttttaagttatgttaaggaactttgtacttcattttaagagcaattgggaactattgaaggatttttagctgaggagtgaaatgattatatttgcatccaatgctgagagtagaagtagtaggtggcctgaaccagaggactaataatagtgatgaagagaaatgggttgttttgagagattattgatgagttagatggaggttagaaggtagtggtgtctgctgagagagagacaataaaaaatgacaccaggtttttgctttgggcaaaaagatgaaggaaaaaggttagtggggaagattatgagattcatagctgacacactgaatatctgacatctgatatctgaatatcatatctgaaatccacagaaatccaaatttaaggaattgaaactcaggagtctgatataaggtcccaaatatctaagctatcaaatctagacctgacagttttaaggtggtggacacattcttttgtgattcaggagtaaatgccaatttcctgaactcagaaatctacttcacagtttttctgaggactgtctgggtttgtaggaattagtcacttagataggacattatttaacctgtgggttttgtttgttgtttagtaaggtcacttccgttagttatgctatggaaaccatcacggatctgcttttgaccttatctcaaacttttaccaaaccctgttctctctcaccaagtaaggacaatcctctaggatgtttgacatatgtgacaagaaggtggaaagggataaagaagaaaattcctgcataactccatcctggcgtggagttcttaccttcagaatttgatgaaactcattttccagaagttctttcagctctgccttgttcaacgtatcatactccccatgctgggtggcatattggtagaaaacatcgatgacagtgatgacgccttgtaggagtttaggcatttttttttttgcaagtttgagtaacctaaagggaggaaaaagagagaccaaccccttactattcttatttcttgtttaaacacataaatagttctaattatttataataattgttcagaattagtcagtcatgattaaattcattctgttgtaatcaagaaccaattcagagttgaatgacttgttcaagccatgtagcaagagagtgatgaaattaggaatataatccataggtcttatttccattcctgaatgaatgtaggaaaaatgactttctgtttttggcttcctgccattaccagggataatattagctttgttctggagctgtagaagtcctgagtgttccacttcatctgcttcctctttctaggttcgaagcatactgtgggcataggtccatcatctacatgacatgccttactcaacctaaggagcatcaatggctgaactgaactctcaagacttctaggtcagagaaaatagacaatgtgagcaaagccaacaagcctaggtgatatgaagctaagggtaactgctattagatccagcttctgttctcattctccaagcaggaagtgaccctcagaccttattacacaatagagaggaaaagctcagttgtaaagaaggcaacctgcctgtggataattagaaccccatgatatccatgttataagggaagcgacctcaaagaaaggagataatatacatagtcctagtctttgtttcatttttcttttcagtaaatttaaacttataccaaagttccccagagtatactaaaaagaagccttgtatctagtgcctctttgccttagagcacatcctggactttcataatttatagccctaagtacccttgagcggagttgaactgctcacttacctagctcaccagaggaacaagtagggtagagacagaaacagctttcagggtgctgcgagttgggcagagtggcctttttatagagggaataatggtccctcttagggaggagttgctaattttgagatgtcctaatttactcctaaacaagcccatctccacctctatctccacctcccaggtgtttaccttcttcctgacttccttacaggttcacctaagattgcattagcagttcccaaatctgggctactctcagccccacctgccaaagggtcaggacactgcagaaaggcctgtttttgtattcatcaaactatctagcacaatatattgacaacaaattgtgtggattttaatagaagttgaatggagtgtgtgcagggacatcatggcccaaatgtcaaaaaatcatggaaattgatgattaaaaggactgtaaagatcatctagtcaaactctcccattctaagctaaatgttcttaaatggtattccagccaaagtgtcatctttggtattgttattaccttttgaattggataatggctccaggccatcctttaactcattaagtacctcaatttaccagaccccttattggccattcatcaccatagctttcatttcaaacaccatataaccttaggaagaaatgcgtgcttgttagcatggtatccatggttcctcatgatctgggctgtggcttttttccagctccatttctcccctccatatttctctttgtactccaacagtaattaactagtaatatttcaaacttcctcaatataccatgggatatgttatttcatattttttcttagaatgtctttcctcattgtctgcctagtgaactaattattcttcaaaatccaatttaggcttcccatagaaaatctttcctgaattactcaagagggagttgtaattgtgtaccttattcatatttattgttgtatcaatcatactatattgtaatctttaaaaattgttttactatacaattattgtttaatataaaaattagaaaatattgataagcaaataagataaaatcaaaatacctttaaagccactagccaaaaataactactgttagttatttgttgtatatccttgcctttcacaaacacacacattcacacacagacacacacatttgtctatgggcttatttcatttctaggctatgagctccttgagaataaggaatggacattatttatccttatgtcatttggagacctagtatactgcttgtcacataacggtctccaataaatgtcagtttgaattcatttgaaagagaagcaaggatcaagactatagtcctctgcattggccaacttccatcttttcacaggaggactagggtctgccctctctcttgccatctttgcctcagaggacatgattttacctgaatataaacggaatcttagcattgagaatcaatgagtggctttctgcttttttctgaggccctcgctctgcatttcttccattgtgaacatataacacaaatttcactgaaggtgtgtgaagttacatggacttaaaacttgtgcaatatggtcatcaggatttgagaaggtgtggtagcaactgttggcaagtgataaattacatgattccaaattcaactattgttaggctatgtgttttcttttaagaattgcccagagggctgcagagtcagtatccattctgtagccgtgtttcctctggacatctgattgggccaggttttcatgcttcatcagaacaatgactttttaaaggtgtggctgagactgtgggagtaaaggggggtggaatttgctgagtgaagactgatttcctgcaggaaccagctgttgtcacgaagggaggagagggttgtgagagaagactattccaggtgaacgtgctcttggggctagtgttctcctgaaataggggccagcaaacttttttttttgtaaagggccagatggtacaaaatattatctctgcaggacagatagtttttgttgcaactactcaactctgctattgtagcataaaagcagcc

SEQ ID NO: 967 - DNA, 4001 bp, Homo sapiens
catttttttccaccacacaagatacatattaataaaggaattcgtaaataaactgagtatctcttcaaattttactctagaattgagggctggaagtaactctagttttcctccaactttagttgcacttcactcagatttacttgatggtttttctttcaaggctctttaaaatgtcaaggcttttgcaaagccttgtaccaaaatagctactatacataatattacaattattttctggtacatttttcctaaaaattaatcatccactcacagtaacatctatttcttagtctaaattacactgctgagggttttttgtttttgtttttgctggcttctcaaaaggtatttaaaatgattttgaggtgagagtatgcaaaaaacacttcacattacttttccatattcaaattacatcctcttgagctgatttttaagtgccatgtacatttttaaatcaaaatttatcactgtcattcttttaactctcgctctccatgctgagctcttccaaatgccaaagtgccctattaatccgaaagtacctattatctgtgcttttttctggcctgtctttcacaacttcacaccaactttttgtactttagaccccctcatccattaaagcacctgttaaccctttaaggtatttaaccatatggttagctttccgcataatcctacttttcctttaacaaacacaaacttcactacataattccccttcagcgttccctcctcttcgaaattcacatcaacactgccgtgaagcaacatacataggcatccctattctcaagccccaattcatcagtttagcgccactaaagaagaatttaaatctccggaccctcatttccgtactccgatgaagctttgcactcgcgttcccgcactacccggccagcctccctcagctggcaattacaaggtcctttgctgcccggagcacaagagtgcaactcgctacagtgttcacatgttgctctccgtcatcccagcatctcctcccatttctgcgcacctatcccttcatgagcccccaaaagaattcgtatccagatgcccatagctcaaattagaatacccctcatctgacattgccagggcttcctgtacgacttccaagagaacacgcgatgctaagcgcttctgtctccggagaccagcaacacacgctccccactgagttcggtcttctctctcgctctctctccgcggaatgcctacttcggggctaccctttggctagggaagcccaaccttgcaacctctgccccgtgacctcgcgagcccagcacgccgctcaagcttaattcaacccattcttggagctcgtgctctcgctgccccttgttcccggttctctttgaaaccgctttcagcccccgagccagaccccaggttagatgaacgcccacttgctccggcggcagcgcctcctcggccccttccacagcactcagcccggggcagttcagttcctcacctagcttcgagcgggactcctccagtttctggatctggttttccaagaagagcatcgccaccgcgaaggccaccaccgccagcagctgcaacttgggcggcatcataatcctgaggagccccatgaaacccgctgctcgggatcaagacataccgcggggggcggggagcgggaccccggaggcgagagagacgccgggaggagcccgccgagccgggagcgaggcaaagagagagcgacagcgagagaaccaccgcagcgaccccccttctcgcctctccagtccccctcccccaggcgctatcaccaacgccgctggtgtccgcttctcctcagccgactaaacggccgccccctccaaaagcccgcgcagcaaacagcgcgaagcggctgccgggctctcgcctccctctactgcctcagtccccgacccccgcgcccgcctgcttgcccgcctccctctcttccttccttccctccctcctttgctcgcggccgcgcgcccctccaccggcgctgcggctgcgccgccctcatccccgcccccgcccatccccctccgccaccacgcgcacgcatccgcgtacgctgctcggcaaccagaagccccgcccctccccccgttcgggtccgcttattggacggaagagcccctgcgcttcgctcttggttcggtttacggttggtttcctctgccacagagctcaatcaagacgacattcaattgggtaaacttggagaagaaggcggggctaaaactggcgaaggcgtggcttcttggctgcttgacgaagtgtcgtgaataaaagaaaggagaccgcagaagtaaagaagtggggagtttaggcaagtgcctgatttgggtaatcgaaagcacccagtgattgtatttgatgacttttaagctttcatatgccgttatttaatacctgtcacttccaaatgagagatgtaagggcaacggccgttagcgttctgttttggatcaggctctggagtggacgcccctagcttaggggtccttctaggcagccagaaacctgcggaaaatggtagcgatggcggctgggccgagtgggtgtctggtgccggcgtttgggctacggttgttgttggcgactgtgcttcaagcggtgagtgtagatcaccttcgcagctgccacagggagagtaggagtgattgcagctgagaaagacgcaacattcggtcctggttgaaaagggtggggaggactgcgcttccttaatgactgctgcggccagaatgcaacgtggcttaatttctcggttgatccttctccttccccgccttgggtttctagcagcagttttctcttgatttcagattgtcttgggtacgtagcttctcttatacggctcttgctaaaaacaatctgtaaaccacaccaggtgggaggggggaataataaagcttggcaagaagtggaggttgtttttaaatggacagaaatgcaagagactcatgacgagacttccaactcttagaggcaagtcttcaagtcgttggtccaggcgaacagtttgtgtttacctctctcgcgcgcgtgctctctcattttcactacttctgttagtctcttaacttccgttctcctctgctattcatatacggctggctgcgcttgagtgcgatttgtgcttttaaacaatgttgttggagtaaaaggagttatctataccaaagtataattcatttttgaagttagttttttaaatgatgttcgttgtcttctttaaggcagcgttttttatttcatttttctctattggcagaatagatgggtgacctttgaatgggaaaagtgtacttttaacttatttcttctcatatccatgttctgctgtgtgaatagtaaaattttaggcacagtgctgaaagcttttacgtttttttatcctagcttaattcttcgggtagtctctaataaggagacctggtttaatttacttatccaaggttgagggtgttaagggactacaccggagtcctctatgaacacctgtacttacctttctcaaagagcttgaaagcatcctggctgtttgctttggctactttaaccaaaaggtagattcttaacttctgtaattaacattccaattatcttgttattcaggcatttggtgctaggaattactggatcacctctccctaaactttctactgtttaagggtttttgcacatctttaggtcattcgagataacatttcaggttgtctttttttgatctccctctgtctttgactgtcagttgtctatagctgtgtaaccgccctaaaacctagtagcttaaaacagcaatgatttctcataattctgggtcagtggagtagaactactccacctatgttggttttcccctggcctcatttatgctttttgttgacctagtaggtcagctaaaccgaaaggttccaggattaccactgtttatagttggtgctgtcagctcgaggacttggttctgttccgtgtgacctctcatc

SEQ ID NO: 968 - DNA, 4001 bp, Homo sapiens
caggtagcctgaatggctagagcaagggtctgtgttggggaggggcctgagtaaggctggaacagtcactgaactagccatgtctctccagagcctgatcctgggcttaccaacaagagctccagaaatcataatatcttattccctctgtgcatttgagcaaagttaaaacaatgttatttgtaaaatgaggataatatgaagattacataaagaaatgagacatgtaaaatgctgatcaatggtaggaatgtaaaatattctagttctctcatgacaaatctgcctcaaatctttctcctccctagtctcctaacagttataaaacagattctggaaaaactaaactattggggaaatctttttcttctttctatttctgccagggaaagattacttgagcatcttttaactgaatgttgtatttagtcagcagctgcggtgtttatgagctctcggacatctggggtaccttcttgtaaagttttcatgatttcttaaaaggctcctgggtgggactctgggagaactgagttccagtctccctcccatcactgacaatacatgtgactttgggcaaggcccttcccttgtcttggcttcaattccctcatctggcaaacaaggagaaataaattagattacctttaatatttgttctagctcagaaattggacacagagaacttttagctgtactcaaattagtataaagaaagagctaggattttcagattttattttcatatcatcctaatgacagggaggcagttcctttcaaaccttggcaagccagcagaagtgagattgtttcatctctccttacctttcccaccctcctttcagcttccgactctgatgaactcacacaaaccccaaagagaaacactggctctgaaggaaacacttcaattgtgtccctctgatactggtaagctctgttggaaaagtcagaggagttggactcttaaaagccaactgttgtgaaaacacatcatcgtcgtctgtagatgttttctgaagcatgcatccagctattttaatctctccaaagtgagtggatcactaagccacaaccctctggatgatatggtctattgatggcaagtgaaggtttgggtaaatggtgagggtggggaatggtatttccctttcctgtcaggtttctctagttccttgacctgaaacaagtgttgggattttctctgaaaaggcccgtttagggctcagagggtcagtattctgagcagcccagctggactaggattaaaggatagatgaatagcacatgaagaattttgatggacacgtttaggcctcccttggtccactgaacaagacttctggaaataaaatgagccttttcaacactctagatctaaatgttaataacattaaactggctgatgtttggctgcaacatgcaggtatcagcacatttaagtacttcccaagatacagcatagtgtttgtgctctgtcattggtttaaagccgattttaaaaactgcttacaacatttctataattcttgctgtctttctgtaattccaaaagaacatgcagacactttttatactatctttgcaacttttttgttccaacttgactttctgtcccacaatgatcagaatgctgtcagtgccagcaagagacttctggttccatctgcatcttatcatatcatccctcctacacatttgaaagctcatcgggcgtttcttcttgttttttctgaccagcatttcacattgaaatttttctttagcccagccctcctgttcatttcgatagattaattatttcaatagcagatttttttgaggacctactatgtactaggccctgatacaaatggtgatactattatatataatgtgatttttaaaagtcttacctcaagatttcgaacaaatctgacttctttttattgatgttcttttttctttttcttctcttctctctctctccctcctcctctgcctttccttctgtttcatctctctcttcctttgcggtttcccactctttggggaggggcaggatttcctgctcagaagttggttggtttctgggaggagtcagaagacctgatttgggactgaaaccagctggtctgccacctgatacaagaaggtgaaacccaggccaaggaagaagtcccttatgctaggaccgagctggcagccagaaggcgcctgcagagacagctccaaagagaagccagagtgggccagttctgggcatcaggcatcaatcagtactccccaaaggacagaggagccctcgaggcagcccaagacaggaatgcttggaagtggtcctggttgccctggagacttatccattactattgttagctcttaacatgggagaggcataccagacagagcccctgtcccacccttagcaggtgcttactctcagattcctgactttgtctcaaaggaagttactgaaacaaaaactggatttgggcaggttttcccttttcaccaggagagactctagtgatccagtgcattctgtgaggcctgtgtgtccacacatttctcaattataaactccttagggaatctcatatgtgacttataaaccattttagtgactgcatcagctgatgttggagtggatgtaaagggaagacaggaatctgcaatgggatgtataagggaaagagaatccgtaagtagggacaataattctaccatgattcttgccgattaatgacagagagagtcacatcccaattcagaggtttgtgatctctggactaaggaagggactacagcatgtcaaaacaaaaatgtactttcttcctctatttcttcatttgttcaacagatatctaataagcatctactctatgctaggcactgggctagaggctggggatagagtggtaagccatgctagatgtagctatgccctgatggagagtatagcgactggcccctctgagatttggggacacaaactccgaggaaggactgtaattgttgggtactaatgtctcctttggagaaacaccattagacagattttggatagtcatctttctgttacttagccaatgtggaacattggttctttgaatgacacttttgcttgcaatatctacaagtacccctctctatatgttcccaattcttagaaaatagaagactttttggctttgtttttatttcggggcaagtttttttatgtagagaaccatacgttctattgatttctagcttatttactttctagagctctctgaaaatatctagctatgtattggatattttctaagctgtcagtttcatatttcaattacttttttctcattaaatctctgaattcatatttgagccctttaatagaaaaaaataaagacaatgtttcttttatttcagctgttgagtgtactccagaatgctctttgaaagttttctgaagtctcttttcattttcatttagtttacaatttttaatctttgtctaacatacttttaaaagaaagatttttttgaaattgctttttgtactggattttcaaggtttttcttgtccacttaaggcgtttgtttttcattttgcacaactgagttatttaatttttttcttaccctgctgcttataattttttttctctattggatggactaacaattaactgaatcatttggtacagatgtttaatccagaacaataagtacctaataaaatcctgaattgttaactaatttctgctcaaccacccctgaggcttaggaaaatctttcatgataacttttaattttgctccaggccagggtttaaattcagctttttagggctcccctctggtttagcagttttacaatgtgattactctttttcagagaaaacttagaagaaacggttgtctcatgttgaaggtcaggtaaagctgagtagaaagagaaatgaaaggagggtaggttttaggtggtatcagagtctttgagagagaccattctcaagttaaaattttattttg

SEQ ID NO: 969 - DNA, 4001 bp, Homo sapiens
tgctctgcgaaggtcatgtcttccatggtgccagcaatgtagtgtgctgaggctgctccaagctccaggcagtgggataccacctgcagtgatacagcagaaatggcatcagtcttagctgcagatttttggggggtagtctctgaagtaacggggggcttaaatgagagattgctcacagccctgtttaggtaagaaatggtaagtatgtttgtgtgtgtgttgcctaatataaccctcatgatcatcgtcctctgtctgaaatattttctggaacttggtggggttcaaatggataaatcatcccagtgctggggtttaagttcatgatttatgctcatggcttctgtgaataggcatttctgagggcattatgagtgtagatgctggttactatgtgggtagctctaggtttgtgaatgtttgtacatccttgggtttgtgagtccatgagagggcatgtgtctgggagtctgcatgggtatgaggatatgtattcataagcaggtactgggatttcagtttttgaaaacatccgtatgtatctgtagttccatgtgtaaatgtgtgtgactaggcatgtctgtgagcatatataactcaaggactctgttgcagaatatattacacacacacacatgaatgaatgcttaaatgcatacttttatattcctgtgggttttttggtgtttgaatctatatatgagagtgcaaaattaagtgtctgtgtgtgtgcatgtgcctctgtatatagatctgcgatatgctagcttctgtgtatatgtgagcatatataagaacacatctgagcatgtgacggtacacatatctgcgagcatagaaccctcaccttctgtagagtttcttttgacctcgctgtcaccaccacatgggctcccatcttcgccagatgataagccatctctcttccgatccctttgctggcccctgtgacaatcactttctttccttggagcatctctggggaaccccaaaaggaagtgaggaccatacccaagttggcagcaaaattccttctccctctctggatataggcatgcttatcgcaatttgtaacttaaaggttatgagcccagatcagtttgtcacaaactccgtaaatcactgtgggaacaggccaggtctttcataaacatgctctgaagtgggaggtttgggctgacagcctccctactgtcatttctaaaaacctccatggaaagagatcataggatgaagccagaaaagtcatggttcagctaaaatgctggagttccagacatttctggactctttcaattttgctcaattgaaagtacatttaacaaggaatcaaaacacatgtgttcatagaaattccagggattttccctcacttctatgtagtcatcatctccagttttttttttttttttttttgcctcccacttatcagtctcttcatagagcccaattagctgctgagttgtgaatttgggtattactctcatttttgtagaagatttgaaactgctttccattaagggtgccaaataaagcatggcctatttggctagattttggctacacgattacccttcctacacagtcccccctgtccacagcctgtagctggaggacacaaaaataccatcttaactcagggttccctcattttcaccaactttgaggatcaagaacacatcttggtcctcaggaacactcaagcacccctgtgttttttaaacctattcctccaaaatgagacgcatgggtacttacctggtctgaattcctcgtttgcagaatagtagtagtaggccatgaagagccccagaatggggaggagatattttttcataaaagccatccgacagggagctggcctgaagactcctgtaggacacacagagagaacctacagagctttctacaacctcctaagcaggcagcagcctctgaattgtgacatcagggacgggggaggctggagtagtctcaggcagtgctagccaatttccctgtcagagcagcgattggctttgggtgggatcccattcgtccctggcagcctgtgtggtggatttcataatggacaatgtttactccatttcattgagcaagaggagacttccagatggccaagctcatgactgtacaggactggattcctgagcatccctacccgagtccatcttactcttaacaccatttacgccagggatcaatgatctttcaaaagtaatttgtcaaagacagagagagaggagtgcatgtagggcttctggggggaaatgtgagtaatagcaaagagagccaaactcaagccaaatctcactctcagtccccctacccccccacccagtgggaagcaattaaaaataacagcacaaaacagcaaaataagcttaagaaaaaaaatgtgcacattttgggaaaaaataatgaaagcaaagaagctctataagccccacactcaagttcaatgaaaaagtattacaacatcaaaggagaaattgcaagccagccagaacccagatggcgggaaatccaagactggttcaagactctaaggcaagtgcaatggatcatacacttattattttaacagagaacaaagaagaaataatgagtgacaaaaaaggcactaaactattaaactgggtcttgtaaatgctgtagagcaacaagaaacatggagaagatgctaggaagaggcgacctgatgtagaagaaaaaagaactagcattaggcaagtgaaactagctggggacgcccacaccagctaaaaatagatctagtaacagtaaaaggacgagggtggtaagaaacccttagcaatttagaatttattatcagggaaatataaaaataaccacctcagtatgtccgtagcacgaattcattaaggaataatcctcaaagaaagaatttaagatgtatcattgttaagtttttcaactcaaaaccaaccaatcaactcatggaaattaccccatcacaatgcagtcctgcattctgtaagttatcagtagagcggggaaaaaatttaaatgtgataataagtatcagtgctttggaggagggataggagttgggagtagtggggggacagaatttacacaaggttaagggaaattaagttatgattccaagtgcagtatctggaaacattcatcaaattttcactttagagtaagagaaaataatttaagacccagaggagatgaaacaatttgtcaacaaaggcccacagctgtgagggtcacttgtagaaaacaatggagatttgagaacagttgagggctagacagagctcgaggtctatgaaggacaaaaagagaaaaaagataaaattcaagtaaaaattagattacatgcctttagaactgcaagctacatttgtataattttataaatatatttatgataccaggatatattacagactacactccattttcatccctagagggaaggcagtgccagccagaacccagataaggtttattttcttaatcctatactattaatagtaaaattataggaaacaatgaaaagttatttggaaatatgatgatgttgaaatgatagaaagatgggcagactagggatgtttattgtctgacataaaaaataaataaagaattttaaagtccattaagaaaacataaatttaaagaaagcaaaaataacaatgagtaagataaactgcagagtaatagaacacaaagcaaatgcattaacaattgctgattgttggctccattaaaaaatgaagtccaacattgtgtggcctcaaaagacacatttaaacccaaagacacaaacagattaataattagatgacctaatagctacgatgctagaaaataaggatatggcaaaagcatccaataaagtgagtttcatgggattagataaaataattgctatataaaatgcattgatgagaaacaaggacactgtgtaatggtagttgatgcattaaatcttaccagttctcaaatttttggtctca

SEQ ID NO: 970 - DNA, 4001 bp, Homo sapiens
tcatcatcttccgccagcagccgcttgcagagggccaggccaatgccactgggaggacaattcagacacaagatgtgggttatctgggatggcatcaggtacaggcatttctctctggttcagaaaactgtgtcaagttgacctccaatgagaagcccagatagaaagaaaagactcaacaattatttaagaagggaggaatcctacactccaatagtcacttgcttgagacacagcctagtttgtgtttttctcattttgaaaaacttcaatgacaaaataactggactgaaaacaagaattgttctttagtttttctactactgggctttatcctgccagtggttttcattttgtacctattatgtcactcatgaaaatgatttaatatatcaccagtaagggctcaaaagagcatcttattagctgtttcctatgtgcattttgactttgctgtctaggctcctcaggggcaagggctctaccacctactggtatcgtaaacaccataaggagcaccagaaatctctgataaaggaacagatgaatctttcaggatgaggcatcagtaacatggcaggatgtacaaatccctctcaacaactatgattaaataatagaaaaagaaagaactcaacatgattaagtagaaggtaggaatacactaaatattagatgagtacaccacttggaaacaaagaacttcaaaaccagcattgtaaaaccgcataggagtggtgacagcagtcagaccagcctggctgatagcaatgaaaagctgggtaataagttctctttcaagacttaagctgattccaggcaaatatgttaatagttaaaacccaaaaagagcctggaaccatcagtaatctattagcaccaacaacaaagcatcaaaaatatttatttgtcctcacatgagaacagtaggcatttaatatacaattgcacatgtcacaatatatgtaaaagaaacagacaaaatcaattctgacttactcagtaccttccacataagaagcaccaatcaacggttaaagtcacttgagagggtatgctaaaaagttgccaaatgcagacacctaccaagctggcttagttaatacgcatgtggttaaataattgaaagtggatcaatcttaaatgtttaacatgtcctctgtcttaatcatttaaaaatgccaaatgcaactagtagaaaaatggtttgattggcttcatcctccacacatttttcacagaagtgcaaatgacaggtaaaacaagcaacagaagaggctgagagactaaacgagcaaccctggaattattatgagctggttattctgcaccccaaccatgccttcataggaaaagattaattttctctgggtttctgaagagtatgttagctctctagcactgagctaaatgaaacgggattgttttctctccaccgtcctaatgttcatgggtgttcaaatttgtaggcaaaaggcttgtacagacaaaacacctggagtataagacatgatcacgtggtcaggagcaaaatattgggcactgacgataaatacgaacagtaggcaaagatggaaaaggggcggagcccgcctgagtaccccattgccttgataacctcaggatcatcactgcgacactcatcacttactgatgctctagttttccttttcactgtcatgtttaatacaaagcaccagttactgagcacctcaagaggccgacatgccccacacctgctgcagactccggggaacctaggcaaagccaggggcgggcgcttccggggtccgttcgtggagggtcgcagacccctgctctctcggacccctgatccgctgccgcctctgccaacccaaaggaggcctcacctgctagccccggtgatcaaaaccacctttcgcatcttcgcgcactcacacttccaagcagtgaagcaaacaccgccgctgctttcggaagtcctacgatttcgggccgcctcacccgtcaccaatcagagtacggccacgccccgcctcccgttgcgtcatcgagtctgagctgatccctccaatctcagtccgccaaccgttccctgccctcggagacggcgtcgggtgagataggccgaggggcggagctgcgtgacgcaaagcccggagccattccaggctcttctcgctccgcctaggcgcaggtgtctgtcactgcttcctagggctcagcgggcgcctgatctttaatcctggtgggggcgtcacccggcctagcactcaggacaggatctgtgacacgcactgggtctgtgccctggcgcctgagattggcacttctttgcaggaaggcctcacggtatttgcaccagtgcccattttagagaaaaggtttgggtctaggagccaaagttgggcgattatcatctaattttccactcctttttggatgtacagatccaggcattgtgccacttcacagcccaacttttgatcccagacctcctcctctaaagaagcttatttgagaaaatgagcactgattttattaagaactttatgtagaatcagacgtaaattaccagtattcaaaacttggaatgtggcgtggaatcagaatctcagaacttcattctccgaagtactgagaatgtgctgtaaccttctgtatcagtgcatctcaaactgtgctaaaggacctgtttttgtctccaagccatcccagatgggtgcttttagaaaatacaaaaaaataaagtgctagaaaaagaaaagcaaaaggcatacaaaacacaagccccgatattttattattagatccaagacatataaaagtactctgccaaaatgaggcagaatagggtttggaggcagggtacttaaggccacttcgtgctgacttcctaaagctcaatcaaggaaaaacagcaagggctggaagtagggaatctgagaccaattggtgctggcttcccaaagctggatcaaaaggaaaacacctgggtctgggggccgagagcctagggtcaattaacaccaacttcctaaagctaaaccagaaggaaaaaccccatctccccactccccagtagcaaaggatcaaaggctactctccctacaaccttctgttctcagaccaaactgagggttgggctgctatttttcaaggcccaataacgagatgcagatgagctggggaggaagagagtttttatttctgtaaccggttgcagggagaaggcctggaaattatcaccagaccaactcaaaattacagtttttcagagcttatatgccttctaagcgaactgtctatgtgtaagtgtgcatttatctaaagacataagtgattaacttcttttaatctgtaactaaggtctgagtcctgaaaaccttcctctggagcctcagtaaatttacttaacctaaatgggtccaggtgctggggtgattgcccttgtattctctcctgctaagtggtggaggtttgaggagttctcttagaccccccaataaacttgtttgtggaggcctggggagtttcttcagaccacaataaaacttgtttaatcctaaaggggtccggttaagaattctttctttattttgtatgctttaagaggcccaggaaaggcctaggcaaaattcttgatgggcttttgttacatcccagcctttgtataagggcactggcttttaatatttaaccacttagtactgaaacagttgttagtgagacctggcctgccacacttccaccatgtctcagatggaaagggaaagtgccttggattggctgtgggccaagcactaagcatgggccatgccatcatctgcatagggcacaaattcacctcagcctttacttagccataaaccaaatccttcatccagataaggggtagcccatagggacctcaaaagaactacttaaaacccagaaaactttgtaactgggcccttgagccacttgctcaggcccactcccaccctgtggagtgctttctcagtttaataaatccctgc

SEQ ID NO: 971 - DNA, 4001 bp, Homo sapiens
caaaaagttaactaacctctctgtttctatctcctcatctttaaaaaaggaggataatattaccgatctcatagggttgttatgaggagcaaatgagttggcaaacctttggccaagtgcctggcacaaaaagaacactgaatgctttctctgtttttatcttcatacagatccctgcctgtctattatatgatctgcatttttaccataggggaacaatacctctaggctgagcattgcttttttctggcttcagatgttaaattgcaaatattgctgagacacaggcaaggattataagcatttcatatttgtttatcaaagacaacattaaaacagagggtggaagaaatcgaacatttcaagaggtcagagaagagcaaaagtagagtgttgggtgtggtccctgagtgctgtcaagtgggggattctctgtgggcagggcaggaccctctgggcagccagagcccacatgtagacacacagtcccccaaatcccctgggttggggaggaggacagggaattgttttggggcacaccaaggagcaaagggagagactgaagatccactttgccaagcatcagctctggggccaggtgaaatagcctatggataaagctctggtctgagctctgctacgcatcaatcagatggccttagcatgttgctttgtgattccggaccttgatgcgttcattgtcctgttggatgtgatgccttttctacctgcctcttggggccatttgtacaaggagttgccacagaaaattctgcagtcaatttctttttgatgatgagcaacagaggtaaatgttttgtttttttttttttaaaaaaaagccatatatgcaaaatctaaatgaggcatgtctggccttatactgcctcttactctgtctctgctctgtgctgtgcactgtgcacacacattctctcactgatgctctctctctcactatatatttttcattatttctctgtctttctcattgtctctctctctgagtctctctccccgactctctctccccgactctctctcccccttattgttttcctctctctctgtcacacacacccacttatacactcatctttaccttaacttccttttattttgccctcacaaaggatactaaggaagctgcaaaacaaaacacagcctggcacgttctagagagacaatgacccattggtgaggtctccagggtaatagtgtcctttatgaatgttgtacagcaattgccaagacaaaagcttcagaacataaaagagttgcagacaagacaaagaactgatgtgggattttctagatgagaagaaaagaggcctggaggctgaggtggctgcttctcaagttctgggtcagggccagaatctagtctctggaaatcccacccagtatctttcatactatgccattttatactatttaatatttatttcttgatgactttggatgtgagattggcttagatttggctacaaatttcaataacttgctagacaaggtccatctccccccacatacatgcagtgtttaagatggaaccacacacccatgacccaagtttacttactagaaaattcctctctcaattctggtccgaaggccttgtccaagaccctgatctccttcagctccttctccttcaccaagaggcggatgatcctctgtcccagaaaccctcctgctcctgtcacaaggcagctccagcccgtcatggccatccaaagtagcaggaatcactcaccaggaaacagaagatgctggggagcagatctgattctagggtgaccctggagagggctaaaaagagatgtcaaatggttatatactcacacagatgcctcattttcctccaccccattttttttgcaaacattctgtgtccccaccactgcaggagtagctgaaagaaaatgaaaaatctctaaccattagttagattgttaaaagctggacagaagagtggacgtacttctcacctcatttcctgtggcaagtctgaagctttatgcactgtggcttctggcccaacccttatcactttgatctctggccatgtactcattgctctctcctcctatgggatccttatctcagaaaaatagtgacctttgggttacatctctaattcttcccaggaacaggaagagaagtcccatcctaatgctgcagtgtggcaaagagtcttgggtttagccttaacaggacactagtcagttgataccagctgtctgggatccacaatctgtgaacttaaactagaccaggagaaatctgcaagtgcaatttgaattgtgcccttgttcagtaaatccatctggagggaaatccatgtaagcccattatctcctctctcagactatcatttgaaatgttgctgctgtcttacaaaatttagaaatttgcaatggtgacagctccaatcacttagttttatgtgaggtgactttctttcctacccaatatatctgaaacctcaatggtcatttgcccctggagagccctgggttcctagatgaacaacatcattgaaggaaagctatctggtgataaccacttaatgatatggcctgtatcacaagagtggggatttgtggttgtatgccccaatgactcttatcataggtgttcgaacttatccatatttttggctgcaaaacgattctcagcaaattcttgaactggacatactgtgaatgcttctgaagcctatgccccagaactgcccaaatatcaccgccataagcttcccaagacactttactcaaaaaaattgaaatataatttacatgcattaaaatgcccaggtcttcagtgttcagttcagtggaacttgacagttatatatgcccatgtaagtagcaccccaaaaaagatatagaccatttccgtcactccagaaagttgttttctgcctgttccctgttaattccctgaccttcccccaatctacctcataggcaactacttcctgatttttattcccacagttctcattttatttctatatttctctaattttttcttctaagatctctgtggttctggatatatatttaaatataaaattattttgaaatgaagttttgtgcagggagtacagaaaaattgaccgttgattgtctctgttgtttatttttctatttcatgattttcattatttttattattggcttacatttattaattttgtttttttttttcactcgtttttcacattttttttttttttttttgagatggagtcttgctctgtcacccaggctgaagtgcaggggcaccatctcagctcactgcaacctctgcctcccgggttcaagcaattctcccacctcagcctccgaagtagctgggattacaggtgcccgccactgcaccgggctaatttttgtattttcagtagaggtggggtttcatcatgttgaccagctggtatcaaactcctgactttgtgatctgcacgcctcagcctcccaaagtgctgggattacaggcgtgagccactgcacccagccccgtttttcaggatcctgataataaaagcatagaaaattgtttttctttactcctttcctatttccactataggcattaaaagttgtaaatttctctttaagcactgtgtgagctgtacccaacattttgatgtattgggttatcatcattcagttaataatatttaaagttttgtcttgtggtttcttctctgacccaagtgttattcagaagtgtgttgcttgttttctaaaagtgaggattttctagatatctcattgttatggatttctaattaaatactactgtggccagagcatatgcactgtatgattttgattcttgaatatttagtgagatttgttttatggtccagcatatggtctacattggtgaacatgccataagcacttgaaaagaatgctttctgcagttgttgaaagtaatactctacaaatgatttagtttgacaccccactctgggtcttgccctc

SEQ ID NO: 972 - DNA, 4001 bp, Homo sapiens
ccctgcattttcaccatagcagaactcttcctctagactgagcattgctttttcctggtatcagatgttagattgtaaatattgctgagacataaggattacaaacatttaatatcagtcatgtgttaatatctgttcactattagaacagagagtggaggaaattggacatttaaagaggtcagagaagagtgaaagaagaggagagtgtcaaggggagcttctgtgtgaacagggcaggaccttctaggcagccagaacctgcatgaagaagatacatagttcccccagtcccctgggttgggaggaaaacatggaattggtttggggcacacagagaggcaaagggagagactgaagacccaccaaggattagcccgggggtcaagtgatgaagcttctggaatgaagctctggtctgagctctgctacacattaatcagctgttcttggcaagtaactttatgtttctggaacttgatgggttcattgtccagttggaggtgaccccttttctaccttcctcacagggttatttgcacaaagagttactacagcaaattctgcagtcaatttatttggagtattgaacaacagatacaaatggtttttttttaaaaaggctatatatgagaaatataaatgaggcatgttggcctcatactgccttttactctgtctctgctctgtgccgtgcacttgtgcatgctctctttctctctttctctctctctcactgatgatctctctcactttcactctctctctcttgctgatgctctccctcacactatctttctcattcattctctgtctttctcattctctgtctctgaccttctttccccctcattttctttctctgtctgacacacacacacaattacacacacatccgtaccttcacttccttttattttgccctcactaaagatactaaggaagctataaaatgaaatgaagcctggggcagtctagacaggcaggacccactggtgaggtctccaggtaaatgatgtcctttgtgaatgtcgcacagcaatcgccaagacaaaaagcttcagaacataagagttgtagacaagaaggagaactcatgtgtgactctctagaagagaagaaaaggggccttgaggctgacatggctgcctctcaagttctgcgtcagggccagaatccagtctctggacaccccatccagtatctttcacactataccattttattctatttcctttctgatgactttagatgtgtgactggctttcatttggctacaactttccttaacttgctagacaaggtcaacctccccacacccatgcagagtttaagatggagccacagacccatgactcaagtttacttactagaaaattcctctctcaattctggtctgaaggccttgtccaaggccctgatctccttcagttccttctcttccaccaacaggcggacgatcctctgacccagaagccctcctgctcctgtcacaaggcagctccagcccatcgtggccaatccaaagtagcaggaaacacttgccaggaaacagaagatgctggagagcagatctgattctagcgtgacccagaagagggctaaaaacaagaggtaaaatggttatacactcagcagatgccttattttcctccaccccattttttacaaaaattccatgaccccacaactgccaggagtagttgaaagaaaaggagaaagctctaaccgtaacttagattgttaaaagctggacagaggagtccaagtccttactgcctcatccctggaggaaggactggagctttatgctctgtggcttgtgtctcagcccttattaccttgaactcctgccacatactcattgctccctcctcctccagaatcccttttctcagaataatagtgacctttaggttatatctctaattcttcccaggaacaggaagagaaatccaatcttaaggccacagtgtgataaagagtcttggctttagccttaacagaacactggtcagttgataccagctgtctgggatctgcaatctgtgaacttaaaccaaactgggagaagtctccaagtgcaatgtaaatgttgtccttgtacagtaaatccacctggagggagatctattttagcccattatcaactctctgagagtgtcatttgaaacgtcactgctgtcttgcaaagtttagaaattttcaatggtgacagctccaatcactaagttttatgtgaggtgactttcttttccacccaatatatccaaaacctcaattgcaatttttccctggagagctctgggttcctaatggaagaacctcattgaaggaaaggtatctagtgataacgaattaatcatatggcctgtaatacaagtgtggggatttgtagttgtatgcccaatgactctaatcatagatatttgcactcatcttacatttttggctgcaaaaccattcttagcaaattgttgaactgaagatgctatgaatgcttctgaaacctatgccccagtctgcccaaacatcactgccataaactccccaagacacttttctctacttaaaaaaatagagatgtagtttttttaagtagatgtaatctgggcattacaaggcccagatcttaagcgttcagtgtacacttaagtgttcattgtcaatgaaccttgacagttatatatgtccatgtaagtaccaacgaaaagaagaccaccatttccttcactccagaaagttttatctgcctgttcttagtcaattgcctgccctcccccgagtttacctggtaggcaattactttctgatttttattcccacagagttcccactttattcctatattttcctaattttttcttctaagatctttgtgattctggatatatatttaaatataaaatcattctgaactgaagttttgttcatggagtacagaaaaattgaccactgattgtctctattgtttgttcatttttctatttcatgattttcattatttttattattggcttaaatgtttattaactttgggtttattttactcttctttttcagggttcttatgataaaagcatagataattgactttacttctttgctcatttccaccataggcatttaaagttgtaaatttctctctaaacactatgttagctgtatccaacattttgatgcattgggttatcattattcagttactgacgttttgaattttttcttgtgatgtcttctttgacccaagtgttattgagaagcatgttgcatgttttctaaaactggggattttcttattgttatgtatttctaattaaatattattgtggccagagcatatactctgtatgattttgattctttgatatatattgagatttgttttatggtccagcctatggtctatgttggtggaaatgccataagcacttcaaaagaatgctttctgaagttgttggaagtcatactctacaaatgatttagcttgactccccattctgggtcttgcctttctcctgtgtgtagacattcaccttctacttggaacctggctgccaatgcttcaaacccacttgcctaggaaaggttggtcctgtgatgcaaggtgtagcagcttgtcttctgaagctctcagaactagacacgggccctgggacttgtggagcactatctgaaaccacccaggtgcatcacacacctttgcctgccatatcagatgctggagtgcaccttacagacccccatgaccttcagggtgggaccaaatgttccttcagctgttgagagttctggaggctcttagagttcaggcagtgtctcttggagtctgagtggaagcaataactgtaagctttctttaaaccaataaatattttgctttctttaggaaagtgagcagtaggacaaagagcaaggctgctgggggccacactaccaactttctgtttttaaacagctttactgaagtataattgacatattataacattcccatttta

SEQ ID NO: 973 - DNA, 4001 bp, Homo sapiens
taacctctctgtgtctgtctcctcatctataaaaaaggaggataatagtattacccatctcatagggttgttatgggaagtaaatgagtcagcacatgcaaaacctttagcacagtgcctggcacagaaagaacactgaaaggattctctgtttttatcttcatacaggccctgcccatccattatgctccctgcattttcaccatagcagaactcttcctctagactgagcattgctttttcctggtatcagatgttagattgtaaatattgctgagacataaggattacaaacatttaatatcagtcatgtgttaatatctgttcactattagaacagagagtggaggaaattggacatttaaagaggtcagagaagagtgaaagaagaggagagtgtcaaggggagcttctgtgtgaacagggcaggaccttctaggcagccagaacctgcatgaagaagatacatagttcccccagtcccctgggttgggaggaaaacatggaattggtttggggcacacagagaggcaaagggagagactgaagacccaccaaggattagcccgggggtcaagtgatgaagcttctggaatgaagctctggtctgagctctgctacacattaatcagctgttcttggcaagtaactttatgtttctggaacttgatgggttcattgtccagttggaggtgaccccttttctaccttcctcacagggttatttgcacaaagagttactacagcaaattctgcagtcaatttatttggagtattgaacaacagatacaaatggtttttttttaaaaaggctatatatgagaaatataaatgaggcatgttggcctcatactgccttttactctgtctctgctctgtgccgtgcacttgtgcatgctctctttctctctttctctctctctcactgatgatctctctcactttcactctctctctcttgctgatgctctccctcacactatctttctcattcattctctgtctttctcattctctgtctctgaccttctttccccctcattttctttctctgtctgacacacacacacaattacacacacatccgtaccttcacttccttttattttgccctcactaaagatactaaggaagctataaaatgaaatgaagcctggggcagtctagacaggcaggacccactggtgaggtctccaggtaaatgatgtcctttgtgaatgtcgcacagcaatcgccaagacaaaaagcttcagaacataagagttgtagacaagaaggagaactcatgtgtgactctctagaagagaagaaaaggggccttgaggctgacatggctgcctctcaagttctgcgtcagggccagaatccagtctctggacaccccatccagtatctttcacactataccattttattctatttcctttctgatgactttagatgtgtgactggctttcatttggctacaactttccttaacttgctagacaaggtcaacctccccacacccatgcagagtttaagatggagccacagacccatgactcaagtttacttactagaaaattcctctctcaattctggtctgaaggccttgtccaaggccctgatctccttcagttccttctcttccaccaacaggcggacgatcctctgacccagaagccctcctgctcctgtcacaaggcagctccagcccatcgtggccaatccaaagtagcaggaaacacttgccaggaaacagaagatgctggagagcagatctgattctagcgtgacccagaagagggctaaaaacaagaggtaaaatggttatacactcagcagatgccttattttcctccaccccattttttacaaaaattccatgaccccacaactgccaggagtagttgaaagaaaaggagaaagctctaaccgtaacttagattgttaaaagctggacagaggagtccaagtccttactgcctcatccctggaggaaggactggagctttatgctctgtggcttgtgtctcagcccttattaccttgaactcctgccacatactcattgctccctcctcctccagaatcccttttctcagaataatagtgacctttaggttatatctctaattcttcccaggaacaggaagagaaatccaatcttaaggccacagtgtgataaagagtcttggctttagccttaacagaacactggtcagttgataccagctgtctgggatctgcaatctgtgaacttaaaccaaactgggagaagtctccaagtgcaatgtaaatgttgtccttgtacagtaaatccacctggagggagatctattttagcccattatcaactctctgagagtgtcatttgaaacgtcactgctgtcttgcaaagtttagaaattttcaatggtgacagctccaatcactaagttttatgtgaggtgactttcttttccacccaatatatccaaaacctcaattgcaatttttccctggagagctctgggttcctaatggaagaacctcattgaaggaaaggtatctagtgataacgaattaatcatatggcctgtaatacaagtgtggggatttgtagttgtatgcccaatgactctaatcatagatatttgcactcatcttacatttttggctgcaaaaccattcttagcaaattgttgaactgaagatgctatgaatgcttctgaaacctatgccccagtctgcccaaacatcactgccataaactccccaagacacttttctctacttaaaaaaatagagatgtagtttttttaagtagatgtaatctgggcattacaaggcccagatcttaagcgttcagtgtacacttaagtgttcattgtcaatgaaccttgacagttatatatgtccatgtaagtaccaacgaaaagaagaccaccatttccttcactccagaaagttttatctgcctgttcttagtcaattgcctgccctcccccgagtttacctggtaggcaattactttctgatttttattcccacagagttcccactttattcctatattttcctaattttttcttctaagatctttgtgattctggatatatatttaaatataaaatcattctgaactgaagttttgttcatggagtacagaaaaattgaccactgattgtctctattgtttgttcatttttctatttcatgattttcattatttttattattggcttaaatgtttattaactttgggtttattttactcttctttttcagggttcttatgataaaagcatagataattgactttacttctttgctcatttccaccataggcatttaaagttgtaaatttctctctaaacactatgttagctgtatccaacattttgatgcattgggttatcattattcagttactgacgttttgaattttttcttgtgatgtcttctttgacccaagtgttattgagaagcatgttgcatgttttctaaaactggggattttcttattgttatgtatttctaattaaatattattgtggccagagcatatactctgtatgattttgattctttgatatatattgagatttgttttatggtccagcctatggtctatgttggtggaaatgccataagcacttcaaaagaatgctttctgaagttgttggaagtcatactctacaaatgatttagcttgactccccattctgggtcttgcctttctcctgtgtgtagacattcaccttctacttggaacctggctgccaatgcttcaaacccacttgcctaggaaaggttggtcctgtgatgcaaggtgtagcagcttgtcttctgaagctctcagaactagacacgggccctgggacttgtggagcactatctgaaaccacccaggtgcatcacacacctttgcctgccatatcagatgctggagtgcaccttacagacccccatgaccttcagggtgggaccaaatgttccttcagctgttgagagttctggaggctcttagagttcag

SEQ ID NO: 974 - DNA, 4001 bp, Homo sapiens
cttgagtgccacaactgctgcccccagggacaccaggccccccatagagcctggagaagatggggcgacagatttgctccagctccctcttctgatgctcatactcctccttctctgccagctggttgtgctccagccaggcaaggacttcccgacacttgtcttgcattttgcgcctgtcctcttcgggaatcttgtccctaaggctttcctcttgcaaagaacctttcacatggaagacatgggcctccagcgagtttttggcagccactctgtccctctgggcctcatcctcagccttgtactgctcggcttcatgaaccatcctctccacctcctccttgctcagccggcccttgtcattggtgatggtgatcttgttagccttacctgtgctcctgtcagtggctgtcacgctcaggatgccattagcatcaatgtcaaaagtcacctctatctgggggactccacgtggggcaggagggatgccactgagttcaaaacgccccagcaggttgttgtccttggtcatggccctctcaccctcatacacctggatgaagaccccaggctggttgtccgagtaggtggtgaaagtctgggtctgcttggtggggatagtggcgttcctctggatcagcgtggtcatcaccccacctgctgtctccagccccagagacaggggagccacatccagcagcaggagatcctgcactttctcacatttgtcccccatcaacacggccgcctgcacagcagccccataggccacagcctcatcagggttgatgctcttgttcagctccttgccgttgaagaagtcctgcagcaacttctgcaccttggggatgcgtgtggagccccccaccaggacgacgtcatgaatctgggccttgtccagcttggcatcccgcagggccttctccaccggctccagggtgctgcggaagaggtctgagcacagttcctcaaagcgggcacgagtgatggacgtgtagaagtccacgccctcgaacagggagtctatctccagggtggcctgggtgctggaggacagggtgcgcttggcgcgctcacaggctgtgcgcagcctgcgcagggcacgcttgttcccgctcaggtccttcccatgcttccgccggaattcttccatgaagtggttcacgagccggttgtcgaagtcctctcctcccaggtgggtatctccagcagtggctttcacctcaaagacaccagcgtcaatggagagaaccgacacatcgaaggtgcccccacccaggtcaaaaatgagcacgttgcgctctcccgcgccccgccggtccagcccataggcgatggcagctgccgtgggctcattgatgatccgcaacacgttgagccccgcgatggcccccgcgtccttggtggcctggcgctgcgagtcattgaaataggcgggcacggtgatcactgcgtgcttcacgggctggcccaggtacgcctcggccgtctccttcatcttgctcagcaccatggacgagatctcctcggggtagaacgtcttgtcctccccgcggtagcatacgcgcaccttgggcttgccgccctcgctcaccacccggaagggccagtgcttcatgtccgactgcaccgtggtgtccgcgaacttgcgcccgatcagccgcttggcatcgaacacggtgttgtgggggttcagggccgcctggctcttggccgcgtccccgaccagccgctcggtgtcggtgaaggccacgtagctgggcgtggtgcggttgccctggtcgttggccaggatctccacgcggccctgctgaaacacgcccacgcacgagtaggtggtgcccaggtcgatgcccaccgcgagctcccgtggggcctgcatggctgaagcttcttgtcggatgctggaggccacggaggctgctgccgctccgccgtcgaggggcgctcagcagtgaggctctccctgcggtttctctgcagccagcccggctcggatctgctcagctccgcttccaccggctttttatccttttgcgcctcacccgacccccgccgccgcgaactttcgcgaacctttccgcaccttcccgcaccttcccgcccagttgagagcctctcgcccgcccgggctgactcagccgggtggcgcggcgcggcgctgaccccgggagaaggttcgggcagatcggggcatgagccgcgaggctgggcggctacgccaggccagcccgcctctgactcaggctgctgaaagaaatgcggggaaggttctagctcctccgggctggctctgaggacgcgcggttgtggcagaggctgcaaaagcagcaactttagaggcaaggtctccccggggctgtgggaggtcggatccctgaggcacacaggggcctgcgggctgccttggagggccgctgagagcccagcggctcaggaaggccgaagatatgttaccatgcgaatacagatatataagatatatacacgtatatcttaaaacagttttatcttgaacaaaatattttccaaaccgcgatttaagacggtgcctggttccttagtgaatggccagagatagtgagctttaagagacaatactgcaggtctttagctgacagtagcattggtggttcagtggtagaattctcgcctgccacgcgggaggcccgggttcgattcccggccaatgcactttcatttttttccgatccatttcaattctttttctcatctaggattaatcactcttgaataaattaaaccaggtggctgaagactttacattcctccagttttgttctctctcctttaccagtcactttccacaaaggagatgtgacattgcactgtggccctgggactcgggagagacctcgccactcagcccaagagagaacgcaacacctgggaaaggaggacgcagagtacggtcgggatgtccctcatgttctccccactgtttgtatccccgaggagcctcgtctccagaggcccggtggagaggcacagtgtgcgtttttctttatggcctaagtgggttcccagctggagaccaggactcaggtggagagtaaactactgcaggctccagtccaacctacctcctaaaggctggaggacgagatgggttcactgggcagtaaagtcacactggtttttatcaggttgtgactttgtgaattgaggccatttcccactttcttcaatccagaacattccattcagatctgctggcgttcggatttccgctgaaagccaaaacaaggagacatttctgagacttctgaaggttgacaaaatcctcacacaatttcccgtgacctccccgtcggggaatcgaccccctctctcacgcatgacaggcagagatactcaccactatagtaacaaggatggcaactgcaatagctggcagctggagagtatgtggtacagtctggtgttacaatttagcagtgtgttagagaaacttaaaagttggcttctatttaacgttacttgcctgattcagaggaaacttccatttgtaaaaagagaaactaaaaacccttactccatagatggctattttctcctttgacaggttagaacccactaggaagttcaagggactttttaagagggaggcaggagtccagaagtagaggtcagtactgttcccgggctgggttccttggttaatcgtctctccgagagcaccagtgacagctggtagagtttgctgcttgagaggatcagccgtactggtaaggtgatcagttcaggaaaaaagggaatgtttaaagaaatgtgcaatatatgacttacacagtggaaaatcaaactgtccttgaaaagaagtaacctatttcataattccaaaagggaaagaagctgtcaactttaaattcactcactctcagggtctaagctggtcacacctggatgccagagtcaagacatttgccaacggcctgcaagagacgggtcttcacctcagcagggaaaagttggcccag

SEQ ID NO: 975 - DNA, 4001 bp, Homo sapiens
tgtagggagagaactttttttttttgaggcaaggtctgggctctatggcccaggctggagtgcaatgactcgatctcggctaactgcaacgtctgcctcccgggctcaagcgatcctcccacctcagccttcctagtagctgggactacaggcatgcaccaccacggccggctaatttttttgttttgtagagatggggttttgccatgttgcccagtctggtctctaactcgtgagctcaagcgatccgcctgccttggccacctaaagtgctgggattacagaagctagtcactgtgtccggcggataacttgttttttaaaagagagttacactttagggttgatatggagcagatgaataggaaagaatgtactctccaaatgttcagttcttttcttacctcacattcttaagttttctgagagaagcaaacacatgctttaatacaaaactcatttcacaccttctatattcaccattacccttcctatttcctgttttgggtagaattacttaagtagaaacggcagagacttggttttctttaaggttctttgttgcagttaatgagaagaggcaaccaaccttagagaaatccatacaatgccaggcctggtgactcgcctgtaatcctgacactttggaaggccgaggtgggcgaacagcttgagctcacaagttcaagaccagcctgggcaacatggtgaaaccccaaaaccctctctactaaaaattcaaaaattagccggacctggtggcaggcgcctgtaatcccagcactttgggaggcccaggcaggcggatcacttgaggccagcggttcaagaccagcctgaccaacatggtgaaacctcgtctctactaaaaatataaaaattagctgggtgtggtggcaggtgcctgtaatcccagctactccggaggctgaggcaggagaagctcctgaacccaggaagcggaggctcagtgaggcgagaccgcgccactgcactccagcgtgggcgacgagcgattatgtctccaaaaaacaaaacaaagtgcaggtttgggaggtagtctaatcccccacccctttagagcaaggcaatttcctcagggccgcagtttaccaaaggtggtacactctggggtgctatcctttccattttttacaatccctgaccctggtattccctgatgccttatcctgtcttctaaaccagtgccactggtttcgtccccagttcaccctttcatcgctagctcacatgccctttgtggtccttctttccccaaacctcttcaggtcaagtccttagaggaccttctccctgaccagctcccttggttctggtgctacagctggactcctcacgctctttcttcaagcatcatccattgggaacgtggtgtactttagaaaacacggacccggcctaaggcttctgtctccgaggggccagggccacggcttccaaggcaaaccagccctggcaccaccttctcacctccatcccaaaccctcctcctcagttcaaggccctaaagcctcagacttgtggaggcccgccccaaattatgtaaagaatatataaatgcccccgaccttaggtacaatttatagctagatgtgttacgttgcggctgacagcttacattacattttggtagactaattaatttcgatttacaactggttttcccttttggggggtcaagacgctatttctggcctcaaagagtttcgtgggctggtagtggcgcttccagggtctagaggaaaaggcgggcccgcgtcagacctcccgccgcggcccttccacgcctcccgccgcgcgtctcttcaccacccctccactgttgctcccttcccaccaacatccccgtccttctgccttgcccggccaggcccccataccctctggtgccagcctgcctaccccgctacccgctcacctgggactcccgttagctctgggcgccggaccttccgggctcgaaacctcccttgcgccccgccccacgcagagcgtcccgacccgcagctccgcctgctcgccgcggcctccgtggagtccggggtcgcgcgcgctccaactctgaaatcttcgcgccacgcctcccacaagccccgtcccaccctcagccccgccccttcgccgcggccaccgctgagtttccgggcgcgcgctcctaccccgagctctttgcgccacgactcccacaggccccgccctgccctcagccccgccccaccccgccaccgcggcctccaccgagttcccgggcgcgctcgctccaccgagttcccgggcgcgctcgctcctaccccgagcttttcgcgccacgcctcccagaggccccaccccgcctcagccccgccccctcgcggcggcctcggcccctcctacccctagctcttagcgccacgcctcccacaggccccgcccacaatcggccccgccctctccggctcccattacttcgcgggccaagatgcgaaaccactcctgtgcgcctttccccaggccagtcccggggcgcgcgctgcctaccctcccccagctcagctctatccccggggcccgcaggacccaggggacccaccctcccgcgagcacgcacgcgcagggcccacctctgcgagttccaaaccctcggccctcgggtcgcctgccctgggcctggccccgcctccaggtccggccccgccttcgtgccggggcccgcgcacgcgcgcctccccggcccagccttgctcccgcccccgccggtcccgcggtcccacggcgcctggttgcccccagccccctccctcctcccaccttcactgtgtcccacccttcctagctttgtgcccggggtgctgagcccttccccgtcagccgggccgcgggaggagggagccgtcaccgaggagctgccgctcgctgccccgggcaggggcacaggtaggtggcggccgcgggccgggccgctcgcggggccccgggttgcgtgtgggagcgggggcggggtgttagggaggggcggggtgggggaggggacgccccagagggacggcggggcgcgggttgaggggaggatgaggtatactggtgggggcgatgggtttaagggtggcgtaggggtgcgggggcaggctatggggacgtgtgagaattggggttcggggcctgggtgggacagggagcaggattagcctgggtggactcggggagaggcatgcttggggagagagcgggaagaaggaagggggaagggaatgggattttaggggttcaaggaggaaacgagataggataggaatagagagggtggggtcttgggggcagggaagaaaagttgggggtgtggaatgccaagttggggatagtgaggcgtgaaggaagagggtcttgaagattgagaacagaaggcaaggaaagggatggagagattggggtcctaggagagggaagcccctagagtgggaagaagggaagaatagatggtgaaggagaggagtggggggtggaggagtgtggggaaggaaggggaggcaggtgaaggttgggagatcggaggttggaaggttgggtctgtgggacagcaagccacctttcaccaggggctcggaagggctggaagggtctgaaggttgaaaggggcaggagagctggggtgggcgaagggagtggggttaggatttttggtgtgagaagcgctagaattggtaagagtgtcacgttgtgggagagactggcatgttcttggagggaagtagggagcctgaaagggtatgggtgagaaggcaggtaggaaagtgcatattataggaaaaaagtagtgaggaaagttgaaaattgaagaatggggacacacagaacaatgaaggtggattgttggttattggtggtttagaactacccatagtttagtttctgtttaggtttttatgttagaaattttcccaagaatactgcattttcagataaaccaaaagtgtctgcagccttgggatgaaggccatgggttg

SEQ ID NO: 976 - DNA, 4001 bp, Homo sapiens
ccctctgcccacatccctccatccctctcccattcctcggaggctccctcagctgctcaggccctggaagaaaggatctgggaacctcggtgcaaagagaggcagtgagggggccccatggccatgggttgcagggacaaggccttcagttagccctgggggagtttgggtggggaagggacactggccagggtctggggtcccaggatggtaagggggagtaggagacattggaggcaggagcagaatttgggatgcggtgagtagggggtggggggctcaccttctcagcccgcacctcgatgtggttgttggaggtggtgacaatgatgtcttcaggtgagaagtctctcacgtccaccgcaaactcataggcgtctcctagggtcttgatgttgcctgccccaccggggcgggctgtgggatgggctgctgtgagcgaggcatggagcaggccttgcatgcagatccgggggttctggctccttctcttggggcaaggggcggctcccccaggccctacctcccccctagctgtttctccctaagctcctcctcattcctacagcccaccttttctggggtgggggtggggcctcacccagcacagtgtgtgtgtatatgaggctaggtctgtaacaaccccaccccaggcctggagcctgggggctgccccccaccgctcacccatccagccctccagggctccagctgggattggctgtggttacagagcatgggtggccatggaaccatgtccaacccccagggccacaactgttccttagaggcccacctgttttcatggccacatctgtccctgtggccacatctgtcttggtggccacacatggctgcaggctgtgcagcacctgttccaggccgaccggcagccacagcgccttcggtggcgccctggagcagacgtcccctccctgtgcacctcccctcccctcagggcccggatcacttgcctgggaaggccaggggctccgagtggggccgcatgaagctgccaaagtcatcggaaaacatgctcagggccttctccatgggcgggtcctgggccgggagagcacgggaggccgaggaggaggtggaagaggaggaggaagaggaagaggaatggaaacttctctccgctcggaaggtggaagaggttctgtggctcatccacggacggcgccgggccctgcccaggcgggcgagggctggacaggagagggtgtgggcgcaggcctctgggcgagcgtgccaggctccgactgcggccgctttataaggccgactgtccctgggcttggggccagccccttgtctactagctaaatttaggcctctccatggcccagagggggctggaaatcttctcccgtgcgccggccctgctgacagcccgacacgcaggccgagagggctgagctcacagcctgacattccaggctgatcacagcagccccaggggcctcctcaccactgcacagggctggatcctgtctccttgccactcggacctcggtgcctgccccagaaccttgcaagtttggggtttattgtgtgttttgtttcccccgtcagcctgggggctcctgaggactgtgcctcccctccagactctggttctcctccacggctgtacctcctccatcagtgtgcaggctccttggggacagggtaggtggaagcaccaccgctctgtgacgtcaggagctccttccctcaaggcagacaaccttcacagcccatctctaaggaaaggttgagccctgccagggggtgtaaaatgtgcagctgtcccctgccagcccccatggggacctggattctgtgcctgcactccctctgactctcagaacattcagcagccccaagaggacaaagttggcagctttctccttaaaggtctagaaggttgtgttcccggcaactgtctgctccatctctgtgtcagaggtgatgcctgcgagcgccttaggtgggatttcagtcagaggtaaaagagaattccggaagacaattattctagccctgagttctagaatgccttctgggcatgggctcctggctgcaagctgtccagcacggccccgtttgatccccacacagctgggagggtggaggggctcttcccatgttacggacggggaagcgaagcctcttggaaagggcggggctcgcagttgcgtaagtggcagagctgggattcgaacctagatgtgttggacccaaagcccttcagaggccgaggtggtttgaacatgtgcctatggagacaggctggcccggaagagccagagaagcccctccctacccacctgcttgctcagcaaagctgggactgaccttgccctgggccagggtggaggccattctgagaggcggccaggccctctgctctgcccaggttgcagttaagggcctctgctgtcctctccaaatccgtcccttccgtcccagatcagctccaatgcctcctcccccagggaggcctctctgactgctcctgctcacatgggcccacacccagtccagatgcccccagcactgactgtctttgtcctcccacagcacctggcagtgtgacatagtcttcctgtgtgctgtgactctctgctgtgtcccttcttccctatccaactggcagttcccacgggggcgagggttcacctgtctccccattagattgaaggttcttgaagacgggcagtttctcttttgtctgagccccctacaacccagtctggagcttcatcctggagagctccttctacaggggtattagcggtgctggtggtatgtggagtggaagcagagcagggcacagggcacagcggcgggccaggctgttgcctggagcaacagggcctgttgcctctggcagagtttcctgcccgtgtcggggcctgtgacacccagcctggctgaggggtttctagggcagctgggaagccaccagcactgaggtgagatggagagagggtggggcggggtggggggcccagagcctgccgctcgccagggaaacaggagccggtggctaaatgcagacacactgtcatggtgctgagggcctgagtcactgcccctggatgtcagatcccgttacccacccccgcccaccattcctcctcccctttttcccccttcccgaggcatcacccacacaaatactggatcctctggcttcactgacccagagggacctcaaaaggtcatcaaggacattcccctgcctctaccttcagatcacagagacagaaggagctacaaagatgatgcagtcctttgaatcccagtcacccaggagagcttttcacaaacacagaccctttccttggaccccaggattttgatttgggatctggggaagggacctcacatctcttcccatcagctccccacacagccagctcataggccagtgatgaagccctcatcactcagtaggtattcattgaaaccttgctataaataggtgctgggcactgttctaggctctgaaggactcagagatgaataaggcagagacaggcccctgcttccaggctcacctcatcatacagaagaggaaactgaggctctagttgatgaaagagttagggtcagcagagctgtgctggcttcaaaccggtcatcctgctgagccaccctggctgccctcttctcagcctcctggtgcacacagggctggggggtgagggtagatgtggacgtgcagtgctggctgtgggacagtagccagcagctgccccagaccagacactggaaatcgggatgttgacagggcagccagttctggtgctgtgcagagtcaacaggtcggggtggccaaggtgaaggtgggctcgagtccatacagagcggcaactcccatcccacctcccacaacacacatctttgattttgatttgacttgcctggcatctaggggcaaagggtggcccagggtcccagattttaacaatcatccaagggctatcataagcttcagagggtggctt

SEQ ID NO: 977 - DNA, 4001 bp, Homo sapiens
tccatgtgttgctgagaaggctctctaatcccacaggattggagctgcctgtttatttgtctaaattaccgcccaccagcctgtgagtgctgggaaggcacagacagggcctgtccttgctggtccaacccaccccagcccctagcaccacacgaggttcactggttcactggcacacagtaggtgcatggcaaatatctgcccaaagaatgaacctctgtactcccagtgactgccatggaatgtcgctcagtgatgatctgttgaatgaacaagtgaatgagatgatctgccacggtccaggaatgtctgtggaaattcctcatgcacacagcaaacaactccacccaccgccatcctaccgcacccgggcatggaggagcccctcatcgggggcagagctgggggaaggtcaggaaagactgttgggcctcggaaaacatcccacgtgctaggttggtgcgttgggaaaagtaaaagtcagtgccaggagtgcaagttcaggtcaagactagggagctactggatggccctgctgaatattttggggtgagaggctgaaacaggaggacgacagaggaggctgcccagagtggggatgggggaggagaagtgctgggtgggtggggcaagagcagtgaggagccaggtctgggtgggggcttgacgagtgactcaggagggtagaggtgcgatgaagccaggaaggtgaggccaggcaggcagttcctgggtaaacaccagcctggttagaaaagtccctctcttggctcagagaacagggaggcaggtatggggactgcctaggagcacctcggagagagtgggggtggctctgtggctccccacggtaggctcggctccccagatgtgcccccacccacatctgccactagctccctgcccaccgaccccacccagtcctcctcaagttcactcaggtcctcagggcctctgctggccaagtgccttctaagcctcgggattcctgaccgtagaattcccttttcctccacctaagctcagagtaggggactagactgcaagggcaggcctctccctgcctcttggagacctgggaagaggaaagctggggaactcgggtcccccaagggtgcactgcatccccgcaccacgcactttgcagctcattccacgcagtccagcaacgccctgcagctatgcattttgaggccgtgcattttgagttcccttgacccacgtggggctggcctcagagaggttaactagcgtgccccaggtcacacagttactcagtgaaaggcagggattgattcaactcttcggctgtatgactccaaggcccgtgggtgttccacacaagcttcagttctgtcccaaaagttttgcttgtgcctacctgggtccaagctccccaaggtgatagacggtgtggtaaagtttcagcgagactcatagggtccccatcaccactgagtggccgttctgccaagctggcgcagaagggttccctcgtcctgccaagttcccaccctgctcaaagtttcccctcctggtccccaggaatggtaggccggaccatgcccagcgagactccagcactcggcaacgtggccgagagacccacgggctcccacacgggccagccccgcccccagccccacgaagggtcctgactggtggcccccctggattagccccatgccgcagggtggcgccggcccggggtccccggcgggcgccgccgtcccgggccagagtccccgccgcgcagccttgggcgccccagccaagttggcgggaggcggcgagcgggaccggggcgcccctagcccctccgcccccgccccccgcccctctgccccgcacactcaccgccagcagccgcccgtgcagcagcagcgccagcagcagcgcgcccgccgcccgccaccccatggcccggcccgcgccgctctctcgctcgctcgctccgcgccgcccgctccgcgccgcccgcagccgcccgctcgccggccagctcgggacagcgcggccctctccccaccgccccctttcctccccgcccgccccgcccccgcagcgccggccccgcccccgaaccgcccctccccggagcgccaggccccgcccacggaccgcccccgggccgcgggctctgctcgccccagccggccgcgcagcctactaggcctttgtctgggcccccagccccctccgcgcgggccgcggcccggcccggctccccgccaaacccggcctggagtatgggatgggacggggcgggggaccgggggcccgggcccgggcatgggatggggccgccgggccaggcgctctcgcctccccgatccccggctcccccgcttccccgcgcgcgccgccgacttccacgcccctgcacgccccgcacggccgactccactcgcgcagcttttgaagatcccgggatctccttcccacgctcacacgcacgcagctgccgctccgcgccacacgtgcacgccaacttccacacccaagaacaccttcacaccataactttactgcacgaacacacttgtgcgctacccgggaacactttcacactctggacccaactctgaagtaccaacaatcctcaccggctcacatgcacacttaactcgcttccaaactctcacctccaccagggacacaggagacagccctcacaccacactcagcccctcactcacgcatacatcccaacaagtcacggagcgggaggacgccttttcacatagattcctcgcaggcacgcacatttcacacacaggcccacatcattgcctacatgcttaccagcttgtttttttttttttttttttttttgagaaggagtctcgctctgtccccaggctggagtgcggtggtgggatcttggctcactgcaacctccgcctccgggttcaagcaattctccggcctcagcctcctgaatagctgggattacaggcgtgccaccacgcctggctaatttttgtatttttaatagagatggggtttttaccatgttggccaggctggtctcgaactcctgaccttgtgatctgcccgccttgccctcccaaagtgatgggattacaggcattgagccaccgcacccagcctcagcctgtatcttttacctgttctcacccactaatcacagtgcctcatagtgggcactgggtactgaactgagctgcccaccccacctgcaccattttccatgtaaatcactcacacaccaactttgagtcacataaatcacagccccagagccagaaccacaccaactcacacactcaggcccagacagacagaccctgccaaagccccatcacagatgctcgggtgggtggtaaaatcacagccccatgatctgtctctgacccaaccgcaggcagcaaacagcaccaagcccccagacctattcactgcctactcttcagctcccctcttctgcctgaaatttccagggcagcccgaggctgatgggtggagaggaaaactatgtgtgtgtagctttgaggaaaaccttttgagtaatgatagaggaggagaataaaactgaagtttccattgtttcctgtgagagttgctaggttccagaaactcatggctgggtttgcagccaggagtgaggtgagctgtggacagaaggaaatgcccagctcactgggcggcaccaggcctggctccggaagctatgttccctgtgataggggtccgcaggctcccaagcacattggggcctctcatccaggcatctgggggattgaaaaaacactggcatcctgacccccatcccagatagatcccctatctccaaaagatatctccaaaatatgccctgtggggcatatttctgtgggaccagctcagagttgtaaagaacagaaattgcatccacggtagtcaggccaactgcctggccccaacccaggctccaggcacagcactgaataaggtctatctctgatccgcacagggagataggggtggacagaggaggg

SEQ ID NO: 978 - DNA, 4001 bp, Homo sapiens
ctctggaggctgaggcagaatctcttgaacccgggatgcggaggttgcagtgagctgagattgtgccactacactccagcctggcgagagggcaagactccgtctcaaaaaaaaaaaaaaagaaagaaaatattatgctaagtagtgaaatcttcagtcctgccccccgccccccaccacccacagctctttcagaagttaagaaaacaacaggaaaaagaacaattctgttgattgaaccaagactcaagataccatgaattaatccaagtctcagaaaataattaaaaaaaaaaaagacaatcccgatgaggttacaggacacaaaagataacaagagtcatcaccgaataagactaggaggccttccggaaagggacaattttctgaaaagcttgccgaaactcttcattaaacacagtgtagattattggattgatgagggagtttaaatagcctagccaggtgaagaagtcaaagagcgccgggtggatccagcaggagtcccggcagatggggaggaccagagacaccacgaagaagggcagccagcagatgataaaggcccccagaatgatgcccaggattttagtggctttcctttctcgagcagcagaaatcctcttgcgttccagggcactgtcagcaagcttgattttcacgtggttgaaaaagagaggggagccagccgagtgcgagtgcccctcatggaggctggagttgagcgagcagagcgaggacccggcagagcctgtgatgaggtgggccgtggtgaagcgcttcccatagagtgagggtggattcaggatgcggttccgggcagcccggtagatccggccatataggatgatgagcaacaccgagggaatgtagaaggccccacaggtggagtagatggtgtaggagatctgagaggtgttcaccagacagtccgacatctcctcctgggccttggcctgccgccagaagagcggggggatggagatgcagatggagatggcccagacaatggcgatcatggtggccgcgtggccagccgtcctgcgtttactgtattccagggcatctgtgattgcccagtacctgtccagagcaatgacacagagatgcaggatggaggctgtgcagcacgtgatgtcagaggacagccagatgtcacacaagatttggccaaagttccaggtgtgggtgatggtataggcgatgctgatgggcattaccaagatggaaaccaagaggtcggtggtggccagggagccaatcaggtagttggcaggggtgtggagcttcctggtgagtaagatggtggtgagtacaaaggcattggagaggactgtggccagtgtgatgacggaaaggaccacggcaagggagatcttgagcgcctggagggtcctgggatcccaagcctctgaggtttctgtggcattcagggatctgttggaggcctcctggggaaggccttctgctgactggttcagtggggacatgctaggtggctctctcttcccacagacctccacacatttggctccttccttcaaggttgtcctgacaacagagcaaagtcatccttctgcttcacactggtgggagccgtacaccagaacagaccacagtgaaaaggtctcaagaccagactattctctaagtacagttgcaataaaataaaattaaataacaataataataataatattaaacaagaccggactatttgaagaatgctgagacaactaccagctggtagttaaaggtctttcctaaaccacaggaatcccaagatgtctcagggtcctggaacttttcccagcagatggtcatgcccaggggacacatgctgaatttgttagacaattatcaggggatcacacccaggtgggcaatgccctgggattcttgcctttggcatctggctcttttcaaagcttgagacattcgtgtgtttaatgagaacttcagaattcccctcacagtaattgaaacgattctggatttagggttgcttctgaggagcttttaaaactagacacaaaaagaagttccagccgattcagagaagcagtccagtcagcacagcagctcgcggttttcccaggttcatcttgacgcatcctgagctacttaacttcggttcctatcccactgatcgttttagagcctgaacagacaaaacatcctggttaccaagactcgaagaatgcataagctgggaccaggcaaaacaaacagatcactgtgggctcacagagcagggacacattcagaagatctgggatttaaaaaagaaaaaaaatagagttaggttctagaaggacaatgtggaagcctgaaatgaactatatgattaaaaagatactacttaaagctggccatggtgctgtgaaactggcattctaaaaagtatcagaatacagggagggtgatgtgccccacccatgcaattcccagaggggacaaagagtcgtagcttttggaatcatcacaagcttgttagaagtacatgaaatcagctctgtaagttgtgaatcagaaagcatcattttatttatttagcaacaatggaaacaaaataaaactgtacacagggaacgataaaggccatcaggaaagaaaccaaattgttacaatgtatttctctacaaagtatgggggggggtggccctttttctactcatttgaattttccaaatgtcctatagtgagcatgaataatttttttttttttgagacagagtctcgctctgttgccaggctagagtgcagtgacgcaatctcggctcactgcaacctctgcctcctgggttcaagcgattgtcctgcctcagtctcccaagtagctgggactacaggcacatgccatcacgcccaactaatttttgtatttttagtagagatggggtttcaccatgttggccagtctggtctcaaactcctgacctcatgatccgctgcctcggccgcccaaagtgctgggattacaggcatgaactactgtggctggccccttgaagctttttcagaccttgtcctatgtaccttttcttctggttgttcatttgaatcctatataataaaccagtaattttaaaaatcatttgtttatttattcattttgagataggatctagctctgtcccccaggctagagtgcggtggcatgaccacagctcactgcagcctcgacctcctggatcaagtgaccctccaaccttagcctcccaagtagctggaattacaggtgcacaccaccgtgcccagctaattgttttttatttgtttgtttgttttcacagaggcagggtcttgctatgttgccacggctggtctcaaactcctggacttaagcgatcctccagccttgacctcccaaagtgctgggattacaggtgtgagcggctttagcttcttaacgttttaaaaatcaatcaccagctgggtgcggtggctcttgactgtaatcccagcactttgggaggccgaggtgggtggatcacctgaggtcgggagttcgagaccagcctgaccaacatggagataccccgtctctactaaaaaaacaaaattagccatgcgtggtggtgcatgcctgtaatcccagctactcgggaggctgaggcaggggaattgcttgaacccaggaggtggaggttgcagtgagtcaagatcgtgccattatactctagcctgggcaaccagagtgaaactctgccaaaaaaaaaaaaaaagaaggagcagcagctaaacctgcaatgcagtattttccctcccactccccaaatttgtgggtgcttcattaaaaaaaaatctgcctggaggagaggggaaagcctcagtttaagaaaaccaatcctaagccaccaactccaaaacatatattacagtttaaaggatattataacaatatcttttgaagagctcttgctatatttcaggcactgagctagctttggggctaagagtcatccaacctgtaaagtgggcaacgtggctcccaactt

SEQ ID NO: 979 - DNA, 4001 bp, Homo sapiens
gagtgcagatgggcctgcagatagggtggtcaaagatggcccctgggaagaaggcagccgggggaagaacattccaggcacagggaacagcaagtgcaaagacctgggcacagaagtaagcccagtgccttctagaaccgtgagaaaggccacaaggctgttgcagagtaagagagagggagaggggaggtgacactggagaggatggcagtgtgggatcctgaggccagatcctgagacaggttttctttatctggagcacggtgggaagcctgaagagtctgaagcaggggagtgacatgatcacttcttttttaagtgctccagcttctatgcagaagatggagagtactgggtctgcggcagaagcaggggagccaggagaagtctacacagcctccccggtaggaagtggcaggggagatggcacctgtttagagcagcgccaacaggtctcgctaatgaatggcatgagggtgagggagaaaagtattcctaagttcctggcatgtgatgccgcaatggtgccatttgccatgatggggaagaccagggaggcaaagatggggagagttgggccaccataaattccctgttgtacatggtacctgggagaagcctgcccccaaatcctgacggagctatcctgtggtgggtgggtcaggcattggctctggagttcagaagaaaggtgggcgctcacaacagccacgcagggccatgagcaaatgtgtgctaagtggggatgcccagggggtccccaggggctgctcattcctctctatcccacagcccgggtctccctgcgcaccccaggtacctgcagcgtctccgaggcctgactggccatgccggtggtgagggaggccacctgcacggcctgcttgcgggcagctagcaggatcctgcagtaggtgaagcatatggcacccgagggcaggaagaaggtgaggcccgacgccacaaggacaaaaggcaggctggccagcaggcggcactggccagggacgggtggccgtgcgtggcccagctcgtgccagcccagcagcaggggcaggaaggaggcgagagcggcgaggctccaggcgcccaggactagggccagggcacgcaggggcgtcatgcgcagcttgtagcgcagcggcgagaggatgagcaggtagcggtccaggctgatgaggcagaggttgaggatggaggcgctgcagcacatcacgtcgaaggcggtccagagcaggcagaggccgcgcgccagcacccagcgcccgtacagcgcgttcagcatggccggcggcatcaccaccagccccaccatcaggtcagacgtgaagagcgacaccaggaagaagttggacgtgttgcgcagcgcgggctgagtgcagatgagcgcgatcagcagcgagttggccgccgccgtcagcgcgatgaccacgcacagcgcggccgccacccagccgctgccccccggggccgacggcggccctgccccccaggccggggtgctattggcggttgggcccggctctgggaccatgaggaccgagggtggacggcaagggagtgatagggtggcgggaaagcagatgagggccccggcgaagcgcaggctggacggggaccgtccgtgagaacagaccgcgactcaccacgccccccgggggaggtgagtggggggacatgggcgggggcgctgggtcgcgctaggtcagggggcagcgactacaggaggacacagtgtggctatttgggcgccctcggggatggggcaggaactcctggagcaaacgggttggaagtttggggaggggcacccgatgagccgaggcccctgaaggaagcggcgggaagtcaagcagaggtcggatgggctccctggggtgggagcagagccccctggagggggcgggcggcaagataggggaggggcgtccggccgggtcagagtgcggggaagtgggaacgcggggaggtgggtgaggggggtgaatgggcgctctcgggccggagcaggctccccgcggccggtgggcgtgtggggtaccagggcgggggcctaggggccggagcaaagccgcccctgggaaaggcaggtctcagctggcgcggaggcaccgggatccggcgcacacggcctgtgcggcgcgggggttcgccggggccgccaggccccgcgggaagaggagggcagcggccgcgcggcgccccctccccacccggcagcagggtcgcctccgtctcccgcccgcactggtacctggggcgctctggctgctccgccgcctgcgactgcggcaagcgccgcggggctgcgagaggaagaggcggccgcgggccgggcgggcggcgggaccgggtctcccgagcccgggaggcgccgcgaggggcccgcacgcgcggaggagaggccgggtgcagcctggagcgcgcggtccccgcgccgcggagcgtgcgccccgcctcgcggtgggcggggagagccgagccctggccctgcaggagggcggggtcccggcaccccgggcctgtgggccgaagatcagagcgccccagctgcgaggggtcacctcccgggctgtggcagcccccacaccctcagatgcccctcccaacccacacgtggcggcggcgcaggcggaactgggagcagggggctgtgacctgcccttatccaggggctgctctctaatgggtgcctgcccactcacaacggggtcaccgggctttcaggggagccaggagttgggaaatattggacaaatcgcctgacacccctctgggcctcagttgccatatctgtaaaatgggttagtaattctgggcattcttcaccgttagtttgagcaagaagctaaccttccccagggcctttcccgcagaaaccatcccgatccccaaaggggccaggtactaaggatgaagtccctgagctgttggcgctcctagtctaacagagcgtgaacagatttgagaatccccaggccaggtgtgttaagagtcgctgcaggcagaggcgtggggtgtggtttcccctgggtgtgacctccctctgtacgtctcccctctggctgagaagagtctctgcctaacactgctgtgcaggttaatactgttattcattcattcattgaacagatacttcaatgcatcttttaaggcgcatccactagatgtcaggcactgttctgacccatcaggacactacagtggccaaaacaaagatccgcacctccatggagcttacattctagtggaagaaacagacaataaacaataagcataatcaacagagaaagtgggcccagcgaggtggctcacgcctgtaatcccagcactttgggaggcggaggtgggcagatcacctgaggtcaggagttcgagaccagcctgaccaacatggtaaaaccccgtctctatcaaaaatacaaaaattagctgggcgtggtggcgggagcctgtaatcccagctattcgggaggctgaggcaggagaattgcttgaacctgggaggcagaggttccagtgagccaagattgtgccactgcacactccagcctgggtgacagagcaagactctgtcaaaaaaaaaaaaaaaaaaaaaaaaaaaaaggaaagaaagaaagagagaaaggaaagaaagagaaagaaagaagagaaagagaaaaagaaaatgtagtataaagagaacggggtgggatcattttttctccacagaaacagaaaaataatactttccaaatcgaaggctcctgcgctgtccccaggggctttgttgtacggttcctactcctccagttatttattccgacccctacaataatgctgagaggtagacgttaaactggggttcagagaggccaagggccttgccccagatcaccagcagcaagtggtgaagtggacctgaaacccagatctgctcgatgcccatggcaaagagagcccattacagatggtcaaaaacctcccctcaggcacctcagagcctgcagcacccacccgcc

SEQ ID NO: 980 - DNA, 4001 bp, Homo sapiens
ctccagcagtcccacgaggtcctcctagcagcatgtcgggtgctgtgaatagagctccttcccaagtttgtcccccatcagtcagtcactggtcaaggccctcacctgttcctctgacctaggctggcagcctcacgtgctgtccccactgtgcacccccttctccgcacacccacagagacatgtaagtacgtgtgtgtttccacctttctcacctgagccaaaaccccagctgcatgcctcaggttctccagaaaaacggcctccatctcagccttgactgctattcgatcagctccctggggtactcggccagccatcaggtggatcctgtggggaagatggactggaggccttgcctcccttggctctctctgcacctcttccaggattccctgactgtgccagccctcgtccgtctccccaggtctccagtccatggcacctgggtcacgatgcccaggtatcccagcactttcagagacacttcagtgatggctgaggggcaagccctttcccagacatctcagtgtccacccaccgcctcctgcctccagtactttccaaaacctttccttccctcggtccttctccgcaacctgtaacctgctaaattctcacctttaaaaattgtcctgacctttgcttgcccttctcaggtattccatgctgctgtctctacttcctctcctcgcatctacttagccttttcccatctgttttctgcccccaccattgaccagtagtgatcccctcttgccagttccttctgagcctgtttggcctctgcaggatttgacatttgaatcagccccactttgagccgtccacctcctcccatcatcccctgatcttagccacatccagctccaagcagacattccaggcctccccatcccaacaggctacatacatgtccagcctcaggaacgctgccaaatacaccaggcctcctcttgccacagcacccttgcaaggaacactcaacttcctgcccatcaagcaatgcccactccttgaagacagtccaagcatcactacctgtaagcagctttctctgatccagacagggttaggtgcctaccctgctcccacagcttcctggaataggcctgtcctcaaatgcatcactgtatatatttactctcctatctgcctaggcagactgagctcccagcatgggatcccagcatggggtgagcatgaaagagtggcaaacagagtggcataagacagataaaatacaaaaggcaatttacaaaggaccaggaccgcagaggcagagataaaccagtgggctcagacttctgagcgtctcagatctggcgtcctcgactccctgaacctgcatcagggtcatgggtcacaggggtgggggtggggtggagcggggtacctgggacagcccagggctttggcataccgcacggcctgctccagtccctctcggaaggccgcctgtctcccggggacggcccccagccccatttcccccttctcttggtctcctgcagagagaacgggcctcagcccccggctcggacactcccctgcccgcgccccggcaccccccagccctcccagccctcccggcccgcgacgcacccgggggcgtgttgatcagtacaagccgcagccccgcttctcgcgcggcgcgcgccagcgcctcaggcgtctccgcgtacggccaggccacctcgacggcctcgaagcccgagctgcccgcggcccgcacccgcgcggggaggccggagagctcggggaatagccaggacagattggcggagaagcgcagcggcgccatgcctggggaggccgggccgggcggagtccgcgggatccaaaggcggcgggcggcgggcggcgggcggcgggcgggggcggggctctccttgctggccctgcgaacgaacgagcactgttcgtggttagaaaagcgaagtgctgtaaaaacccgggccttcacgaaaagcgcctacggttagcgagagagggatcacggggagaggcgaaggggcggagcgagggcggccggaaaaggagcaggacccgcgcctggagaaggtagggaggccgagctccagggcctgagagccggacgcgaagcaagagagagctggctgcccgagggcccggttgcaatgatgggacgcgcactttaatactgagtctttcctctgattataaaaatgctatctgttcgttaagcaacatttgaaagctgtatgaccaaataaagaagcacttttataccgccagttatcacaccactagcctgttggctttcccgtccaaattttaaaatatgcaatttttttctttggaaattctgatcattcggtatatgctgttttatagctctttttcatggaatattattttgtgagcatttcctcgtgttttccaatagccttcaaagtcagtgccttcgctgctcattgtcgcacacctaagcagcaagtcattattgtactttgtggttggatatcgtgtgtgtgcacgcgcgctgcaagcgcactttcaggcacttcttagtccctatctctgactcttttccgagtctttttctagagatgtccatcacagtgtttgcccgttcacgccgctagtcttttgcaagggaaaccgccccattggagcagctatgggtgagctgtccctttttagccttagcctcagctgattggaccagggaggtcatctgatcccagggcagccaatccatagactggccaaaaacctcttacttgcgtcgtttggaaaggtaatttaaccaatcaagagttcaaacaaggaaatgctgagagtcaacaggtggtgttgccagaaggtgactgggctgtagaaacgaaataagacagtcctatggtaaagaaaagctagagcggaaaggaggggaaccaagtcctgtgaatagaggtagcaccctgagaaacccatgtcatcccaagggtgcccaaacccatagctgcccccaggtctgtgcacttaaggctgggatgcttagactttcctgggtttctgtctctgtatagcctcttaatgtttcttgagataatttgaatgattttactttcatctacaataacccaactgattgggcaggttcttatgggtagaattacatggtcaaaaataggaacatatttaagttgttgatatcttaaatttcctttgaaaaatataaatttatatcccaacaattcatgagtaaacgtcatcttgatctatcgtctgtgctaactttgacagagaagcttaaagtgcaacattaggaacacccagctcccactgattgttctgtcaacactcaactccatctcaaatgaggccagctcagacaccagggatccagcctgatcccgtggtgaacccaaattcttggcaggttctgtttcttcagctctgcctccaagaacagactgctgccagctgacactgatcacctgatttcatgctcttttgcagctggttttacactaggacctttgccttgtcttggaacgtgtttctcgtccaatcaagacctcactaagcttaacattgtaatcagtcccaactttagtgtgtttgcaatccaaaattgacaacaaagagtaacatctagaggaagtaattcctttattaccacctcactgttgatctccgagtatgcaaattctatttatgatgttgacagctgctgagctctgcgtcagaaacaaaatgtgtccaactcccgattgtccaccccttttttccttggacatgccttagggcagtaaagattatacataaactagacataggtgactcactttccccttaattcccttacaacaccttccaccttcacataatatgctcaaataaatatataaggagtgcaatgtccatgaaaattatttgctttattcacctttgactatgtcttatcccaccttgcaacacaggcatgacactaagttatcacaagttttgattctttgcatttgccttttttttttgctttattgtgcaca

SEQ ID NO: 981 - DNA, 4001 bp, Homo sapiens
atccacatttctgttttaaaaaaaaaaaagatatctaaacatcatataaatacatactcctgagtctaaccataaataacagccaacacttgcttatttccattccaattacattccaatctattccattccaatctactcaactctgaaatacaaggtgaggtttctgaaatgcgtgtcaaagtacgcatctcttaaaatctttcagtaatgtccccatacacctcagattgaagtctaaactctttatatgatatgcagcaccctacaaaggtttagtgccactaagttctcgggcattctttcatcactccccatgcttcactcctcacccccgacatgttgaaggacctgcagattcccgacacacatattcttgctattctttggcggcaatgcttgccattccccaaatctgggaacaacatgcatggcagtctaagtcacttcccttccctcacttgctgtatgattttgtccaggttactgtgcacttacgggcctgctttcttatctgaaaaaaaaaagtgttaatatccatcttacagggctggtgtgaagattaaacgaggaaacatttgaaactgtcactctttctggcatacagaaggtattgactaaaaaacctttaaaaaattagatgaactcttataactgtcagaatatttaggctaagtatatttacttaaccaatattccaagaatatcagggatttttaaagactagaattacagaagctaaagaggaatctctgctcttagaaagttcagactaggctgggcgtagtggctcaggcctgtaatcccagcactttgggaggccgaggcgggaagatcacttgaggtcaggagttagagaccaccctggccaacatggtgaaactccatctctactaaaaatataaaaattagccgggcgtggtggtgcgcacctgtaatcccagcaactggggaggctaaggcaggagaattgcctgagcctgggaggcggaagttgtagtgagctgagatcgcgccattgcactccagcctgggcgacttcaaacgagtcataattccaactagggatctaaaagatccaagaagtgggcttcaacttccccttcattcatcataattgaggtttttaaggttttttttaaggacgggggggtgggggtgactagccaatatggtctcgaactcttggctcaagcgattctcccgccttggcctttcaaagttctgggattacaggcgtgagccactgcgcccagcctgggtttttatttacatgtggacatgtgaatttactttttacaaggcattggaaaagtgcccaaagtctatctgttttgcctacggtagacatgggacatacgtgcgatacatgctggtaactgggcatcgctagtgaccccttaatgtcccgctccagaacctggtacaaaggaggggctcatctagagatttcttcacttaggttttcagcccacaaaatctgtgcgaagcagacgaattccaccaatctggtcacacccccgcccacccgcaccggcgtggagcctagaggtgtggcgcctgcgagcgcccggtgcccgcggccggatcgggcctctctggaggccccgcgccgaggcggggcccgtacctgctggatctccagctccgtgtccggctgctggcggcccagcagcttcatggggaagctcgtctgcggcagcagcaccgtgtcccggtatctgccactattcgagttcggctggtggttactggccccggagaccgaccgcaccagaagcctcttcgtcgccccttgccatcccgggctgcagggaaggcggggcgtcccccacaaacttcgggcagtggccagggcggccgcgcccggcccgcgagggcgcagcccccaacgcatggtccggcaacccctgagagcggggtcctccgctcccgccccagcttgaaggggcaggaccccaggaaaccaaggggagccgagtaagagggcgcacgcgctccgggagcggaaggggcggggagggagcggcgggtagtgggggcggggcggtgggcaccgccttcccggagtccgcggaggctgagccacctccgggtcctccctgcagccgccggggggcgggctcagattcacgggggcggggaaaggtggggctcatagtccaatcgctgtgccctgctttttaaatatatatatatatatatttttttttttttactttaacacaacatagctatgattgtatcactttaacatgtagccaataaaaagtaagatattttacatattctcttcatacgaagcctttgaaatttgacatgtactttgcacatactgcacatctcaatctgggctaaactcatggcaaggcctcaacaggcacacttgggtaatgactacgactgtgggcagcacaagttcagtgaaaatattgtaaaataataaaatttcagcaaatcgagttttaaagatctaattggctattattaaatattcctaaacctttctacaaaatagaaaggatctctgatgagctgtgggggcagggtgaggtttataggcagaaaaggttgaagaaggcagaaacagggaacgaaaagcagacgccatttggcttaatggatttggctatcatctctcctgatttcctggaacgcagaccttacaagtaaacagcctagtgcaggagctcagtccaaatcaatgacttcccatagattttaacaatattataaaacaatctaacctttttttaagattctctgaaatccctgttatatcccactcatagaatagtatggtatatatagcaacttctgctcctgtttctgacagattctgctctatttggttgtccagttcataatagttcacaattgttaccatttcattgttgagtatacaacttgggaatagccttcctaatcataaaacacaacatccagaacatttggttcacataaataagaaggacagattttctacaagtatgaaaacatatatataccaaaaaaagataccggaaagtgagaaaccaagtgacaaacagaaagcactcaatgtcagcctttcaccaatcaatgactccagctctgtacctgaattaattcacttaatcttcaaaaccagatgaggtgaagacacagcataccaaaaaaacctgtgagataggaactatgagtatttccatttcacagctaaggaaactgaggcacatagaattatgtaacttgctcaagatgatacaactaagtagcacagctggaattcaaacccaggcagttagattccagtgtgtgtgcatagccaccatgttatgttgtctttcctacactatactgtggaagaaaacatttgctacacattaaaaaataataatacacaaaatgcataaagagctgctacagatcaaaaaaacaaatgtaaacaacccaatttaaaaaaaaaaaaggataaaagaagctggacacagtagctcatgcctataatcccagcaccttaggaggctgaagtggaaatatcacttgagcccaggagtttgagacaaccctgggcaacatagggagacccctatctctgaaataatttttaaaattagctggatgtagtggcatgtgcttgtggtcccagctgctttggaggctgtggtgggaggatcgctttagcccaggaagtcaaggctgcaagtgggccatgattacaccactacactcctgcctgggcaacacagtgagagcctgtctcaaaataataataataaagcaaaagaaatgaacagtcaactcagagacacagaagtggaaacagctaataaacataaaaagatcctcaactttaggagtcatgggaatagacagttaaaataccattttctttccagcagattaaagcaaaaataaagaagtttgataacagggcttgggagaatgtgtgaaagtggactgctgatggtagtgttaaataggtactgtcggccaggtgcggtggctcatgcctataa

SEQ ID NO: 982 - DNA, 4001 bp, Homo sapiens
gccagtgaataacttaggcttgagggccacactcgtgccacaactctaccactccagacaaaagcagccccaggccgggcacagtggctcacacctgtaatccctgcactttgggaggccgaggcgggtggatcacctgaggtcaggagtgtgaaaacagcctggccaatatggtgaaaccctgtctctactaaaaatacaaaaattagccgggcatggtggcaggcacctgtagtcccagctatttgggaggctgaggcgggagaatctcttgaaccctggaggcagaggttgcaatgagccaagattgtgccattgcactccagcctgggcaacaagagcaaaactccgtctcaaaaaaaaaaaaaaaaaagaagccccagaccacctggaatccaacgggtggggttcccagagaattttattataaacaccggcaatgggctgggtctgacctcagggccgtatttcaccaactctggttctagatttaaagagcccactaagtgcccagagatgtgatatggaaaaagcccaaactaagacacatcagcatgacatttcacgacatcaagaataaagaaaagcttctgagaaaaacacagttcacatacaaataagaacggcaccagacttctcagaaaagctggcagcgagaaaacaaagttgtgatgtgaacattgtcggtgacaatttccaagctagatttttacacccagccaggatatcaggtaaagccactagcagagacacaatgagtccaaaaattcaccccacgtagctcaggaagtcattaaaaaggtgtccatcccctgaaaccaaaacacaggagtaagctgaagagaacaagaaccgggtccgccatagcagggacagcaggcaggcggccgcgaaccagatccactccaccgggcggaggtttcagggatccaggtccctggaagctgggcaagggaaacccaaggctgtaagcagtcaaggccctgacccggcatgaacatcactgacagtcgtgatgtcagcacagatgactgagccaaatgccaatgtgaccagctatggggagacacagggaaacacaaggtaaacagaactcgggagtgtcaccacaagctgtcactcagaaacacagctctgccaccaggcggggcccctgaaccccttgtccctgcggagggagaagggtcaccagatggcccacttgggaggtgcccacctagagacgcctctgctctgatatggtgggctggcccccaggcctcccctggatgagtcgctgacccatccctgggtgttgagccaagccctcctctgggtgccctcccccgggtgctgggccctgggtgagcttcccctgggtgtccatcccaagtggaatctcctgggtgcctgaccctgagtgccagtcgctggcccacccacccttgagcttccaccccatcccggccctccccgggtgcccaccccccacgccctctgcaggccccgggcgcccgccctgtccctgggtgccggtccctggccactcccctgggtgcccgcccccgagcgccctcccagcacgcgctcacccgtacaagatgacgtcatagagcgtccggccctgcacgttcaggaagtgggcgtagcccgcgcgcgcagcaggcggggcccccgcggccgcaggactcggaagcggcagttcattggtcagcagccctagcaggaagggcgccgcgtcggggccacgcacgcgcagcagggtgcgcccgtccagccggaagcaggcccaggccgctccggccgttgggtcgccaccaggactgcaggagctgtgggccaggcggcaccttggggccgcgcgcagccgccagcgccagaccgggccgccgcgccccggagtggcgcctcgaagcagcgccgcggtcgccatcttggacaagagtggggcagcgggaagggcccaaggaagcgggaggggcgggtgccacagcggcccctggcggtggccgccggagggaggcgggaaggggcgggcgcagagtgcgtgcgtgaggggtgaacggaacgtgcgtgcctgaggggcggagcagcgccggttgaggccgactgagagtgcgtgcgtgaggagcagggcctcccgagctggaaggggcgggcggggcgagcgtgcctgctgggtgggtggggcatgcgtgtggggcggagcatcgtgcgcggggtgtgtttcggggcggggactcggcctatccgtcagcacgcaggctccaccctcggtaggtaacgaggtttctgccggcctcttaagcgccatcccatgtcccattcggtggccttcctcgttttcacccacccatgtcgggcaccgtcactcatctcgagaacctcttcatcctcccaacctgaaactccctgttaaacacccactcccgaggccctggagctcccattgtaccttctggctccatgagcgtgcctcctctagggacctcacaggagcagaatcctacgggatttgtcgtttgcgacggcttatttcactcagcatagtattctcaaagtccatccacggtctagcatgtatcagcattttatttttatttttatttttatttttattttttgtaaagacagggtcttggttatgttgcccaggctggcctcaagctccagagctcaggcagtcctccctcctcagcctcttgagtagctggaactacaggcgctagccaccacaccagctaatttttgtattttttttgtagaaatggtctccccatgttgtccaggctggtctcaaactcctaggctcaagcgattcaccggctttggcctcccaaagtgctgggattacaggcgtgagctaccgcacccggccgcttcctctttcctaccagttcgccagcgtccacgtgtggctgttgtgtcatttttttcatttgctggaccattgggacttcagctgcaggtggcaggaggctccatccccaagtgtctccacggataaggacaggcaccatccagcccacaacccctccgcacccctaatcagtgtgacatgatgagacacaatcacagcttcaaatcacatccttggtaacttctgcttttttcaggccagggtcacccccatcatgtgtctatagtcctcttcagtgcaggattccaagctcccctggagcccagcctgtcctcccacaggacgtccttccagaccacaggacgtccttccaataactctcgtcctctcttcacagctgaactcacagaggacaatttaggcaggaaccacacactgctatgacatatccaccccaccgtgctttctcgaggagtgatgtcccataccccctgctgagcagccctgtacagtggccactttccctggtagtaggtgacacatctacaaggtggccccagcagccttcagccctagagtctgactgccctggtccaagccatccctgccttgctggcctcctggggcccatgcaccctgttgacattcccctctccactgccctccactcaaagcaccaaagaagacttactcaatgtgtccttatggtgcagagtcccagcaagcagaggtctttgtatctgttgaataaaaaaattcctcatgatgcgtagtaacatcagtgaggaagactgcaccaaggcgcatcatgtggtgtggggccctgcctggcggccttgggggagatggagctcaaccccaacacagcagggcagagggtggagaagccgaggagcagcgtggggtctgtgggtgggaatgactaaggagacatcagggctgaggggtctggctaaacccacctcacagggtccttgctctaggcaggcagggtgatcagacgtcaccaggtgatggtggaggatgagggacctggttggatgtcatcgagggtgagatatccagggtgtggggttctggctaaactgactcagtagggctcttactaaaactggattttccaagcaagtgcacagatgggcctaggagaaagttccagatc

SEQ ID NO: 983 - DNA, 4001 bp, Homo sapiens
actacaggtgcccaccaccacgcccagttcatttttgtatttttagtagagacagggtttcgctatgttggcaaggctggtctcgaactcctggcttggccaggctggtcttgaactcctgacctcgtgatctgcccacctcggcctcctaaagtgctgggattacaggcgtgagccaccgcgcccggcaagggactgtttttgaatgtcacaggcaaaacaaacccataggtcacagaggcattatgggcccttctgtccgttaaaaatgacactacacacaataaaacatgaaagagggagataacaacataaaggagtgatgtatgtcggatacaaaatttaacaaaactgaaataattccggcaaagaaggattagatggctcaaaatattgataagaggagataaaactttttaccttgaagccactggttcatatccaggtcagactagaaggctcaagggactgaaatcatagtgtagggaaaaatcctacagtggctgtggggatgcactagatgtgacctaatagaaattagagatgaaaaaggcccatgaagacaagccagagccctgcccctgcccgccaccgaggacctgcaccccttccgggaagggctgctcaagttacggaatgctgtcaccacagctgcggatgacagcacctttgggggtgccagggagatctgtttctgcctgattcacaatcaacccacaggcacgaaatcacaagggctgaaatgtgagcaactagggggaagccaggagacttcgtttccagagaaccctgaacagccttctgccggtcacagatgagacagggatgaggaaatgccgctacagaccctctgatctgtccaccctcgcctgaaaaccagtatttccgaaggaattcttaccagccaaagtgactccaagaagactggctaaaacttagcagcgtgccgcagccgaacacaaaccccaggaaacaagctcggatggctatctgaaaggaacccaagagaagctcagtcattcacagtcctcagagtacagatctgggctgctgaccttcccggaataggcaacccacaggcaagcagatagagccgatttgctgaggttgaaagggagaagtgggcgacctgggttcaaattctgcacccaccgctctctggctgtgtggcctcccaaattatttaacctctctgagcttgcttccccatctacagccaggggataacagtacctaccttttaggactgcagtaaggattacccacgtaaaacacttaagactaactgctacctacattttagctgtcattattattattattcgtgattactattcagggctgtaggaaaactgcttaagcctagtttatgaggtcagggcacccgggcctgtgcgcccagccccacccacgtcactgcggggcctttgacctgagacagggcagcaggtaggtctctgcaccttaagttacataaaagcactcgcgggctcgctcactccaccccacgcgcacctgctgagctgcacaagctgcaatttaacaacccactcctcgggtgcagggcgcccgagcccggagagagagggtcccctcctgcgacctgaactcgcggatgaagagcgcgcgcgtgggaggccactgcgggcccggggagaaaggtgcccacgcgccgcgccaagcggaccgccgcccgccccgccggcccccgccggcccccgccggcctgcacctggtagcgaggcggccgatagagcagcagcagcagcgcgttgagcccggccacgtagagcgccagcccggtgcggccctgcaggccggcgcgcgtgagcagcggcagcgcgagcaccgaggcgcccagcaggaaggtggcgaggctgagacgcgcctcagagcccggcggagcccgcgccgcgcagcccgccatggcgccgggcggcggactagcgggcggcggcgccggctgtagcccggagaaacgcgccggctgcgcctgcgcactgtgccgccgatgccggcccgggaagggcagctgcccgcagctgcgcgccgcctgccagttctcgcgagaactccggcccgccctgttgctgtccggaatttggcgggagcgccccgcccgcccgcccctccccgcccctcggggacatccgggctctgagccagactctgtgccgggcgggggccgggaagtggtgggagaagtcgccgcccgcgtctgtccaaacttagtcccaaactcaggaggttcctgtcccaagaagcaatgtaaagtttgaaacgagccgagcgcggtggctcacgcctgtaatcccagcactttgggaggccgaggctggcgaatcatttgaggtcaggagttcgagaccaacctgggcaacatggggaaacgccgtctatactaaaaatacaaaaattagctgggcgtggtggcgcacgcctttaaccccagctacttggtgaggctgaggcaggagaatcgcttgatccggggagacggaggttgcagtgagccgagattgtgtcactgcactccagcctgggtgacagagtgacactccatctcaaaaaaaaaaattttgaaacggccgcaccctcgccggccctgcgtcgtccccgaaaaccagacgccctggggcgcggggccaagtgcggcgacctcctgccctccctctgcggctccctggaaaccggcctggacaacggcacctgggcatccatgcaacgggaccaccgcccgcttaaattcctgttgtggaacaaggctggacggtgatgggaatgctcaggatatgttaggttttcttttttttttgagacggagtctcgctctgtcgcccaggctggagtgcagtggtgcgatctcggctcactgcaagctccgcctcccgggttcacgccattctcctgtctcagcctcccgagtagctgggactacaggcgcccgccactgcgcccgtcttatttttttgtatttttagtagagacggggtttcaccgtgttagccgggatccatctcctgacttcgtgatccgcccgcttcggcctcccaaagtgctgagattacagacgtgagccaccgcgccctgcctatattaggtttttaaatagcaggaggcaaagcttttcggtgtgatcctgacttcacttggggaaaaagggcaggtatctgagcctgggaaaatgatcaagctatcagccaaaatggtataacgccgactatatatgtaccttttttttttctttttttcttttttagacacagggtctcactgtgttggccaggctggagtgcggcagtctggaactcctgggcccaagtgatcctccaatcagcctcacaaagcactggaattacaggtatgagccaccacccctggcctatctttaggtagtggcactcttggtgatttttattgtctttatctgtttttgcagtttccatactgcctacaatgaacacaggatactttttttttttcagatggagttttgctcttgttgcccaggctggagtacaatggcgcaatctcggctcactgcaacctccgcctccgggttcaagtgattctcctgcctcagcctcctgagtagctgggattacaggagcctactaccacggccagctaatttttttgtatttttagtagagacggggctttaccatgttggccaggctggtttcaaactcctgacctcaggtgatccacccgcctcggcctcccaaactgctgggattataggcatgagccaccgtgcccggcccatagattacttttataatcaagtttttctttactttttaaagagtaaattctctcacctcaggtagctcagagagctgcgctggaggagaaaagccagtaagtgaacaactggaataaactctgcaggggtggcagtgggggcagaaggagagcaaggatggggagcaaagagggaccccaggggaggccctcagcttggagggcggcagggcgaggaggctgcgaggaacaga

SEQ ID NO: 984 - DNA, 4001 bp, Homo sapiens
atcccctctcaaccaggcagtttttcatttccctctcgtagaataagcaagttcactttcccaaagctcccaaaattcggccatgtgcgagaaagcatcattagtacttaatggagacgggtgtcatcatatacacaagtgtttaaaaatcgtttattatgcaaaatgttaacttttataaaaagtttaatatacatcgcattgttacagaaagtcaccttcctgtaaaaaaggtacaaaacctatatactctattatagagttcataaatcagggcaacagaacctttctccaaggagaccagaagaccagctctgccgccgccttggcatagtttggagagcagccactccttccacacctccacgctctgaagagaccttagaacttgggggtggggtgggagcagggtgacgtcgcccagctggtggccagagctagctctggctcttcaggccacaagttcacagtccttcgctcctgagcaccaggtttagtctccaggaagggatttggtgaagtcaagtgggcagggcgaagttggggcccatccctgccgtccggcttccggcaggagaggttcccggggtcccaggcagaacgggcgccagcacctgcgttctgggcgggggaggaaagaagaccaaggagcagtcagtttccgccgagcgtgccgaggcgggggccgtccgcagactggccggcgccagggaggaaacttggtctgtacctccagctgataactccgcgccccacgctgcccccacccagttggcgccaaagaccacaggcggagcttgcgctacccctcctacttggaattgacactagctgggagggggctgccgaagacagctccctatacaacatggaacagaaagacttgtatttagtcggacccatgtctactttgccagaccctcggccactgcgggagggcagggcccaggcgcatttaaggcttaaatgcacatcacatggaaactgactctgccattcatttgatgcaaccatgggcaagtcacttgtccctctctggcctcagtttccctaaaccgagtgagtggcaatttttcaaaacgtctgccaactccaggacttgccgtttaaacctccctctccaagagaggagatactcacctggaggtgtcaggacacggccgagtcagtggcaaaagctccttttgtcgttggagatgacaagttccggagtgagctcggctgtctgattagaggaaaagagggaagagttacgcgaggcaatcgggagctccgagggtcccgcagcatccttgcctgggtgttcagccctgtcccgacttcgaggcttacctggatgggaaggtgggggccatcagggggtccaggggctggctcggccaggactacctgcaggtcgagaatgtagtcgatgacgcgctgtaggatttccacctggctaagctgagtgcctctcgggactccgggtaccagttcccgcaggcgggagtagcagtggttcatgtcgtccagcaagctcagcggctcctcagctgccgggcccttccctcggccccgggcgatggccagactgcgttccgacaggcagcacaccgcctcgtagcagccgcgcaccgggctcagcgccttcatgctggggagtgagtccagaggtgccccaaagagaaagaaaaccaaaagaagtcccgctacagtgacctgcaacgcgcgcacgctcgccgcggcggtcacttatagagcctgcctggaaggcacgcctctttattcaaaatggcccgcctcggccctgcccccgccggccctgggcgttcacagcccgcttaaattgcaaacaggcttcctccggctggtctgacgccgaagaccgcggagccgcggattcaaagaatgaggaagcgctgataccggggagaggcgggcctctccgccagcaaggatttaaaaatcactcaaaaccattaacttccagaatttgctttttcctggcagcaccccagatctttgagcttccctgccccctgccagtccgcctttagcccaacactggttcgagccacagctcctccgaggtcataaatccctgaacagcaaagaagctccccccaccccccgttttttttaagcgaaagatttttcaagggaaacttgtaaggaattagtgccgccttgttccccaatttgctgttcgtctgacctccagactcactggcgtcaggaattatcttgtgaccagagggaaaaaaaattaattgcggtgaagctgaggttacaatgaagaaaacagatttgcgctaggcgctgagattgcagaaggaggagggaaagggggtttgagcaaagaacactatttatttgagcaacaggggaaaagaagaaagcttgagcccatgctttttgcatggggaaaaaaggagcctggaccctctgccccataaactccataacgaactaaatatatgcacagttgtgctttgtgagttcaattagaattttggacaaggttttaaatatggaggcacagatgggacaatttctacataaacctttttaagagcccccccccacccaattgggtcagcaaatttcttaacttcccctctcttcactttccacacacctctgtgtagaaaacagtggtaatttcattgctctattgtctgtccctttctgctatggaagggcaggccacctggacttgattattcttagccctgctgaagtagctccagctccatctgaaagaccaggaaaggaaccagagggccggcaaactaagtcctgtattgcaacaggacactgtgctcagtattctttgattctttgcttgccttcttgtcacctccctagacatttggggacctgcacttccaagatgctgctttccattttggaaatgaccaagtgggattcccccaatagttgctttcctaatgaatcattggtgaatatttatggagtccctccgcataaaacagtggctcctgctttcaagaatctcacaatttggggagacaagattaacacaggaaacaagagttcgataatgtgtggcactgattaacaggacaaggggggctcagagccaaagagagtcgcaaaacggttgaaaaggacactgactgggaattgagagccctgggttcatcatgctagccctgacaataatttgtcatgtaatcttgaacaagcccaggtactctggctttaattgccttgtgagtaaaatagacgatggtactaagtgattatttaaaatcctttccaattgtagaagtccaaggttgtgtgaaatttggatatgtaggtgaaagatgctgaggggcccaaggaaggcatttaagacatgcccaatgtcacactacaagtaatagcagagccagtcttgaagcctcgttcttttccatcaaaccacagggctctgtggcccaagaaagatttcttcctggaatgtttttttcaaggacaggctcttcagtaagaaaagaggaagaaaacctgtgagtgggcaagtcagtctttacatgctacagccgtcaagtgccagctatttggtcaggaaaggcaaaataatggctgtaggaactcctgaataaccgaagagaagatccttcttttcctatcttgcagacttctgtggcaaaacggtcaagtccagagggttctagaaaaatcacgggccaggcagatttctgtgcaaatgcccattcttcttcttcttcttctttttttgtttaaactaattgtgtagactttggctgagttatcctgggtgcttctattttcccatctataaaatggaactaattgggtctactcattcattcattcgataattattgaatgcctcttctctgcaaagcacttgatgtgttcactccatctgatcttagtcttcttactgcctgggggacccagcatgggccagttgtgtggaaggtgctcagtctacccagattctcctcccttcttttccttcctctactactgcagctgatgcctca

SEQ ID NO: 985 - DNA, 4001 bp, Homo sapiens
ggaccgttaatacgcccctttcctagagtaatcacaggatataaacgtttcttcattgggagagaaaggtggggagggacagaaggaatccaagtctgtgctcttggctaaatccctctcgtcttaggaaatcctgtgcggaaacgccactcctggccctgaagcgggtctagctttccggtgaggggtaggtgtaaagtccctccctccccggagaacgaatggggaactccccggcccaaaccttttagccgcttccttctccacgcagccggcagaggaaagtccctgtctgcccccaatctcttaaaccctggggaaggagtggtgcattccagaagagcaaaatagtcttaatgccacaagacaaacttacatacacagacatacacaaacacaaaagttaacgatcgtcctcttccaatgagcctcaagctcccaggtctccagataagccagatgcgcccgggggcagtttgcgatgcccagaggcaaccagtctgcccaacgcgctcagcgcccgcggtctctgggcgtcctcgcagccgggaagggcctggccctcacttcggggacgcccgctgctccacctcctccccgcaggggggccaagggctcagaaggccacgatggctgtgctccaggggttcatgtctctcagcaccggcttatcgcagcagatctgcccgggctcggcggcttccggaccgctctcctctccctcctcttcctctctgccgcccccggggcttttccgtaggagtcccgagaaactggaaccgaagatgctgatgaggttagccacgttcccggtctccatctcctccgcgtcgtcgtcctctcctccactcggcggctgctctaagttccggcggggcttcttgagcggggtcgagccgggcgccgggcagcccgctgggccgccgcccacccccgccgcgcagcgcttcctggggcacaccgcgggcggcgcggggggctcgtcctccgctggttgcggcgcgcagcagcaggcagcgcggggggtcgcggccggtgtacccggcgggtcctccccgcctagggggcagccgcaggggcggcgcgcggcacgagatacctcggggaagacgccccagcctccggcggtaccctcggcttctctggccgccgcctggcgcggcccctccacgcggctccaggcagcttccgtcgcgtccgcctctccgccctgaaaaacgtccccgactccagtcaccgtggccaccggcacctcgtcccctacccgcggcgcgtctgagacggaggagcgctccggctgcggctcggtctccggccaagaggcacgagcggcgggcgggggcggctctccccagccggcgggtggcccggccgccggctccccgggctgctgctgcggtggcggcgccggggtcccagcgggaccggccaggtagaggccggggcacgggtcgctcaggtagacttggcgggcgctgcgcagcaccagcgagaccaggaggttcttatgcagcttgatgccgccgcgctggacccgcgagttgtagatcttgcccagagagatgctgacgatgcgatgagcctccagcttgaactccatctgcttcccctgcacagggccgtcggcgccggggtgacacgtttggaaattgggagggaacgggaggcgcaaacaagtccgccccctgggcacaccctcgatcacctaagactccgaagagaaacgactctggtgacgcgcgcgctgctctactaacctctccaaacaagacaacttccccgtttcgggtccggtcgctaaacagggcagcctggctgccccgcgccttatataggcttctcgaccgccaatcacgaagggccgccaaccgttccggggctggccggcgcgccctcgtgcgccgcgcacggccaatcggagcccgaggaggggcgccagggcccgttcgaacgttagtcccgcggagcaggctcttaaagggggcgacggcttgcggccgcagaccaggcccgtggggagtgaatgttcgggacggtgctcgagagcgctactgtttggagttacagattctggcttgtgcgatggcttgccggaaccaaagcgaacaaaatattcgaactttcttccgaacacggtggtggactctgttctgccataaagtcctgatccttccctgatcgactccgccctcaccagccacaccaccgtttccaggccggccacacctgtaagcgacccccctcaaccctggcaaaaatagagatggtggccatacgcggcggaggacacccctggataacaaatagtattactgcaaagtatttggcaatcattatttttggatgagccgctttccccgctagagtcacatacactcttagcagctgtcagttctaaccccaaagaaaagggggattctaaaagtttttgcctaggtttttggcttcttttcaaggaatcgtgtctagatacaaagttattggttgtcctctaaagctggcatctttcactttgttctctagattctagaacaaacccagttatcaaataagttaaatggaagatgttacaggttctccacaatgatttttttttccttttttttttccatttccatttttccattacaaggactgaccagtccacccttggaaaaatcgagcaagttctgaaaataaaaagaaagaagtcctgtgttcccatgatgatgtcataatttcatttcgtgtcaaggtaaaaatatagtgctagggagttccagaattttctggtcagtcaacaacttagtccatctactggtccttataagtatatcaggacacaattaccacggggttgcccagggtcctggactggaaacatggagtcacttccagttagttccaccgaagctccaccacagacctgcctgaggactctgggtaaataacctcaggccgcttcagtgtctccactgctgaaaagggggaagtcacatacacatctgcgttattgtacagacgataaatgacaacttctcagccacaatctgaatgagaaaactaagcactgctttcttggagtccatgtggaaccctgggcctgatcctgccccggggttggtcaagcaatgaatttatttaggaaaaataccagtgaagagtgggcttgatcatgaccaattcacaatctccagaggatgtgatggctcaatagcattacctgtgcccacaactgatggtaactgagacagcaggctctgagacccagagttcctcccctctaggaattttcagcccacgtagaggaagatataaaataatgacacgaataattacaaaaccaaatagcatatattgagtaatgacacaagaatttttctcttctctttttctttgcaagttattagtcactataaagcaatggctaagagcacaggctgaggaggctggcttcctaggttggaatcccagcttcacctttcacttgctgcatggcctctggaaaattacttcacttctctgtgctgccgtcttttttattacaaaataatcagccgggtgtggtggctcacgcctgtaatcctatcactttggaaggacaaggtgggcggatcacttgagatcaggagttcaagaccagcctggctaatatggtgaaaccctgtctctactaaaaaaaaaaatacagtaattagcctggcatggcggcaggtgcctgtaatcccagctactcggaaggctgaggcaggagaattgcttgaacacaggaggcagaggttgcagtgagccgagatcacaccattgtactccagcctgggcaacagagtgagactctgtctcaaaaaatacaataaaataaatataaatataataataataatgcctacctcttagagtttttgtgagggtagaacaaggtagcacatgcaaagctcatagaacagcacctggcatataataagctatcaatgtaggctagttctcagaacacactaccccacatactaccctggggtggg

SEQ ID NO: 986 - DNA, 4001 bp, Homo sapiens
attcccatttctctgatgagcaaacaggctttcaagtgatttgataatctcaccagcaggtataaggctggcatttgaatcctacccagttgctagcctgtccaatgggagaatacggaaggagacctatgcccagctccctggacagacctttagagatggaaggaagggtccttctcagtacatcctccaagccctggagttcagagccaatagctccgaatggaaggctgcctgtgcctggaacagcgattgccagggccagagggccccttccccagccaggcctgagatgccaaagacagacccttcttctcttatgggaagaggaggaggataggagacccctctcctcttatcggaaagccaagcagacagtattgtcggccagactgcagacaggaagcaatgacagtttcccagctggggaatctgggctaggcaggaatgcactggccagtcttgcagagtctggaccccagttctagccagagattgtggtctcagtccattcaatgtccagtctccagcccaacattatcttctcctgggggcttttaaggctgagtttgttagggctcaataaaccatgagactcagggagtggggagaagagggatgaaaggaggcattttataaaagcttgtgagcagtctgttgtagttgtggttatccaacccagcaagctggaccttacagagctggagcaagacggcagacactggccccagggggtaggggcagatccatccattttcaaaaacgtgatctcatttaattcaagaaataaaaaggcagtgggttggttagagtttttcttttcatatgttgagggaggggagcatatttcctacttccttggtaaaaatacttatgctaggagacagactagccaggagtggttaaaatctctggttgaaatcccggtttcaccacttactcgccaagccaccttaggcaaatcacttagcatttctgcacctcggtttcctcatctgcgagatgaggataagactgccttacacaatacgctgtattgtgctgagaattaaatgagatcgcataaaacacagacagttattatgtcacctagaaaacaatgtgcctcaccagtgacagcatcgaggtggcccccacggtagccagcgcccgcccccatcctgggatctagataactgggccttcctggcgtacgtaagacgctctgcaaacacagcttccagcccacctgccagtaccagctgcccgcccggcccccgtcccgcatacgcattccgcggcagcctggacctgggcgccccgtcccagggcggcgggggaggggcggccactcacctccgcttatactcgtcgcgctcgcgcttcaccttggccagcacgttgtagagcgcgcggatctccggcgtgatggtgtcgatctgcacgcccacgccgtcggggtgcacccacgacacgccggggccctgcacggtctccacgccgccgccgcccgtgcgccgcacctgcgtgtagctccagatggtcccgggcaggcggccgtagtgctgcgggtgcgagccgccgccggggggcaggccgcccagggccacggcattggcgttggcgccggccgccgcgccactgctgaggccgtgcccgccgccgggcgccgggggccgcagcaactcgggcccggtctgcacggcctgctcgcgggagaaggtcttgtagcgcagccgccgctcgcgctcgctctgctgctgctccagctgcttctccagcagccggttgcgccgctccagctcgtgcaccttagccaggaagcagcggaagcgcacgttgagccccttcaagaggtggatgttggagcccaggtcgtcccgcagcgccgccgtcaccggcgacggacccggccctgccccgccgccgccgccgcccccgccagggcagcccccgccgccgccgcccggcgggcagccgaaggccaaggccatctccccgaacagcagcgagttcaccatgcgccggctgcgcggctcagggccccgggcccgcggctccaggtgcggctccagctccgggcagggctcccggcgcggccgggccagggtgggcgcgggctccagcgcggccggccgggcggttccagatgcgcgccagatgcggcctccgcagagacggcaggacggatggccccggatgcgggcgccgaggcgagagagggcactcggccgctcctcgggacgcggtggaggccgcggtatctgcgcggggccagaagggtcgcgggtctcaccgcccgggctgtcagagacgctgtggaggggccgcggcagccgcacgcagaggactctcggccggcactgccccttctgcggcgggccccgcccactgcagacactggccccgcccccgccgcggccccgcccacccctcctccctctgcggcgttccccgagcccgaggctccgccccacgaggcccgcagcgccgggccccacccacagaccctcggctccgcccacctccgggttctcccgctttctccgcagcatagactccgcccagctccccggcggggccacgccctctcctgcgtctggtcctgcctccccgccgggtgccgattctctgctgggggacccggaccgcagagctgcaccagggaccgggttagctggaaccgccgcagagccagccgggcctcttaaaggggccagcagcctcggcaacgctcgctttccactttttagggcgctcctctcccacgtcgcctgccgagagggctccgtttctctgtcctctctgcccgcaatgcccctggccccaaattccttcggatgtgcgcgaccgcggctggaagggctgggggaccacagtatccgaaggtgcatcggcaccccacccccactctagcctggggaggcccagatcgacctttcggggataagagggcgcccgtgccccacgctgcggacccgggggtgggctcctcgaatgctagctgcgggccttgtcctctcgagatcggcccgggcacagctaagcccgctggttcccccgcccactgaggagccgagcagcatgggggttggggaggccgagcaagaccctcccgggatgacacccacaaactcggcctgggcctcgcctctgctgagctgctcagcacctccccaccacccacacccacacgctgagatgaagctgaccccgagagctggggattcatttcacagacatggggcttagcgggccgcctggggcagaccgaggcaacccgaggacccattcattcattcattcattcattcaaatgttttcacacctaccacgttaaaggccaagttctccagtctctggtgtctcctgaaccgtgttgcaaacattagtatatgtcaggcgccatacttatttattatccccattttacagagaaggtcactgagacgttaagtagccacaatggtccaaagtgcatgctctaaccggccttccacaatgctggcctcgggcctcgtgtccatttccgcatttggtcctcaccgcaaacctcagaggggaggtgacccccaccttgaacccccacctttgaacgcctgtggcttgcattgtatgcacttaaccagatatgtggcatgtttcagatacttccgactgcattttttactagcagtttaatttttgtcttgttattaacttttgtgtttgttttgtctctttgtatgtaagcttgaggacaggcacactgtcttacatggacaatgccttggtgttcttggtgacaaaggagacacgggcttgccctggagtgatgtggctgtgatgttagtctgctgtgtttttgatttagccacaaaagcaaaccttccccatagttccttccctcaaccacagttccttgcttcctgccaacacggactcaccttaaacacccagctctgaaactcactcatctagaaacctttctctgcttaacccaacccagtctggacactgccctttactcttcgttctctcgt

SEQ ID NO: 987 - DNA, 4001 bp, Homo sapiens
aagacagcagattgttaattaccagcatatacctaaaaggtctgacctgttaagtgacaactttcatcaaatttgatttaagaaatctacatatatattgttaacaaaaggtgaaaaaaattgttaaaaattatcttgcaaggaataactaaagaaagccagtttatctatgtttgtgtaattttaaatataccttaagcccaaaagtaacttcagataccacatgataaaagtttcaactcctagaaaattatgttttagttatgaatttatctaatttatctaatgatattatttattattttatagtgcttcatggtactataattagtatatatttctcttcatatacacacatgtacagacatcactacacacatatatgtgtgtacctgtttgtatacatgattatatatacatatatttgtgtgtgaatgtatattatatatacacataacatgtatgtgattgtgagagcactacaaagaaaaaaaatttttttttttttttgagacagagccttgctctgtcacccaggctggagtgtagtggcacagtctcggctcactgcaacctctgcctcctggttcaagcgattctcctgcctcagtctcctgagtagctgggattacaggcacacatgaccatacccggctaattattgtatttttaatagagacagggtttcgccatgctggccaggctggtctggaactcctgacgtcaagtgatccgctcgccttggtctcccccaaagtactgggattacaggcatgaacctctgtgcccggccaaaaaagcaaactttataataggagatttcagtttatgcttcaattactaaatgaacaaggtgaaaaaatctgtaatgatataataaatttgaacaacgtaattaacaacatttatctaataaaattctgaaaacaacatttaagaatctcacattccatttaagcacacatgaaatattgtaccaggctatagaaaacatcttttaaaaatttgaaaagtaaacaatagtaaccttttcctaactgccttcccctccactcccctataccttgccacaaggaaaaaaaaaatcattaactttcaggagggcagagagtaattccaaaatgattgaaattctgccgctagcacccggtgcagaatggagctaaagtaaaggatcaatatacttatgaaaatattaagacaccatgtgcttgagtaactgtgtttgtgaaactgaaaaaaattttctactctgtgtacatttgttcttatgttttgtaaaattgggatgatgtcatataatacatctctatgctcagatatgttttttacttaatattctttcatgatacttttttcatgtcactatcttgagaacccaccacagctaccgagtttccaacacttcttccagccaaaataacagaagccctcttctaagtaccaacttatgccagtatacactcggataattaattttaaaatctgcaacggtcaaaatgcattttctcttgttcagtcctcagttgtggtggaatagaagatgcctgttatcttcctaagtaaatgaaggattcatatcaagcaactcagttttcacttttctgaatactcagccctactcccatcatcccatgaccctgaataaccaatactgattgtccccttgtgattctggggacttcaaggaaggaacaagatcatatttacaaaatcaggaacagtactcacctcactggaaattttttcaacagtagtccagatcttgagatcttcagaaatgcaggaatcaatgcttatttgtgtgaggggggagataaatcagtaaagttcccagaaacggaaccgcaggatgttgtaatctccagaaacgctaagaaaatgaagtatctgcaaagataacaaggaaaaaaggccttggttgagtcacttagttagctgactagtgctggcttgctcctattctgctattgccccagagaaaatggagtaggaaacaatgtggagactcctcccaccagtgtttttagctttcgtttctgttagtcagagaaaatgaacagtttcctggcaagggctggagcatgtggtgaggggaaatgggggatgagaaattactttaatgggtacagttaacatttttcgggtgatgtgcacactgaaatctctgacttcaccaatatggcatatatccatgtaacgaaattacacttgtatctcataaatgtatataaacacaaataagttttttttcttacaaaattcgatagctgaaaggagttccaacattagaactttcttacccagcagacttacatgtgagtcattagagacttatattcccttaaatgatgctcaaatataagagaagcaacatggcttcttctcccctcctttcctgtgcacagagtggcagtggcaggaggagatcttggtaggagcatctattgctaccaatactttactgcatctcctggttggggaaatgtctgctatgaaatcgctatttgtttaaatactacctgaagtattcatccaattattaataactgacaagcctgggctttccagatcagaaagtcattatgaatatgtaaatccttccttaaatttatatgaaggagtttaacactagctgtcctcttgaccatgactaggttactttacctcaatgattagattcacgaatgctcagattttctgcattattcctggataaacaaacgtggatagtggactctcaacatgacagcatcgaagacttgaaaatcctggaaaatgcactgaacttccggtagtgtgaggagtctgtttaatcctctgctcagcagtgtatttttctctgttaaggacagtgggtgccctttagcgtgctgtaaccccaggatgtcaaataaatggcatcaactagcagatgatgtggtgttaacccagcagcagatctgcaagcaggatgtggtcatgagtggaaaaggggccccatagactgttaatatgtactgtccaaggccatctacagagcaaaagaaagctgattgttttaatccaaactagggccatgaagtgaatagctgaattctggatttgaaaccatatgaataactttatcaaaaaaggagtaagtcaagaaaaagcaaagaggatctggaatgatggccataaacatctctgggtgttcgtgataatcttttactggctttagggtactctttacgtggatacattgagttggccttaaggcagtaggtagagaaggatattaaggcagtcactgggaaccccaatccagaggtcaaagggtagagaacccttggaagttatgacccttcagaacattttctgccttttacttataatcattttatatgcagtaatgtcctcaattgggactccagcatacaacacacaaactgcggtcacctataagggcaactcaggacaatgctccataattcataccacaaagatgaaattttcatagatgaagcaaagaaatgcttaaaaatgtgcattttcccccactttgtggcagtggccaacaattgcaatttgtgctatcatacagaaaagtcattagtagaatatacaaaaattcctgataaagcaaaaaatgtgcgaatatatatacatatatataaattatgtagctacattattacagtgactaaatttatattaatcaggcattattctgaataaaatctctcaattatgtacctatttttgaacaatgagtgttccatttctctctttatgacaaaaagcagcttactattttacctttctggcctcattttccatactgttccacatataccaaagttttagctgtgcagaaacatttatgtcacttcacactttagagtatttgtaggtgacatttctcctgtcagtattgcaaatgtctttaccttgctaagaacaaaaagacctattgcacactggtttttcatgatgcaatagactgtggcatatgcattgttcacttgttttgcaaatca

SEQ ID NO: 988 - DNA, 4001 bp, Homo sapiens
ctacataatcccgcttatatgaggaatctaaaatagtcgaattcataaaagcagagttagaatggtggtttgccagggactgttggaaggaggaaaggaggatacatttgtcaaagggcataaagttttacttatgcaagataattaagtcccagagatctactgtacagcatagtacctacagcaacaataccatatggcaggggtccccaactcccgggaccacggagccgtggctctttgtggccagttcggatccaggccacagagcaggacgtgagaggcaggcgagtgaagcttcatctgtatttacagctgctccccattgctcatattacagcctgaactctgcttcctgtcagatcggtggcggaattagattctcataggagcgcaaaccatattatgaattgtgcatgagggatctaggctgcatgctccttatgataatctaatgcttgatgattcactgtctcccatcaccccaagatgggaccgtttagttgcaggaaaacaagctccgggttcccgctgattctacattacaatgagttgtgtaattatttcattgtatattacaacatagtagcaatataaataaagtgcacaataaatgtaatgcgcttgaaatcatccccccaccaccagtctgtggaaaaattgtcttccacgaaactggtccctggtgccaaaaaggttggtgaccactgctggtacatggtaagtcgtcacttaacatcaccatggattcttggaaactgtaattttaagcaaaacaacatacagcatgtccctgaataatgtctttcttctataatgatgagggaaataaactggtttcgttgtaagttttttcacttaagtcacattttccaagaacctatagtccacattaacagaagatttactgtacttaaaatgtgctaagaggataaatcttacgttaagggttcttatcataaatatacattttattgaccatggttgtctcttagcaaacaatctgtatccaggtttcagtctgaatcatccaaattattgacaagtgaaaagttcatttttccttaaagagatgaattggttcaaacctaccaaacatgcaagggagaactctctacaggattatctaattaaacctaccttcgcatcgaaaaacttcataatcctgaatagagatagtacaattttgagcaagtccaagattttccattgtctttaagtccataatcacttttctatttcttccatctatctggaaattagttggggagttatattttgtaacatcacaacaaaacagtgtttctggtgtacatagtcctagtttccattctgaaattttagtatcttgaagtgcaaaaaggatgatggaagcatactttccttcctggtaactctcttctgcatatgctccaataatatgatcttcactataaatcactgttagagtaggcccttgattacaacatctgtcaagcaaaactccattacggaatccatggacactacccttatagagaaggctaagccgcttccctccaaaatgattttgcaggatcttttcgtgcaaccatgtcaaacgagttgtcactgccatacttcttgatctagtggcaaatcatatatattttccattaaatattaaaaaacagataatatgtagttataaaatttgcatttatgcctcttatatactctacataatacaaaaaatgacaaaacaaaggatgaacagaaagcaaaaaaatcattagctaattttttactataaattattgttttttaaattaaaacaaaaactgagattggcaagtgacactgtcacctgagagagacagagagagactaatgctagctaggaaaaatgaaaagcagaaagacatttacctgttgtactgtctgtagtatcagctagagctgagggtagctgctctgtctggatagctaggcaggcacaaaatgggagaaggaaattattcagcagccttgaagcttcaaagactcagagaaaggaaactgaaactcagtgtgcccagcccacttgacagcatgccaacttctctcaacaaaggagcataagctgatccagcttttagacagtaaatttatattaaaaaaattgaaagaatcaaggaattgaagtcagagggaagaaaacataacagctcactaacttttaaaaaatctttttatttaaggaaaatgcaaccaatttctgtatatggacatacaaaaagtattgcacattctacctctagaatatgtatctcaaattcatttacatctcttaatccctgctatcaattaattctactgtagtatagttccttatgtagaatgttattttagcctccaaatttgttcctctgcttttctgcttgccccctctcttctgaccacaggaaaatgaggagacttcatttataagatataaaacaacctgtgtcaatttcacaataaaaccccttctctaacttcacattgctaaggatcataaattcgtgtcctataggcagaattcaatccgcacatttgttctgtagggccaatgtaatgtctttatagtttttaattgttgaacgtgaatgcttttatatcattgggcatccactctccagtcctcctttgtcccctcttgctttatacctgactggttctaaaaaatttaaattacctgcctgccctaaaaaggtttttttaatttgctggccctattaaaaacaatagcatcatcaaataaaaatattttaagcagcttatgaggtattatatacttggctttaaaaattatattattatagacattatttgcaagacaatttacatgtatctcgtgtgtttattttaataactttatgatgaggacaccaatattattgccacttttcaagtaaataaacagagttttggagtattaagtgagaaaaagaggaggaataggagtgatgtgggaagaaatctcctactttagacagcataatcaggaaaggtctatctaatgagatgtcattggagaagtgtcctgaatggagtgagagggagtaccatggaaatatctaggaaaagtgctttataagcagagagaatggcaaggataatcacccctgtggcagctttttgaagtaaggagttcagtatggttagtgcagagtaaagtttggaggaggatagcagtgaacagtagaatggagggaccaggtggagataattgaatcatggggcagttcgcatcatagtgagttagttcttataagatgtgatggttttataaagggcttcccctttctctgggcactcatttccctctcctgctgccacgtgaagaaggacatgtttgcttccctttctgacatgattgtaagcttcctgaggcctcctcagccctgtggaactgtgagtcaattaaacctctttcctttatacattacccagtctcaggcagttctttatagcagtgtgagaacagactaatacagtaaatcggtacagagggagtggggcactgctataaggatacccaaaaatgtggaagcaactttggaacgtaaccaacagaggctggaacagtttagaggactcagaagaagacaaaattgtgggaaagtttggaacttcctagagacttgttgagtggctttgaacaaaatgctgatagtaatatggacaataaagtttaggctgaggaggtctcagatggagatgagaaacttgttgggaactggagcaaaagtgactcttgctgtgctttagcagagactggcagcattttgcccctgccctagagatttgtggaactttaaacctgagagagatgattttatgtatctggcagaagaaatttctaagcagcaaagcattcaagagaaagcagagcatgaaagttcaaaaattcacaggctggcaatgggatagaaaagaaaaccctattttctggggagaaattcaagctagcagcagaagtttgcatacataacaagaaattgaatgttaatcaccaagac

SEQ ID NO: 989 - DNA, 4001 bp, Homo sapiens
ggtttatcacagcaacctttctattgtgaatttctattaacaatagaaaagatatggaatcaacctaactgtccataagtggatggataaagaaaatgtggtatattacacaatggaatactatttagctataaaaacagtaaaatcatgtcatttgcagcaacatggacggaactggagaatattaagtgaaataacctaggcacaggaaatatcacacgttctcactcatcattttagatcagctaaaaatgttgatcttataaatgtggatagtataatgataaatactggaggctaggaagggtgggtgggtgtctaggagggagagatgaagagatgtaggttaatgagtacaaatatacagttaaatagaaggtagaagttctattagtcaacaacaaagtagagtgactatggccaaaagcaatgtattgtctatttcaaagtagctagaagacttgggttgttcccagcacatggaaataataaatactcaaagcgatggaaaccacaaataccctgacttgatcattacacattctaagtgcatcaccaaatatcacctgtaccccataaatatgtaatgtattatgtatcaataaaaataaaattaatataagtatattaattttttaagttattgtgtaaaaccatttttgctggtatataaaaacagaagtaattttaacaaattatactagagatcatatttagataaatatatacacacatacagaaaaccataaaaacaattatgacaataatttataccaaagtctagataatgttgccttctggaaataaaaagaaaggtaaagaatataggagaggctaggtgtggtggctcacacctgtaatcccagcactttgggaggctgaggctggcagatcacttgcggtcaggagttcaagaccagcctggccaacatggtgaaacctcgtctctactaaaaatacaaaaattagccaggcatgctggtgcacgcctgtaatcccaggtacttgggaggctgaggcacaagaatcccttgaacccaggaggctgaggttgcagtgagccgacatcgagacactgctctccagcctgggcaatagagtgagactccatctcataagaaaacaatatatagtagagagtcatagatttcttcaactttatttgtaatgcttttgtatttaagtaaaagaaaactattctaatttaaaaagcaaatcatttttaaaattggataaaactatatcagattacagtatggttcatttatactctctagttatctgtgtgtgaaattttcattaaaataaaagacaaatgaaagagcaaagtattagcagcaattccactctgaaactcctttttagaaaaaaagaaagcaagcttttttcttcacacacagctagcaaaattggatggcaagaagtcacttacctgtgatgttctcactcacacgtggaagcttaaaataaaagttgatttcatggaggcagagagtagcatggtggttaccagaggttgggaaagtcagaggaaggagatgatgaaaagaggttggttaatggttacaaaaatacagctacatagaaggaataagttcttgtgttcatagcacaacagtttaactatagttaacaataatttattgtctattttgaaatagctagaagagaaaatttggaatgttccaaatacaaagaaatgataaatggttgaggtgatggatttcccaatgatcctgatttggtcattacattgtatgcttgtatcaaaatatcacacataaccccataaatacgtacaaatactatgtttcaattaaaaagtcgcttacctgtttctaggggttagatcaggcttaaattgaggattaactgttctgtctgatttatcgagcagccacggtttggagacagaaagttcttaagagatctgtggcttcagagactctaggaaagaaagaaaactgagactcaaagcagcaaaaaaactcagctggcagcatgccaactgccactaactttctttttcctcactaggaagagaaagaaagaaacctgaaactcaaagcagcaaaaaaactcagctggcagcatgccaactgccactaactttctttttcctcactaggaagagaaagaaagaaaaaaaaaatcttgctgagcacataaaaactatcactggtccccttgtatgtatgtaggcaggcatgaaatgataactaccaagaagaaactgcagtaaagctaatagttaacatttcttgtgcatttttctacttccctcgtttgtcctacatttattaattggaatttagagttgtacgtggcattgtgtaactgcataccttttcctaatttctcctcagaacaactgcgtacagtaaacactatgactatccctatttcttaaagtacaaaaaaaaaatttagctgatagaatcgtggagctggatgctgttcaaagccaagcctgtctgcactggaacaaacagatgatgattcggcttttgctgaattcataaggcattacactgttcatttgctcatttactccttcactcagtccacactggcatagaccctggggaaggataacggtgggtaagatttaaaacataaaaattaaaatgaaaaaaatgccctcaaagagagtgctgtatactcaagaagacagtcagacacagacaactgaattactgggctaaggactaaacaagattctctgaaagccaggagaacagtagcctcatccagtcttggggcacttgtaaaaggcttgctagcaaatcaaagtttaaactgagacatgaaatgaaagcaaggaagtcaggagaacacggtgtcatcagggccatccaagtatttcggtctgtctggaatggagtgacagcattggattcataagcggtggggctagggaggtgacgagggtgcaagagggccttgcaagtttttaattaagttggattttatcattaagacaatgagaagttattaaggctctaaaagcagaggaatggcatatcaaaattgaatgtcttagaaaaaaagggtgtatcagttttatcttactttgtaacaagttatcactatccacaggctttaaaacaattcaaatatattattgcacagtttccatggattaggagattagcatgactcagctggattctctgctcagggtctgtcactcaaggtgttagccagctatcgtgtcatatcagtctccaataaaaggaaacaaggctacttggagaaatgtttgactacaggtctgggatcacaaaactacaaaatgaacgtagaatatcttctcatgccagaaagtaagaagatgctcaaaaacaaatggggcgtatcagaaggcagagaaatgaccaaaagccgaacaatttgagagaaaaaaacaataagagtattggattatcaccatagaataaagtaaatatctatactgatataaataaataactgagtaagtaaataaatgagtgagaattcacaattctaaattccaattaataaatgtaggaaaaattagtgaagtagaaaatcagtattaggtaaactctatagtaataaatgtttataggcatcatccagcaatgtatgctaaaattaatgagtataaatttggagagaaatagaatatttatatagcctcaaagactctcccctggtatatttattaatttcaaaagaaaaaaacagtaactttaaagtagataaatcctacagataccacctcaaataaacgatcaaagttaacattgccaggatgggcatattgatgccaggtaccccagttatcattcacagagaagagtgcatcgcttgtgtggtatttttgcataactttcatctaatcatgagaaaacatcagacagactcaaactgaaggacatattataaaataacttcccagaattcttcaagtgtcaagatcctgaaagacaaggaaagactaaggaactgtcacagactggaggagactaaagaaa

SEQ ID NO: 990 - DNA, 4001 bp, Homo sapiens
ctagagcagctcacagaactcagggaaacactttacttacatatactggtttctttctttaaaaaaaaaaaattgatcttgttgttgttttgagacagggtctcactctattgctcaggctggagtgcagtggccccatctcagctcactgagaccttcgcctcccaggctcaagtgatcctcccacctcagcctccagcatagctgggactacaggtatgcaccaccacgcccaactaatttttttttttttttttgagatggggtttcaccatgttgcccaggctgatcttgaactcctgaactcacgcaatctgcctgcctcagcctcccaaagtgctgagattacaggcatcagccaccatacccagctacatttactggttccttatggatattacaaatgctccggatgaagagatgcatagggcaaggtatgggagaaagggcatggagtttccattcctctccagaagcaccacccactggagacctccttgtattcggctatctggaagcttgtcaaaccctgtccttttgtgtttttatggaggcttcattacataggcatgactgattaaatcactgcccattggtaatcagcttaaccttcagcccctctcccctccccagaggaaatgccagccatcagtcaacttattagacagttatcactcaaaagatatttatcactttgaagattccaaggattttaggagttgtatgccaggaactgggggatgaaaaaatatattttacaatatcacaagggataaaggtcacacagcaaattgtgcaacatgggtacacattcaagacagtcagaattcatgaacctatgctctttcctttataccacaaaactggaaaatgcatatgccctcagactcacctctaatatgatctttgtcagatcaatgctattttcttaagttaaaaagaaaaacaagaaactcctctcatgtattgagtacttagcactttatggcacgcagtccacttgtacctataacaacaccacgaagtaggtaccattgttatcaaccacatgttatagataaggaaactgaagctcagagaggttaagtaatattcccaaggctgcctagccaggtcatggcaaagtcagggtttaaacccacaattggctaatacccaagcccacatttttttttttttttttttgagatggagtctttctctgtcgcccaggctggagtgcagtggcgcaatctcatctcactgcaagctccacctcccaggttcatgccattctcctgcctgcctcagcctcccgagtagctgagactacaggcgcccaccaccaagcccggctaattttttttgtatttttagtagagacagggtttcactgtgttagccaggatggtctcgatctcctgacctcgtgatccgtgggtctcggcctcccaaagtgctgggattacaggcgtgaaccaccacgcccggccaccaagcccacatttttaacaaccactccagatggcttcatctatccttaaagatgaactcactgtcacattggatcctataataaaggggattctaaaatcatccagtcctttgagcagcaaaggcaacttaactttccttttacagaggaagtaattaaggctccaagaggtgacagtgttaaggccacagatcgctgatattgcacctgtaagctgggtctcatgccacttggggttttgcatcccatctccctaaaaatctccaacccatcctcttagacaagtcccagcccagagcactaaaagggacccaggagtgctgcctcccaggagaaggggcctcctggctctcagaacatgagatttacaggcagacaggcagcctggcagagggtggcagcttgatgcccacacttcatagctcctgagtttaccttggaggagagaagagaagcaatcttcagcccggagcctgctgatagatgggcacagcagcgagtaaacggttctccggctgaaggctggctttttatcatcacttgtggatcctcccacgtctcaccctaggcagccaatccctgtcggagtttctatttctgcactctgcagtttcattttcccctctctcccagctcctgcactctgcagagtttcattttcccctctctcccagctccgcccagcgggaacatttgtgtgctgcctgctggcagaaaaatgcacttcaagctgaggacttttggagccgctaagggtattcaaagcatgtcacactatgatgagagccacggccatactgggcttagtgaagcctgatcaccagctccccctggggcacacaggcctttcaccattcagtccaattagtaaacaacacctatcatttattgagcacttgctgcatgccagggtctgtgcaaagtgctctatttacatgatctttttccaatcccacagtagtcatgtgacataccatatgctgtttataaacccccagaactttggaaattaagtcactttgttccattgttctctcaggctggctgcttctgggtcatgggcatatggtaagaccagtgaagcctgtgttcatgtggccatcatgatagatcttgagtttcaagatgggtcccctggccctaggtaatgaactgagcattctttaaagcctttggatggtgatgcttgaagtgctatgggtcagaaatgcaacctctatttggagaacatagaaattccagtaaggatgaatcattgccttctcccaagtggaaggggtctgaaataattgacctgccaccagatggctggctattctcattgagaaattttgccatattgctacctgctgctggcagattggctatattttggcaattgccagatcagttttggtgagagggagcccaagttgttggactcatttctaacccccatccttaccaccttggacactcataggtctattgcaaggcaatagtgaggctaagtttagaggctggctgacatccacaggatgggacatcctggccattgggctgtagagcctcctctgcagcagatgatctctggtcagcattaacatgagacatagagatccaggtgctttatgcccattcagagttcattcttatgcccctaacccacacctgcttattcccaatcttccaatcttgttccatccatgcctttgaccaaccagccaagccatttgcctcttattaggaattggtgtatgtctgtacttcagtccatctctctctctctctctctgcatacagagggaacaacacggtatactgctcctagttctgccccctgggaggattcactattattcagtgccacccccaaatggggctgtaatagagtggtccgtttccagctgataccaaaatattatactgacttatctgtgaattgagtttgactcctttcctccattatctgttggttgctgggaacactccatgaggccatatatatgggtcaaagagaaaacccagagaaacagagttgggcgccacaggactctgagctccctgtttatttaatttactcaagccttttagacccctttgctcagccttgaatataccatttccatcatatattttttgttttgttttgttctttgttttttgttgtttttgtttttgtttttgagacagtcttgcactgttccccaggctggagtgcagtggtgtgatcttggtttactgcaacctctgcctcctgggttcaagcgattctcctgcctcagcctcccaagtagctgggattacaggtgcgcgccaccatgcccggctaatgttttttgtatttttagtagagatggggttttgccatgttggccaggctggtcttgaactcctgacctcaggtgatccacccacctctacctcccaaagtgctgagattacaggtgtgagctgctgtgcctggcctctttgttgttttgtcggttggttggttggtttgttagagacagggtctcactctgttgccggggctggagtgcagtgg

SEQ ID NO: 991 - DNA, 4001 bp, Homo sapiens
tcttctaggttctcatggggtctattgagctttatgattccaactattccatctattgaccactacgagtcaaacaagatctgttgaccacggtgtgccaggggtttcaaagaagaacacaacttcattcctgccctataggagctcatggtcccatggagaattcagggtcctgaagtgtcccatgtgccatgatggaaatccatacgggttgcaaaatggcatcagggagggagggtccagttctgtggatggctgtccccagcctcggctgcctacccatcaccttctagacccaaaagtgggtgcctgcttccacctcatcctgtgtcctctagctgggactgtatcaccacgaggctagtgctattactactcccagcttctggacttcctaacgggtgaccagcaggagaccaggctgtctgcaagccacttgtaaggtatcctatgggcaggacagtccccagattcgagctaggtcacatgagaaaaacagcagttagagcaactttcctctatgaagccttcaaaggatgccaggcactagtttggctctttacatgtaaaacctcaatcacccttgggacagaccaccctatggggtaggtgtcattcattctgcttccatggaaagggcgctaggctcagagacagatgctaactaacttgcctgaggctacacagtcagtttgtgtgggagccagtatttgaacttagatctggctgtacttactcctaaatcatcacaccatagttagtgttgtgtatattaaatacttatcaggtgaaagtacaagaaggtctgggtttgacagtgaaaggggaacagaagaccccaccctccctccacacacaggtacacggtccctcatcagccacagagaacgctgctgtgggcactgggggctggagcatccctggctggcctagtgacccagtggatggacagcctgtcccacgtgcctaccctggaggcaaaagctagccaggcttgctttagcccctcttctctcttctgtgtgcctcacctctgccatccttcttgaggaattccctgaattgctctgagcctcagttttcccatcggaaaagtaaaaataatatctacctccgaggatggctgggtcgtgaggcttccagaataatgcggtgcctggcacaaagaagttgctgaataaatataggcttttatgatgattggattatgcccagggacctttacagctctttaaactgtgagtccaagactaggaaaatatcctgggggcgatttctggaccttctcttccctgcttcggttggagtcgtgggcggtgaggtttggtggttgggtcctacggcgaggaattttgtacctgacaccttactcatcagtagaggtgggaaaacaacaacaacaacaacaacaacaaaacaacaacaaaacaacaaccaccaccaaaagaaagccgtcttgttagaaagcagggcacaggcgaccagagctccgtcccaccagaggcctggcaggaacgggaagggacatcaatcggtcccactttccctgctgtccacactttagggtcaagtgtggttttcacgcagggatcagtgctttctttaggaaacattaaaaagcactttattaaaaaatatgcagtatcaaactgccgctgtcttttttctccagttctcctgaagctggaagcattaggaaactggattcgtttcctgcgggagaggaatatcaaagacccggttctgttcagtcctgggaagaagcaaactgggggcgcgtaggcagggccgattcgcacccggctcgggtggctgcggaccccgtgcctgtcccaggagctccgggtccgagggtaggcgcggcccggcccggggagccctcttccccctccctcccgcggccccgcgcccttacctggagcggcctgcagcaggcacaggagcagggggccccagcgctcgggccccgccatggccttcctgccgcggcgtccccgcccgggcccaggtccccgcctcccgcctcccgcctcccgtctcctagcccaccgcgggcaggtgacgcagtcggcagccaatggcccgcagagccgcgggcccgtccctgccgcctaggattcactgagaaggtccctggggacagccccgccgcggggggaggggggggggggagcgcgccggtccccgcgctcgaaactcgcccgtacctctgcttcatctgcacttagttttgttttactcaattcccggaaaaaaaaatcagtaaatccgtgcacgggggaagggcaggggaggggaagaaaccggctgatgatcaataacccacggccagtccagtgctccaggacgggccattttggcaggattagggagagttcaaggccggtttggctacgcggcctcaatgccattggcgggatccgagcgcgtttctgagccggatgctgagctccgcgccttacacacgcgattccctttaatgcccccggggatcccggcggatccgtgctgcccttctccacgtacttctctcccggggagcggcaggccccagagcttcaggtgcttgttctggggaaagctgtctttctgaccccgaaggctgtggtgttcacctggacagcagtagcttcccagtaaggcacacgccacgacgcgcaatattatgcggccctttaggaggacgttgccgaatggtgtgtatcgacaccgaggtgtttgcaacacactgagaaacagaaaagcgagtgctaaaacataggcccattaaaaaagtgtgtgtgtagccgggcgcggtggctcacgcctgtaatcccagcactttgggagggtgaggcgggtggatcgcctgaggtcaggagttggagacaagcctggccaacatggtgaaaccccgtctctactaaaaatacagaaaatcagccgggcgtggtggcattcacctgtaatcccagctatcagggaggctgaggcaggagaatcgcttgaacccaggaggcggaggttgcagtgagccgagatcgcgccactgcactccagcctgggcgacagagtgaaactcagtttcaaaaaaaaaaaaaaaagtgtgtgtgtgtgtgtgtgtgtgtgtgtgtgagtctgtctgtatgcatagaaagatatttggaataataattaccaaaatattaatggttgttgtctttgggtgatgaggattttctttttcaactttcttcttttctgatcatatttcgtttccaattttttgataattatttgaaactgggatcagctttggtcccatcagtttttggaagagaaaatgattttcacagagcttggtgggtccaaaagttgctctgagtttaaccgcgggggaaatttcttttggaaatttcaggatgcttctgggactagcatcaaggcttctgcttaatcaggattttttttctttttttttttttagacaaaagctctgtcgcccaggctggaatgcaatagtgtgatcttggctcactgcaaccccgcctcctgggttcaagctattttctcacttcagcctcccaagtagttgggattacaggcacctgccatcatgctcagctaatttttgtagagatggggtttcaccatgttgggcaggctggtcttgaactcctgacctcaggtgacctcagcctcccaaagtgctgggattacaggcatgagccactgtgcctggccttaattaggatctcttaacaaagccctgctcacagaggacgcaattccacctcaaaggcgcagggtggaggaggatggaagagcagcaggcacggtcagtgttggtatcttgggatctctgaaatgttgactgttgactttcttttctccttccttccttcctttctctctctttctttctttctttctttctttctttctttctttctttctttctttccttccttccttccttccttccttccttccttccttcttttttctctctctttccttctttcttgctttcttattttctt

SEQ ID NO: 992 - DNA, 4001 bp, Homo sapiens
gaaaggattcaggctcctttcagcttgccccattggctttggaatgggaattctccaaggacattctttgggcctcctggctcttcccccaactctgagattttctggcaggacactgaagccctctacttcccacgctccaccaatctagaatccttccagtcacaaggtctgcaggggagaggcctcaaatttgctgctcttaagctcttcttggcccaggcctgtaggatccccataaatccatctgctcccctcagaagccagtgaattatagtgtcaggtgaataggagtattttccattctctcaccaccaccatctctcctgatttcctcttaattgcatccatctgttatggccaatggggagtcccacacaggagaggaagggggttgggtctggggtgggatgagagccataaatcagggaggggggatgtcttgaaagaatcttccagcagtcccaccctctgtgcgattggcccatggccaagcggttccattttggggactccattttctgcccaaagagccttatcattaatatagaatcacacatgacagagcaaattcctctctcccatggagatcattccatttcgcaacggccacccactggcacttctgacccctggcagcccctcgccagcccagccgctgcaccctagcgtgctggaatgccatggtacgccaactgcgttctggagtggtcacgggtgccacaggcactacgccgaagggagtcacgaggaagggtgggagggaaggcagccaccaacggatgaggacccagctggacacggccagggggagggctgcaagggcccccatcccacccacccctcagtgcagcctcctggtagatgcaagtgcactggtgccagtcggtgacccccacactggagtagtttgagttcaacacagctatctgagtcatcatccccatcgtcacccacatcatcaccacgagcagctatcatcctgttactcagctattggtcacacatgaagaaggatgacgctgataccactcttctccctccagcctcctgcctacagctcccagcagaggagggcaaaagaagcaaagctcttgggggaacttagggatgtgacgttaagcatccacttctggagctccactctcttttagaataagccagatttggtacaaagtcaatgacacagggaaagagatctgttggattggagactagagggatgtagtctcagttggaagggatgagaaaggaaatgaattctctcctccataattcattcccacatttgagaagaactccagttcttcccagaaggaaacagcagtttgtgtcctcacttcagctgtcccaacaacactctcagcactggatcctgggacagtccctccctgccccctctccaggacctatggctccccatcctttttccctaccctccccggatccatcctgcacatccaggtccctgctacctccagttggtccctgctacctctcaactggtagaaattgaggcaggaagagccaaatggagttctctcaactgctttgaccatgatactaaccaaaatataacaagtcccagcccgaggtccttattctggactgctagtgatatttttaatctggtcatcgtatcacacccaaagtcaagccgtgtccagaaaattagagccaggacagaaatgcccagacaggacacactgaaattctctcctccagatatcctggagtaacctagaggggatacaggtgcaccccagcgtgtgatccgccagccagggaatgttccccaggcagacatcctgcccactgcctgccccttcctgcgtagaaaagctggacagcaggctagtgtctccatcctggccctaccctggcccgggtgggcagccaggtgtgagcacccacttacctgggtgtacagctgacctcccgcttcctgtctgctccctcttccccgtttccagctgctgcttgctgaggctctggattgactggtagtggacaggcagggctggagcaggtgtcggttgctgcaggcgcctctgctccctctgcccctcccactcaccccgcctcctccttctcctccagtccaggcttggcagggcaaggcccccagggctaacattctagctcagaggaggtcagagatggaagggtcctgtgacatcagtccatccaactcctcgctttgcagagctttaagctcttaaccagactggcttagtgtaaatttgccccatgaagcctcatttatacgaccctttttagcaaggacattttcatcatccaaacccttaacttttcagctaagctggtcccttgggacctttgacaccataagtcacacagatacataagccactgccctcttgggaatcacacctccaagtggtatcaaacaggcagcaaactttgggagtgggagggaaggcagccattaacggagtcacagacacagagtccaccgagagtgaccaggaaggaggagaccctgggaactgtgtagtcagcaggcctgctggagaaggtgagcttgctcaggagcttttcaaggaacagaaggggtgacctgaccagcagggttgggggcgaagtcggcagggcagatggttgggtttttggtcggacagatggatggcaagtggaaattggaaatacaatggctggtaacagattttcttaaggagagtggagggcaggtgaggcccaggagataaggccacctggtgtgctttgaaagagccaccttctctctccttaaggacagagaactgctttgttgccacccataagcgaggcttgattgaggattcaggtgaagtagaagggaaatggggtgaatgtttgcatccaggggaggacactgaatatttacatgtgttgattagcatcttgccaatttctacaggcgctacctctggatgtgctccgagaggggaggtgtttgacctcttctgcgcaagtacgtgtatgtgtgtgcatgcatgcacacacacatacatttgtgtgtcctccctgtgtgtttctgagtgtcagggctggtctttcatttgttcaacaaacatgtgttgaacacctaccgtgggttgagccctggctctggcactgtgttaagccctaggaatacaaaggtaagcaagtgacagggccctcccatcatgaagttcacagtctaatggggcaggtagatgtaggggctccaaaggagacaatggagagtgtgaggggagggctggaccttggagagcaagggaaagagtggcagtgagagttgagtttggacaggtaggctttgggggccattgaagagttttgatctctattgtaaaggttactgaggtttgtttaagctggaggggtgacaggatccaatctgcattttagaagaactcattctggctgcagaaatggaagggattggaggaaggagaaagtgagaggcaggagtctacctcccaggagtgcagtcccaggagaacaccctagggtgttctttctcatggtggggccctgagctccaggggcctcctgagccacaatgctgcatcattccaggagggggaaggaggaggctgcatcattccaggagggggaaggaggaggctgtgaacatggcccaatgcagagcctttagcatttcacgtgcctctgttgcccccctagacagcccatgtgctcttccctggggcctggggatggcctgcagatccacgagtcaaggtgtgccctgctaactggcctccattttccatgatgttgttgttgtttcctaaacagagatgagatcttgccatgttgcccaggctggtctcaaactcctgggctcaagtgatcctcccatgccggcctcccaaagtgctggaatggcaagcatgagccactacactcaccccattttccatgttttaacagcagcccacattaggggacctactcctctctgcgctgtgtcatacatggatccctatcgttgcaataaaatggaaatt

SEQ ID NO: 993 - DNA, 4001 bp, Homo sapiens
ctcctcccaaagttgaggggggacattttgatccacttaggaaagtctcttgttccaagggtaggggaacaaagtacagggtttgcattccttctgggttacaccaacccctcccccctcgctgtcaggaccaccttccgggctcaaattctgcagcttctcccatcagcagacccagcactccccaaggacttcggggtagaaggagttggggttatttttaagggggcaccccttcctggcaggcactctcagagcctaggtaggcacctcctgctgggacaaggctatggcataggacagaggtgatgcccacctctatcatccagtggggctcggggtcgagaccttattgatcataaagacgactttttggcacctcgcgtcccgctcccctccgaggcggagccaggctctgactccagccaggctgaggttggcaccaggctccgaggaggatcccggacgcggagcctgtagtctcggtgcctgcggctcttcgctggtcccgcctccctccctcctggcttttagcctcacgttggctctctgctcactgcgcgaaagggttcagctccatttaagacccactacgcggcggcactgggtgggaggccggccgcggaccctggggctgcggagccacctctcactggctccggagaacccgctcggcttcaacctccttctagctgtcttagcctaacccgggagcaagtccacacggcgggacacacacacacacacacacacacacacactgagctgctcacaactccccagccccggaagcgtccatacctccctgcacacgataaccacacgctccatggcacgcatacacacactcccagccccatgaagcccacgactcccaggcacctgcacccccacccatcccacataagcagactcttgtccagtgtcacagtcccatctcctgtgcacacagaaatagtaatccgctgtcgtacacccctagagacctgcacactcgggacacacgtgaaacgccaaacctcacatacccaccccctaacacctcacacccacagtgacacaagctcacacacttcacaccctcacagggaaggtggcacatgttcacaccctccccccaacattcgctcacactctcacacacacaccttctccatgtaactgacacagacactctaacacccatccagaccctcgctcactcacacgcagaccccacaccatcacacacacacgcacacacacacttgcatctctaaatacactcccgcaccttctgcccacacagctccttcccggacaccctcacccagacacacaacaaagacacacaatttacacacacacacacaccctggcacaaatccatgagcgctctccaagaggcgtcctccctccctcatcgagccaaccagctccacagaccccgggcaggaccggtgctcgtagcccgagcctctcggagcgaccccggccagcgccctcccccggcaccccgtccccgcgcacgttcaccgctcggctcccgccaggcgcccgcgcactcaccgcgcgccaggtccaggatcgcggcgagcagcaggcagacgcagcggcggaggctcggggcggttcgcatggtgcccgggagctggcggcggtggcggggcggcgggggtggaggcggtggcggcgggtcccctcgccatgggctcagacgcgctcctgcctccggccactggccgaggcggtggcgggcagcgcggagagccgcgggggcgcccccatgccgccgcggccaggcagcccgggcgcccggctcgactcggctccggctctgcgaggcgcagcgaccctcgcgctctgggcgtcctcggggctcgccgcggttctcggctccctagctgcgcgcggtgcccaccgcggcccagagtccgatcggctgcagcgccggagtttggagccgaatcgcgctctctgcctcgcgctcgcctctcccggcggcgcgagcacccccctcctctcgccctccctccgtccctccccctctccccgcccccccgccctccttgccctcccctcgccgcgctctccgcgtattatacagacttttctttaatcctttctgggctgttcggctctcgtccgctaagccgatttattgcagggagaaggagagctcaccccctcctaacctcccctctcccctcactcaggtcccccctcactcaaaactggcttgctgcctccagcttcttaacccttacccaggtgacccaacaccccgccctggaagctatgctccatcggatccgcctttacctagcccctcctatccccgggattaccatcgccctccccgctactcagcctgatgaaaggaggcagcctccctcccgagagggaaagatgccatcctgggagcagggcaggcagggtgtggctctggagttctgaccttgccaacgatgaatgccctcattgggcaagattaaggggtttccatgttctgaaacttccccaattacggctgctccttcccccagggacccacggaaatggggtgtgttctgtctttttcccatgtgctaggatccagccaggaagggtgaggaactgattgtttcctcctggcagagaccaagtttccacctttttgccagacctgacagcttttcttcccaggtccgagaagaacaggtttgggacttgtatgttaccattactctcccaccaacacacacgcgagcacacacacacacacacacacacacacacacacaccattgagcctcagccctggcggtggactttgaggcctcctgcgaggatgaaggggaggggtactctagcccttggagtggactggggatgtggttagatgaggaagttcaggagatagaatttcaccattggtagggacccagaagattggcaaagcccagaaaaaccagcacgaccaggggcaaaacctgctcagaactcaggtgggtccctttacccaggccttctatggagaatctccagcttccctagctctggcaggttgctgagtcaggctgttgcatcgtttacctacatgggcaatgggtctatagccagttccatctccagcagccctctgagaggagtgtagggagtggggtgggcaatgggtggttgctgggctgcctctgggtgagctttgtgcagagatgtccatgaaagtgaactgctccctcctcctgccctctggaacctcaccccatcgcctcccaaggcagctctgcggctcagcttgctcacccaccccagaaggagcgatttgcatttatgaagatctgaaagcatacgttcacctgacaggctttagaatgatcctctcagtaaaataataataatgatcataataaacccttataaataggtgtttgattacagtttgtccctaagtgggattttttttttttttttttttttttttttttgtgaatcagactaattggttccaggttgattggactgcatatggcttgaacacttgatgaacactggagtcttaggtcctttcttctccctttggctgctgttctttgctccctctcactcgcatccacccaggtctccccttctccaggctgctgagggtcagcttgaggtcacctctccccctcaccttcttctcaggctgcagggcacagtcccttactgcctcctccctggccctccctccccactctgacccaagaaaaagtcaacaaacccaaaagtccatcccaggttctaaatcctctgtggaaggggctccctggctggggaacagcatcaggttcatgcggttccttgtgctggtctgagttgtgcagggaaatgccaagcatcgctgtgtgggcattcctactctctggccccagctgcaaatcggcgtgcagctaggcaggtggacagcatcagttcctcaggtgaaccctgaattggtggggcttcctggctgcgctccctgcagcccagcccttggagatgagggccagggagcaggtggg

SEQ ID NO: 994 - DNA, 4001 bp, Homo sapiens
cctcacatttttagccttcagaccactcaggtaggcaaagcatcccttcaacccccatcccacttactcccatttccacctcaaaaaaggcaccatcattatcacccaaaccaactttcgagacagaggggaatgatgttcccactcccaattaggaatcaatgcagcccaacaaagaagtgaaaacaccagagcatccatgtttgacatgctacaagacagcagcccaccagccatgtgaagtccctaaaccacagatgtgcagatgcaggacctcaccccaggggccaagacagacactttaagaacagcaaatgttccttcttatagataacaaatgatattccaccgttgctcttgggttagaaacgggcctcttcgtactctactccaacctgtgacacacaccgaccgcctcctggtgtcccccaaatcctagtgttgatgaaaaagaaccacgagaaattacaggaaccaagagcaggttaaactttcacatcgattgcactgataagcagagccacttacccagcacagccagacagctcagcaccgggaaaaagcacttcatgtcggcagcctccaggagacacaacacaaggcgcttcctcttctcccagctcctaatctctcatttctggcaatccacttatagctccagagaacagttttggaaatagaacttaactcggaaaatgggaacagattaaaaagaagagatcagaaggagggagttggggggaaggggaggagtggaggcaagtgtgaaaactcccctatgctacaggaagggtccacaacaattcggaagtcgctcccggctcctgccacatcgtgtgccttgcagtttccactgaaattgcagactgtagtggattaatcctccagaagcacggaaaaaagggtctgagaaaatcctttcatccactgattatacagaaatgtccttggcttctcagtgaaggtgtctgtgatctccctcattcggattccccagagagaacagggcaggtttcgtcaaaacctttgacggccaaatcaccctgcctggcatcaaccgtttgggtttcttcaccaaaaagtccgtttccatccatggtggtaggtcacggaggcgccacctgccccacgcctgcctagggcacacgaagcaagttggcgttcggcagccctgaagcggtaccccagcgcgagcagatttctaaaacaaacacaacagagatttttatcaaaggcaaagctgcaaaacccactggggctgagcgctgagctggtccggacacctgggtccggttcctggaccaggacagtcaacctctgcattctgaccttgggcaagtctctgtctttccctccgcctcagtttccctgcccagagcagggcaacagtgggaagcccgattgttcctgaaatacttccaccaaatgcttcactcctgggaattcccgtcacctcctaccgagcccgggcgccgcaggtagccccaccctccgccagggcaaatcgggaaggggctccgcggtggggccgcgactcccggcccccgccccaaccgtgggagctctgcgcgcgacgcgtcccaggtggccccgctattgttttaccttgcagggtgtttatatctcgctgattggaaagaaaagaaaccggggaagaagggagtccggagctccgctttcagctgccggagcgcgctcgcagcgcgcccgcccagccaggggaggggtctcgggcccgacccggagctcagccggcgcgggcccgctccccactccccgctccccgctccccgctccacgcctccccgcctccctccccggggccccctccgggcgccgcccgcgcccccgccgagcctgacctcgcccctggccctctccctccgcgcgcgtcggaccgtccttcagtccatccaggcgcacgcctcaggggacgcgccgcttcctcttctcccgcaacggcaccagcagccgcgctgcggcccctcccgagtccccgcccctccagctccagcccggcccgccgcactcggcgaggcgagcgcggggccagggcggcggcctcgaagagaggcccggccccgcccccggccccgcccctggagacgcgagtcccggccccgggcctggcgggggcatgagggtggcccggggcaccggaggacctgggcagggctggcgtgtgggccgagcagcccggcaagttaatcagggcttcacacccagactccggggccgccggcgagatgtacaggcccttcccaaagcccagctggccacccataacctgggaagccggcggcacagaagctcgtccttcctcctggaaacaaaaacaaagccctttggagacttgaatctgttcacgaagtggaaccccatattgcacttcactcttggatagaatttggactctggaaacagcctgggttctaacgccggttcctccacttcctcgctgtggcccttggcaagttacttaacctctctgtgcctcaatttccccatctgctatgtggaggaaataacccttacttaagagggttatgggagaaatctgtgacatacttgtaaagcatttagaatggtgcctgatacatcacaagtggtcagtaaatataagctattattattttatgaccaaccgccctgtaaagcaagtgctttttcgttttctcactacttacccaacacacacaacttgctgggtagacaccgtcacgaggcgaccaaagcagaatagaccgccctgccctcatgcaacttgcagtctagtggggacacagaccataaaatagacatgacaagaaaagtacagtgttgaggaagcaaatgcagagaccccaaccctgtgttattgggggaggggcaaggaggagggagctttggtcggggtaggtcccaggcttctcagaggaaaggaaaactcggttgaatgccaaagaacagaaggcagcagcagaggaagagacagaggggaggtaaggaatcgcagactgaagaaacagcacctctgcaggcccagaaaggagcccagttagaggaccaggacagtctgctgggcccaaacttgactgtaggagagaagtgacaagaaatgagctgagaagaaatcgagtgccagaacctagagggcattgtatggtgtgttaaggggttgggaccattgggaagccactgaaggtgttgagtaagggactatggttatcagatatacgttttatttttcattttattttaagagacaggttctcactctgtgacccaggctggaatgcagtggtgtaatcttgtctcactgcaacctccacctcccgggttcaagtgattctcctgcctcagcctcctgagtcactgggactacaggcgtgcaccaccacacccggataatttttgtacttttagtagagacagtgtttcaccatgttgggcagcctggtgttgaactcctgacctggtgatctgcccgcctcagcctcccaaagtgcagagattacaggcatgagctactgtgcccaaccaggaatctttccttgtgtgttaattattacctctttcccagagacacccgtgactctggcagctctcagttcccatttgctagactccttcatttatttattgagcacctactacgtgttaagaaaagtctctgctctcatgaagcttacattctggtgggaaacacagacaatgaaacaagtatataatataatgtaacgtgttctgaagaaaagtggagtatagaaatgtgtgggcgggcacagtggctcatgcctataatcccagcaccttgggaggccaaggcagggggatcacttgatgtcaggagttcgagaccagcctggccaacatggcgaaaccctgtctctacaaaaaatacaaaaattagccagccgtggtggtgcacacttgtggtcccagctacttgggaggctgaggcatgagaatcgcttgaacctgggaggcagaggttgcaacgagctgagatcacaccactg

SEQ ID NO: 995 - DNA, 4001 bp, Homo sapiens
tttaaaagcttccccagtgattccaacatgcacacgagagtttgagaaccactgattgcacaaatctattatgagtttcagacattatttaaggcagtcaaggcatttaggacaccttatatcctttagttatcacaccttcccttgttttattgtttctgttttattgacattcagatgtcaatcatggtgaagctgggataggaactcaggtcctctaattctaaagtccattctcttcccacacacctgttacctactgcaagggtgtagacaatgcatggaagcaatctccactgccaacagatcaccctaagttccctacgtgcaagacacctagatttggagacgtgaaccctgtaggcaacaatcataatcccttctgaatgcagaggaccgagccttacagagagggcagggggtgtgctcatgtatgaggtctgagatggggaaagagaatggcaccaaatcctggcaatgaagtttatcctagacctgagatgtgttctaagacagcacgctgaagacagtgctcaatggcataaaaagaataggcaattgttgagcagaggggcctcttcactggggtgaaggtcctgcatctgcaccttaagaggggtgtcaaaggttcacctctcagggccatagtttcttcttcccactctaggcattctgatttgtgggagcacaaaagccaatcctaaaatctcccctaccaggcagcttccttttcttcaggctctccttctcccagaactacgatctaagcttccttggtgaggagacacaggactagtgccctcacatttttagccttcagaccactcaggtaggcaaagcatcccttcaacccccatcccacttactcccatttccacctcaaaaaaggcaccatcattatcacccaaaccaactttcgagacagaggggaatgatgttcccactcccaattaggaatcaatgcagcccaacaaagaagtgaaaacaccagagcatccatgtttgacatgctacaagacagcagcccaccagccatgtgaagtccctaaaccacagatgtgcagatgcaggacctcaccccaggggccaagacagacactttaagaacagcaaatgttccttcttatagataacaaatgatattccaccgttgctcttgggttagaaacgggcctcttcgtactctactccaacctgtgacacacaccgaccgcctcctggtgtcccccaaatcctagtgttgatgaaaaagaaccacgagaaattacaggaaccaagagcaggttaaactttcacatcgattgcactgataagcagagccacttacccagcacagccagacagctcagcaccgggaaaaagcacttcatgtcggcagcctccaggagacacaacacaaggcgcttcctcttctcccagctcctaatctctcatttctggcaatccacttatagctccagagaacagttttggaaatagaacttaactcggaaaatgggaacagattaaaaagaagagatcagaaggagggagttggggggaaggggaggagtggaggcaagtgtgaaaactcccctatgctacaggaagggtccacaacaattcggaagtcgctcccggctcctgccacatcgtgtgccttgcagtttccactgaaattgcagactgtagtggattaatcctccagaagcacggaaaaaagggtctgagaaaatcctttcatccactgattatacagaaatgtccttggcttctcagtgaaggtgtctgtgatctccctcattcggattccccagagagaacagggcaggtttcgtcaaaacctttgacggccaaatcaccctgcctggcatcaaccgtttgggtttcttcaccaaaaagtccgtttccatccatggtggtaggtcacggaggcgccacctgccccacgcctgcctagggcacacgaagcaagttggcgttcggcagccctgaagcggtaccccagcgcgagcagatttctaaaacaaacacaacagagatttttatcaaaggcaaagctgcaaaacccactggggctgagcgctgagctggtccggacacctgggtccggttcctggaccaggacagtcaacctctgcattctgaccttgggcaagtctctgtctttccctccgcctcagtttccctgcccagagcagggcaacagtgggaagcccgattgttcctgaaatacttccaccaaatgcttcactcctgggaattcccgtcacctcctaccgagcccgggcgccgcaggtagccccaccctccgccagggcaaatcgggaaggggctccgcggtggggccgcgactcccggcccccgccccaaccgtgggagctctgcgcgcgacgcgtcccaggtggccccgctattgttttaccttgcagggtgtttatatctcgctgattggaaagaaaagaaaccggggaagaagggagtccggagctccgctttcagctgccggagcgcgctcgcagcgcgcccgcccagccaggggaggggtctcgggcccgacccggagctcagccggcgcgggcccgctccccactccccgctccccgctccccgctccacgcctccccgcctccctccccggggccccctccgggcgccgcccgcgcccccgccgagcctgacctcgcccctggccctctccctccgcgcgcgtcggaccgtccttcagtccatccaggcgcacgcctcaggggacgcgccgcttcctcttctcccgcaacggcaccagcagccgcgctgcggcccctcccgagtccccgcccctccagctccagcccggcccgccgcactcggcgaggcgagcgcggggccagggcggcggcctcgaagagaggcccggccccgcccccggccccgcccctggagacgcgagtcccggccccgggcctggcgggggcatgagggtggcccggggcaccggaggacctgggcagggctggcgtgtgggccgagcagcccggcaagttaatcagggcttcacacccagactccggggccgccggcgagatgtacaggcccttcccaaagcccagctggccacccataacctgggaagccggcggcacagaagctcgtccttcctcctggaaacaaaaacaaagccctttggagacttgaatctgttcacgaagtggaaccccatattgcacttcactcttggatagaatttggactctggaaacagcctgggttctaacgccggttcctccacttcctcgctgtggcccttggcaagttacttaacctctctgtgcctcaatttccccatctgctatgtggaggaaataacccttacttaagagggttatgggagaaatctgtgacatacttgtaaagcatttagaatggtgcctgatacatcacaagtggtcagtaaatataagctattattattttatgaccaaccgccctgtaaagcaagtgctttttcgttttctcactacttacccaacacacacaacttgctgggtagacaccgtcacgaggcgaccaaagcagaatagaccgccctgccctcatgcaacttgcagtctagtggggacacagaccataaaatagacatgacaagaaaagtacagtgttgaggaagcaaatgcagagaccccaaccctgtgttattgggggaggggcaaggaggagggagctttggtcggggtaggtcccaggcttctcagaggaaaggaaaactcggttgaatgccaaagaacagaaggcagcagcagaggaagagacagaggggaggtaaggaatcgcagactgaagaaacagcacctctgcaggcccagaaaggagcccagttagaggaccaggacagtctgctgggcccaaacttgactgtaggagagaagtgacaagaaatgagctgagaagaaatcgagtgccagaacctagagggcattgtatggtgtgttaaggggttgggaccattgggaagccactgaaggtgttgagtaagggactat

SEQ ID NO: 996 - DNA, 4001 bp, Homo sapiens
agggcacagctgccagtcaggaagtgggattccagcaccatccccatgcccagctgtgtggcctgggatccagtctctttctgtcctaggcctcagtttccacactggaggagaactaagagctccagctctgaccatgtgtgagtgcgtatgtgactcaggagagccctgccccaggccaggcaagtttcataatcagagtgacggtggagacagccaagctgacaccttccctgactgcctcagggcagactgctcagaaggccccctcccattttcctggctccacaactgctgatgcttggagatgcccatgggaaagtcacctccacagccttaggaaatcagttgccacacagctctctctcccctcctctgtatcagtcgcagcaaggaaagggacagcaaagaggcctgctttggaatcagatctgtgttcaaatcctagccccaacactcactaaatgtgctctctggggcaagttacttcattttcctcatttgtgaaatgaatgtaagtgcccacaggcagtgggtgctcagacctctgcgtgctcctttttcaaacacaggccagcacttccccacctccctgggctcctccctgctccatgctgcccactggggaaaacacaccaagtgctaggcaacccaggccccacagcgccttcctctctgtacatcctcctgccacctgcccagggaccagggagaggactcatcctaaccctgcagggcccagggacctgcagcaggggaaggctttgcttggtgccactgtggagctctggtctagaaacaggcagctggggctaccttcagcctctgccttgacgacagcagctctgaagtcaccatccccacccccacgcttcactctcatttcaagggcttcagcctcatcaacatctgtactggcagtttcactgtctccatgccatactcttccccagaccacctcctacagggagccctccagttcaggccaaaaacaattccactgtcattatccccatgcatccatgcaagattggcccagaacaccccaccatgaacacccaccacagcaggcacaaggtgcttggagatcccaggatcagtctccatggaacctggtttctcctgaggcaaggaagctggaactaagcggtgtgaaaactgatgggtggctgcagagccaagtgccatttgggagacaggaagaagggcaaagagggacccaacccagggtggagatgggggtgagagagggaactgcccccagttgatgaagtgcgtggagcgcaactgggagagacttacttcaaagatcgtgggcagaactggcctctgggcctccagccaactctggggcaattatgaagctgggcaggcactgccctcgtagggcgggcacccaaggccaggcctggagctgagtgtggggcagaaaggagtcgcagcatttggtgcagcgaccccagtacgtgggtatgctagctgagatgtgtggcctgccccgggaggccgagcagtgcctggggcagcaccttagtgggtcctctctacgccccagtccctggcttagagctggggagcctgcactcttcccaagactggctcggcggacagccacaaagcgcagctggacgccgaccccggggaggctggaggtacccctgacggaggaggatgtgaggagccccgaaatgctaggggggtgctggatggcaggcacctgcccggcagggccgggaaccggaacgggggcctggcttacctagcattagcagcagcagcagcggcagcgaaggcggcagcagcgtgggcctgagggcgcccatcctgcgcggccagctctggggaggctccgggggatggcgcgggttctggggggccggaagggtggggggcgcatgcccaggttgagggcaggaagcggggcagcgaggcgtgggtgcgccgagcgagctgaactggagctgccgaatcccctccctccgcccctcccgctgctttccctccagccctcggcagttctgaaaccattctcgccccggcccgccccggcaccgccccttccaccgccccgtctaggcccgccccgccccggacccagccttggccctgcctgccccacccccgccagactccggcctttgctccgcacctggccccggccccgccccgcccctcgaaactcacctttgagtcgcatcgagtcccagccccgccccggccccgcccctccccgccccgccccgccaagactccagccctggatccgccccgggcctcggcccagccccagttccggcccctcccccgccccgccccaccaggactacagtcggactccaatcctggctcctccccgggccccggccccgccccagtcccaagccgcaccccttccccgtccccgcagggctaacgtcagcctccaatcctggctccgccctggaccccggcctcgccccgcccctggccctggctccgcccgaggcccccgcaggagtgagctaactgcacctctgcgcatcgaaattcccacccaccctcgcacagagcgcattccaccccgcacctgccagcctttcctggagagttgggtgcagggtccctgggattggcgaggtgactgtgaccacgcatttagaattcagttatttgctctgagccatagtcctcgctgcaaaccctgctgaagtaggggttggcggaagccaggagttcctgaatgcgaagggtttgagctgaagggcgcttccaggatccagaaggtcactggagacctgtttttcaccccctcagagggcaaaaccaaaagaaaaatggattaggagagggggccgtccatgtgacgtcatttctgggttgggtgatcctagcccagttgtttaacctccttcaacttcagttttctcctctgcaaattgaattgaggttgatcacatcacccaaagggttattgtgatgataggtaatgtacataaagtgtttggcacaggaaactaacacaaaatgggagataaggattattttgttttaggttttgaattattatttgaactgcttcctaagaggcttagtttagacctggcatttaggtgaaggagtctctatgttcagtgacagtgggaagagatgaacattgctctgttctaggaagagtggggcttgccctggaggtgggagaatggaggaggcacccttcccaggtgctctgtctcttcctgaactgtaaagatgggaagtgggcaggggcaggaaggatgagaccagaatggggagaagagatggccaggtttgcaaagccaaggctgtcagagtggctgtcagtgggaggtgaccccagagcccatttaccaccctctaccctccaacatcctccctctcccctctcatcccccttccctcccactcactcacccccctttacagaagaggaaactgaggcccagagagggtaagtggcacaggccagaccagaccttccttgacatggtattcctcaagcgtggcacagtgcctgactctgagaagatgctcacggggttgccagtagaagccacattgaggaaccctggagaaaccagagaaactgaggccttgaagggagatcagaggtccagccctcacttcccaggactgccagcactggcccatgaacagggcaataaggtgcctgtttattcccactttgaaatatccagaaggttgctccagaacctcatcatctaaatccatccacaggcatatcgagctatgtgaaaactgaaactcataggggaagcttttggaagaatacgtctctccctttataatggatttaattatcgagtggatttaatgccttcatgatgcttgagggatgaaagatgttaccaattgtaataatgatagatgtcatttatgaaatgcttacacaagaaggcccttttggatattagtcctagtccttatagcatattttgcaaggtggtgtcatttaacagaagagaaacttgaggttaggcagg

SEQ ID NO: 997 - DNA, 4001 bp, Homo sapiens
caggcaagtttcataatcagagtgacggtggagacagccaagctgacaccttccctgactgcctcagggcagactgctcagaaggccccctcccattttcctggctccacaactgctgatgcttggagatgcccatgggaaagtcacctccacagccttaggaaatcagttgccacacagctctctctcccctcctctgtatcagtcgcagcaaggaaagggacagcaaagaggcctgctttggaatcagatctgtgttcaaatcctagccccaacactcactaaatgtgctctctggggcaagttacttcattttcctcatttgtgaaatgaatgtaagtgcccacaggcagtgggtgctcagacctctgcgtgctcctttttcaaacacaggccagcacttccccacctccctgggctcctccctgctccatgctgcccactggggaaaacacaccaagtgctaggcaacccaggccccacagcgccttcctctctgtacatcctcctgccacctgcccagggaccagggagaggactcatcctaaccctgcagggcccagggacctgcagcaggggaaggctttgcttggtgccactgtggagctctggtctagaaacaggcagctggggctaccttcagcctctgccttgacgacagcagctctgaagtcaccatccccacccccacgcttcactctcatttcaagggcttcagcctcatcaacatctgtactggcagtttcactgtctccatgccatactcttccccagaccacctcctacagggagccctccagttcaggccaaaaacaattccactgtcattatccccatgcatccatgcaagattggcccagaacaccccaccatgaacacccaccacagcaggcacaaggtgcttggagatcccaggatcagtctccatggaacctggtttctcctgaggcaaggaagctggaactaagcggtgtgaaaactgatgggtggctgcagagccaagtgccatttgggagacaggaagaagggcaaagagggacccaacccagggtggagatgggggtgagagagggaactgcccccagttgatgaagtgcgtggagcgcaactgggagagacttacttcaaagatcgtgggcagaactggcctctgggcctccagccaactctggggcaattatgaagctgggcaggcactgccctcgtagggcgggcacccaaggccaggcctggagctgagtgtggggcagaaaggagtcgcagcatttggtgcagcgaccccagtacgtgggtatgctagctgagatgtgtggcctgccccgggaggccgagcagtgcctggggcagcaccttagtgggtcctctctacgccccagtccctggcttagagctggggagcctgcactcttcccaagactggctcggcggacagccacaaagcgcagctggacgccgaccccggggaggctggaggtacccctgacggaggaggatgtgaggagccccgaaatgctaggggggtgctggatggcaggcacctgcccggcagggccgggaaccggaacgggggcctggcttacctagcattagcagcagcagcagcggcagcgaaggcggcagcagcgtgggcctgagggcgcccatcctgcgcggccagctctggggaggctccgggggatggcgcgggttctggggggccggaagggtggggggcgcatgcccaggttgagggcaggaagcggggcagcgaggcgtgggtgcgccgagcgagctgaactggagctgccgaatcccctccctccgcccctcccgctgctttccctccagccctcggcagttctgaaaccattctcgccccggcccgccccggcaccgccccttccaccgccccgtctaggcccgccccgccccggacccagccttggccctgcctgccccacccccgccagactccggcctttgctccgcacctggccccggccccgccccgcccctcgaaactcacctttgagtcgcatcgagtcccagccccgccccggccccgcccctccccgccccgccccgccaagactccagccctggatccgccccgggcctcggcccagccccagttccggcccctcccccgccccgccccaccaggactacagtcggactccaatcctggctcctccccgggccccggccccgccccagtcccaagccgcaccccttccccgtccccgcagggctaacgtcagcctccaatcctggctccgccctggaccccggcctcgccccgcccctggccctggctccgcccgaggcccccgcaggagtgagctaactgcacctctgcgcatcgaaattcccacccaccctcgcacagagcgcattccaccccgcacctgccagcctttcctggagagttgggtgcagggtccctgggattggcgaggtgactgtgaccacgcatttagaattcagttatttgctctgagccatagtcctcgctgcaaaccctgctgaagtaggggttggcggaagccaggagttcctgaatgcgaagggtttgagctgaagggcgcttccaggatccagaaggtcactggagacctgtttttcaccccctcagagggcaaaaccaaaagaaaaatggattaggagagggggccgtccatgtgacgtcatttctgggttgggtgatcctagcccagttgtttaacctccttcaacttcagttttctcctctgcaaattgaattgaggttgatcacatcacccaaagggttattgtgatgataggtaatgtacataaagtgtttggcacaggaaactaacacaaaatgggagataaggattattttgttttaggttttgaattattatttgaactgcttcctaagaggcttagtttagacctggcatttaggtgaaggagtctctatgttcagtgacagtgggaagagatgaacattgctctgttctaggaagagtggggcttgccctggaggtgggagaatggaggaggcacccttcccaggtgctctgtctcttcctgaactgtaaagatgggaagtgggcaggggcaggaaggatgagaccagaatggggagaagagatggccaggtttgcaaagccaaggctgtcagagtggctgtcagtgggaggtgaccccagagcccatttaccaccctctaccctccaacatcctccctctcccctctcatcccccttccctcccactcactcacccccctttacagaagaggaaactgaggcccagagagggtaagtggcacaggccagaccagaccttccttgacatggtattcctcaagcgtggcacagtgcctgactctgagaagatgctcacggggttgccagtagaagccacattgaggaaccctggagaaaccagagaaactgaggccttgaagggagatcagaggtccagccctcacttcccaggactgccagcactggcccatgaacagggcaataaggtgcctgtttattcccactttgaaatatccagaaggttgctccagaacctcatcatctaaatccatccacaggcatatcgagctatgtgaaaactgaaactcataggggaagcttttggaagaatacgtctctccctttataatggatttaattatcgagtggatttaatgccttcatgatgcttgagggatgaaagatgttaccaattgtaataatgatagatgtcatttatgaaatgcttacacaagaaggcccttttggatattagtcctagtccttatagcatattttgcaaggtggtgtcatttaacagaagagaaacttgaggttaggcaggttaagtaccttgcccaaggccacacagtttttaagtggcttaggggtgacttcagcccaggcttgtctgtctgtccccaaagccccaaatcttcctacacctcactgtccctcctcccaagcctctccaccctgtaaactcagtcattcaacaaatattgattgggccaggccttgtac

SEQ ID NO: 998 - DNA, 4001 bp, Homo sapiens
cgaggaagctgctctccggagaaccaccagatctaaatgaaaagtacaaggcaacatgcagagttggccaatactggagcccagaagaaaccccaccattagagaaaggcactgggaagagaaaggagggaggagtgtagttaagtgaggggtagggggaagggggggatcttgaagccctggggagtaagagcaggggtaggagtactgggagaatggtgagtgctgaatgcagatactagaaaggtgaggaaatgggggaggctgggagagttgggaaggtcttaggaaatgtggaaggattctggggatgcctgcattctgagggtcttgaaaaactaagccagaagagaactggggttcctcatatgcttggaaaaatatttttgaaggaagtatggtagatcaagactctcatggcctaggctgctctcgcttctttccttactcttgatgctcacaaggtatagcagcaagatggaaccagtgctgtcgccttcacccctctgtgacaaataagggccctgaggatatctgctcaggggcagagagccagtcaagggcaaatccagggcgcttaagcctcagaaagtggtccccaggacaccccgatacaatcccttgtcccatttccccagcctctatgaaaaactctggaagctgaggacccgaggcctttctccattcagtctccctacactgctttggcagtgagtgagtcaggcacttgggagaggaggagctgcctcccccacctgccagtatgggggatccaggcagcatcctccaggtctggacaggtcccggggctggcagctggcgccacttcctcacgatactgccaagcagccctccccctgccaggcaccaccacccaaggacctcacccaaatccctcccactcactcccctccaatatcttcggggtgccagggtttgtcaagctctttcttccccaaccccagaggcatggtccaaaaaaaagcctgtgagtccctgaagtgtacaaaattaaccctggggcatggagggtaggagcttctgacagccccacagatcctagggcagtctcagagagccagagggtccatgccagggcctggcactgccaagtggactctgctctgagtcctccaacccactcttggccgcaaagttcaggacagactataaaacatcctccacagagtctgatccttgcctctacttaatgatcctgtatgtctaacttctggcaattcactagcaaccaagccccctgtttcccactgcctccaggcagctctcccacacttccctgaaaaacctttttccaagtatataggaaccccctagttctctcctggttgttttccgagactctgagtaactaggcatccctagaattcctcccagtctcttaatatctttccaactcccccggcctccactatttcctcacccttctagtctccccacacaccactccctcgtcctcccattactcccttcccagttatcgctactacgcacaatccccccacaattccagcttctcgcacctgatctccaattgcagcaggtctcctgcactataaagaactcccttctggtctccccaccccccagccacttctccccatcctctcctcccgataattcccctccctgggattctcctgcatcagcccacaatacaattctgataccccacccccaacaattcctttctccctcgcattctctggtcccctggaactcctcctttctcttagaacccaccaagaactcccccacattgcctccagaactcctgcagttctccgggaactcccacccacccgccaagaattccacttcactccccagaactcccctagttctactcctgcaacgaattccacttctctctagaactccccgctttctcctgtcccccataactccgcactaccagcaccaccacttctatacctccagtacgccccctccctcacctgctccgcaccgctcggctccactctcgccgctacacaatagggggcggacccgcctccccgcctcggatgccccgagcgcctcccgtcgccctggagaccgccaatccccctcccgcggcggccaattggagccgccagaggcacggcgaggcgggcgggacccctgagcggcctgggagttgtagtttcaggagggaagagctcggctgcacgtgggctcaggtcgccccctcgtggacctctgcacagccaagcgtggaaaggccggtgggccgcttcccgccgccagcaagaggggcagcagggtccggctcgcgctccagggctgcgggagctggccccttgccaggctactggtacgccgtccttctttcggaacctacgggcgaccctctccgctccccgaacgggcgcgccacagaggcggcagcgagggttgaaatctgagcctgggggtaggagaaccaggcggggagcatgactccccgccctcctcccaggggatccacccaggtcccgggctcatccgatctcctcccccatccccatttctacctccacccattgcttctctagcaggactggaaatacctgtctgcattggcgagctcccaaatcttgcccaggcgcctcccaccgtgtgcagctgaggaaggctgtgctctgagcgtggggttgccaagtcagctcccaaggcagctctggcaccaacgacccagagaaacaggcccagaggggagaaacgacagatatcctgacacgggagattgaaagggaggaatgaaatacaagatcacttactggacccatgcagggtgccagaccctggactagatgctttataactcttgtgtaaccttcacagaaaccctgcgaagtaagtagagctccctttgactaatgagaaaactgaggctcagggagatgaagtaacttggcccaagctttcccaactaggttatggcagagctggattgagacccaacccaaacttcatcaaacctactcccttggaggcttcgccctcagacacaaagatatcttgcatatcttgcccctcagagattccacctcctcagcctggtgatgctgtagggatgctgggtcggcttaagcaacattgcctgtccaggtccttcccattcagttggctcccttggaagccttccatgaaagcaacgtgctgatctcatcccaatccgaagtactaagactcaaactgagtgcaccaggcatcagactcacagaatcactgctgcagcatcatgagagaacctccaggatgggcctaagcactacttggccccagaatccctggcacatcatttctccatgtagtcatccaagcccctatctcattacatcctgggccaggaagctcagcactactgttgtacccattccatccttagtaagctctgcctgctggacagttcttccaggtgtaaaggttttagtgcttttgggtgactgagatggaagggaagaggcaggagcagtgggccagtctctcccaccatccctcctgcaaatagtcccaaagtagcagcttttcaacaatgcatttcaacataataccctgatctattgataagactataatggaaacatgttaatgaatgcagcatggaagcaaggctagaagaaatggtaaaagagtgaagcgggttttttgtttgtttgtttttttgttttgacagagtctcactctatcgcccaggctggagtgcagtggtgcaatctcggctcactgcaacctccacctcccgggttcaagcgattctcctgcttcagcctcccaagcagctgtgattacaggcggccaccaccatgcctggctaatttttgtatttttagtagagatggggtttcaccatcttgaccaggctggtcttgaactcctgacctcatgatccacccacctcggcctcccaaaatgctgggattacaggtgtgagccactgcccccggccgagccaagtgttttttagtctttggatctttaccaatcattgggaagga

SEQ ID NO: 999 - DNA, 4001 bp, Homo sapiens
ggtctcactctgtcatccaggctggggtgcagtggtacaatcatgactcactgcaacctccaccccctgggctcaagcaatcctcccaactcagcctcctgaggagcttaggaccataggtgtgcaccaccacacctggctgtcttttgtatttttagtagagatgggtttttgccatgttgcccaggctggtcttgaactcctgagctcaggcaatccggccacatgggcttccccaaaaaattgctgggattacaggtgtgagccaccatgcctggccacttaaatacttttaaataacgctagactagaaaaggcatcttcgtgttctaacatcttacaggttctcaaactgagggttgccatgcctggaatcctatgttccttcgctctgaactttttctctgtgtaatcttttttaaaaatgcaaatccttgataatgtcatttcattgagccagaggccccttgaagagatcggtggtcaactcctagtttcagatcaggtaggagcggacattacacagaagcaactgaggtactgagaggcttcctgaagacaacacagtagctcagcatgaatgagtgggtctggttttccccgctgaggctggaggcagccagcaggtctgggggctggggctggggttggagcacagcaggctgaaatcaaggccaagggctctgatactggggcaaggaacagctcaggactctgggataataggcagtgaggtgcaaagcgcagacccccagacaagcggtgtgcccctggattctgtgcccgggagctctggttgtggcacatctggcttaactctgcacgctctgcagatcctccccccaccaccccaagcacctggtgcaaagaagggctcagtggccctcagccagtggttggatgaatgagcagtggacagtgaagcatgtgagacaccacccacccacctctcccctcccctccctcctcagggctctgctgtggccaagtgcacttaccccacactctgagctgccctgagtcaggcaaaggctcttcctggcgagtgtatgttatgctttctgtctgtggcacgtccaggagctgagctacaccggaaagaggagggcggatgagaggcgcccctcagtgcagttgcttctcagcctccatcaaaggccgccggccctagccctttaaccctttcctgtttgtcaccttcccccacagggctgggctgggggtttccagctctattcccaaactgttcagggagcctttcccagcgtctcctactcctgagactccggccagggagaaagaccccgggaaaggtgagggcaggcgctgggtgctgatcgctggctttgggtgttggtaagcagagcccagggagggcttgtggttggcccgtggtggctcacctccatgccacacacaacgctctatgtgagagcaccgctgccaacaagcccacacccctgcacccggctgagctgccctgcagctgccccttgtctggcccctcattccacccccacccccctccgcacgctgcacactcaccccatctccactgcaggggatgcaggcttgtgggactgggtgacacccccagagctttcagggctcactgtcattcatgagcagtgttcttagcctcctggtagccaagggcccctaggacccacaggcagggccagttgcaatgtctgtgccaccccaggagctgggactagtgggtttcttccctgcctccttgtggcggtgggacaccaagctcagcactgagtcctggctctcagctctctcgcacttcctgatttccgtctctcgctctctctttctctcttaaagagacagaggcaactcggtgcagccaccagctcagcagaaaagagaaagaggatgctctgagttcccaagggtaggcaataggaccagagtgtgagccacagagaagccaggaactggggcccttctggtaatcttgatgggcagctgggtgctgttttggcatctcccacagttcactggagcagggaagttcagggctcttcccagagtcaacagagcaggttgggcaagttaactaagtggaaagctgcctgggaagtccatgctcccacacccaggaaccccaaggaagtgtgggagctatgccgatccagtcctagaagttggatctgagtcaccttcccaggaggcctgcagaggtccgagagcaagcgcggggacccagctgatgccttccagtgtgacctgagcacacagcatgcagcccctcccagccagctcactcacccgcagagtaacagctactctgtgggttgattggatgacatggatatatttggaattgtttgggagcttggaaagcattttacagaaaggcattgaaggcatggaggcccacacacttcagtaatttacccatgctcttcagagactgctggggctggcacccaggtgccaacttcccagccaggactcgatgccccacatcaaatgtcctaggaggctggaggggtctgtcctgctctggtcagctcagagatggcagttggatatgaaatggttaaaaccaggaaattccatgtttctatagaatgttggagggactttcccatggccacacctggtggtttcctccgccagccccacccctcccacagtgacactagaacaggagcagagctgagaactgcctagtgctcagataaagagaactccccataacacctccagctggaggagttgctgcaacttctcacatcaggaccaggaggaatgtgcctgagtgcctgagatcctcatgttccacccagtcttcccagcttgctttttttttttgagatggagtctcactctgtcacccaggctggagtgcagtggcatgatgttagctcactgcaacctccacctcctgggttcaagtgattcttctgcctcagcctcccaagtatctgggactacaggcatgcaccaccatgcccggctaactttttgtatttttagtagagatggggtttcactgtgtggttggtgaggtggattgaacaggttggacttgatctcccaacctcctgatccacctgcctcagcctcccaaagtgccgggattacaggcgtgagccagtggctaattttttgtatttttagtagagatggggtttcactgtgtggttggtgaggtggattgagcaggttggtctagatctcccaacctcctgatccacctgcctcagtctcccaaagtgccgggattacaggcgtgagccactgcacccagcctagtcttcccaggtttctgcctgcctggcacatgggagaactgcacatcctagttactttgtgatagggggagcatgtgagttccccaccaaagcatttatttcctgatgcaagaccctcccagaactctgctttctggcagtgtgattctgttagtctgggtccttgagtgactgtcctgagcagagttcccctgctggtccacaagggacattggctttggtgagaaatcagcctttgttgctttagggcaccgaggtttgctacataacttagacaatccgtaatgtttacccacttttttccctgatgaacctgctgggtcctcaccagcactcttactttcctctctccgtcaatctctttcccagcatatttagcacattcaaaggaaactaccatgtgtctagcacctgctatgaggcaggcactgtgtgctcaggatgtaaaggtgggcatcccatcaggagcctggaggtccaggatggcatggcagatgctatgagtggcagacgcgcagcggggaggaaggtgatcaagaagggctttccagaagggttgcttggccagactttaggaaaaggggagttgggcagaggagagggggctgggggaatggaattccaggctgtgggcacatgtgcagaggcacagaagcatgagaagagccggactgaggctgtgaaaagggagagaggtagaggtggcctggagccatgtgccgtgac

SEQ ID NO: 1000 - DNA, 4001 bp, Homo sapiens
cttagagctttgctttcaaaacattgagattaaaagaggtgaatgatgtttcctctgcttgggaaccttagctccccgcccagggtctagttacaaagaggcagtggaggcctgactgaagctctgggctccttttatgaagagagaggggagtagttaataacccacaaatgactcacaaataacaggaaagctgtttgcaaatttcacatgtaaatgcctagcagccacccccaacgcctgctcaaagagaaatgagcaagagatctgactccaggagtctttcctcatttacagctagctctgccagtctgtgtctttgctgtgtctgtggatgtgagtgtccctgctggtctgtaggagatggtattttgggggcagctgcaagggaaaaaactgatctgctacttacacagcgccgtagcctcagcctgagggtcttcaggttctcccccagggagttcacatgcgccttgatgtctgggtcttggttctcagcttggggcatcacctcctccaggtaaaactggatcatctcagacaaggcttggcaacccaggtaaccctaagggcaggagccaaaggtgagtgagagattggcggaggtggctgggaggaggggctgctgcaactagcttaagaggacagcttggttctagcgatcctccttcaccagaagcctccccgaagggactgagccctttgtaaaccctctggctgctggatgtgctgagttaacatcttcccacttctccttttcaaagcgaaggaaacaaacccaattccctgcaatcaggaagcagagtctcccttcccttaatcatgctgcacactcccccagcaccccgcccctgctctcaccttaaagtcctccagcaaggactcctttaacaacaagttgtccagctgatccttcatttgctgcaggaagaacaaaaggagaatgaacttgaggtttggggaaataactgaaatgcggtctttttgatgccctttcatttagagatttttttttttaaataaaattggctctggcccaaaaaaatcaaaaggggagttttaaaaacagaggattcaacagtgatgggaccatcacttaaatcaggtcctcctcctcagagtcaagttatttaaaaaatctggccgattttgaagggaaagcagaagcttgactcagtcctggtcttctttctgcggagctacattcggctttaagggacacctatgtcaacccttcggggccttgagcccccctcatgtcctgttctctgcttttctttctccccactgtagacatccagtttagcttggaaagatcccagggattaagaagctccttctaatgcaggtttccctcatgtagagtgcttccctaaaccactggtctttcaggtctggaaacgctctaagcagaggcaatttaaatttccctgctgcaaggcatggggagcatcttcacctcgaatcagacatttctttacttctcctagccaataaagtatagagcgccagcaggatcttataagtttctcagcacgagagagaacgcatttactttataaggcaggtttcctgcacatttactgtatcatctggcttagcttaactcaccaaacccatggcttgatctaggattctcttaagaatttaagtttgggggaataggtgttggggatggaggtggaggcgcaggaggagggttcttatagttccaggagaatgtctagttcaggcagtcccaggaagagagaaaggacaggaaggaatcatactcacaaagaaagtcttcactctgctgaaggcatctcggagatctcgaagcatgttaggcaggttgcctgggaagtgggtgcagctgttctcagactgggtgccctggcctgggctggccctcaccccagtcaggaggaccaggcaacagagcagtgctgagctgtgcatgccttcttttgcaagtctgtcttgtggtttggttttgcaagagcaagcccctgatgtgtagaccttcacctctctgtcccccttttatattgtaagctcagggaggcctcttcattcattaaaaagccacaatcaaggtttcccggcacaggattttttctgcttagagctcctccttctctaacctctctaataaacttagttttcaatttttgcatcgtaagcaaaaatgattggttgaacatgaacttctgcattacagctatttttaggatgggctacctctcttagaataattttttagcttctcaattaaaaaaagttgatttcctggggagaacagctgttctgtgcgcagaggccctcagctgtgggttctcattcgcgtgttcctaggtcacagtgacgtggacaaattgcccattccagaatacaatgggattgagaaataattgggtccccccaacctgggatgaatacccaagacttctccttgctaacttaggcagtcaccttaggtctctgggccttagtttccccaagtaaaaatgagggggtgggctaaatatcctcaaagttcccaagcagcccttccattttactttccagagactggcttcctacagtacaggcggggtcacaggatgtgttccaggctcctttaccccgatttcattaggattctcaggcacatgtttccacctcttcagctgtcccccaccccaactgtgcttgggggaagtgggtaagagtagtctgcacttgctgaaagcttcttatatgctagtcaggtagtgctcaccatgacccctaccgtctctattttatagtgagcaaactgaggcacagagatattacatcacctgtacaagggtacaccagtgccaactgagaatttggtttcctcaccctactgtacaccatctccagcacatagaatgaaaccttggattaaattggccttagagtttcttttagttgtaagcttctgtggctggagtctaaagtttaaaagatggggtggaagaagttgaaataacaaggaaaagaagtcaggattccatggaggctggataggaggtcccttactttcctcttacctatccctacttccccttcccaaagaagccttagtagtgttgtcttggatttgtgtgtgtgtgtgtgtgtgtgtgtgtgtgtgtgtgtgtgtgtgtagaaggtaaggggagccagttgggttgcggcgaggagtgttgctctacctggggaaggaccggggcagtgacatcaggacttcttcagatatctggaaagtctctggggatcctttgattgagccttcaccttccccttccacaggggctttgcctgccattccagtttagactgtaactgggaggaacactgacctaggtgcaggaggcctgggctctgccttggccctgccactctatagtcagggcaaatcactcatcctccctgtgtctgtttttcatctgtcccaacagggcaatagcacctgtcctcctgcctgccagggagcattgagcttaagtagccatggacccagatggagggcatttccagtgttctgctagttcttcacctttctgcatcagcaatgggacaactccagtggcagcaggttctgagcttgctgcactagagaaggtcactcactgcaaggggtgcaaacaccttggggcccagccagcgtgaagtgagtgggagggagggatgagagggcccacgcccaccctgtggatgtccctgctgtgtgacctatggatcagggtcaggggactgtggtgtctcttcccaactcttcagggagtgtcaatgtagaaacctaagaatcaggaagtgagaaagagcctgctagaaactagtatggagctaactcagaacttactggtcctgccagacttagactggcttaagggttctgtctgagttctgctgccaggaagcagagagaaggggaccaggacctgggtttccccttcttgcacctttctccttccccctcggctcctgggttttctgggctgtgtctgtgttagcctgcaggtctaacc

SEQ ID NO: 1001 - DNA, 4001 bp, Homo sapiens
ccagagaggtggaaacagaaggaacacagttttgagccagaaacctgtaactctctaactgtgtgaaacatgtaagtttccacatctgtaaaatgggaatactaataacaatttcaccatgtttttaaggaattagataatatatatccaaaaaccaaatacatagtaggtgctcaacaaagatgttcatctacacagagcacacacatagcagattataacaattatctagagttttaaaaatggggaaaaaaggactaatttagctttattctttatatatatatgtgtatgtgtgtgtgtgtatatatatatatatgtatatgtatgtatgtatttatttttaagacagagtctcgctctgttgcccaggttggagtgcagtggccccatcttggctcactgtaacctctgtctcccgggttcaagcaattctcctgcctcagtctcccgagtagctgggattacaggtgtgcgtcatcatgcccagctaattttcgtatttttaatagagacagggtttcaccatgttggccaggctggtcttgaactcctgacctcaagtgatctgcccaccttggcctcccaaaatgctgggattacaggcgtgagccaccgtgccgggaccctgttcttagacaaggtctatttgtatgcttttaggttactatttgtaagacctggatctaatggtacagatacataatcccgtacaatgctgacactgatatttagtgtgtcctagggagatgaggagggcctcatagttcacaaaggaaggggcatttcacagaagagaaaactgaggctggccaatttgcttgcaccagagcatcttgctagtaactggccaggcagggactcggggtcagtccagaggccacaggaaagactgctgagacaaggttagttcaccctcatccgggactacggaaggccccccccaatatcttactcacatttgatacattttcaagcaacgggagccacgtctgtgggcctgaaccaaggctggaccctcaggggtgccctctgcccttttccagtcgccgtcccctcccttccgtttgagcccaccactctgtgccccggcccagagagtaccttggaggctcagtccgcgcgctccctcccctccatccagccaaaccaccacccagtacctccaagtgaacatctgtgcccagggcgttaggactgtgatgaagagaagccatttcggatcgtattggaagactttaaaaatatatatatacatatatatatataaagagagaagccgtcgccgaagccccctcgggagacgcgagacacggaatcccgggcacgcagacaccccgctggtccgggatcctggggctctctctgtccccgaccccgagtcactggtcactcaccacgtgtcgcctgccagcgggcgcggtcccgggcctgcggggaccgggtggccccggtgctctgggccgcacgtgtcgcgctctccgcgctctctgccggcgctcgggcgttcccggtgccagcgcccgccctcccgcctccgcctcccgcctctgcgccaccaactccggggtgggcgcggggagctggcggcgagtgaggatcgggccggggcgggggtcggggctgggcggtggccgcagggcggagaggactcgcttctcagttcagctctggaagcgcagccgggcgggcgcccgtggtttccaccccgcgggtcgaagcgggctcgggtgggattctgccacctgtgggctctgctgtgtcgccttgagcaagataattctctctccaccgtcagtttcccctcatataaaatgcggataataaagcctgtctcataagacggagcaagggttgaccgaggtgaggtgcgtttatgcaccaagatatgataggcgcgataaaatcgtgtgctcagcgttcacagccatagagacgtggcactttgttgacagccatcagggaactttcctcgcagatgtcctttctctgtgctctgcaccgcccagctcttaccacacctgagcgccgaggcctcccaagtgggctgtgcacaagaccgcccactggagtgcgggcagaacatactggaacttccatttgtatttgctgtctaaaaaatgagaaaaaagttaaacttgaacagatggcgtgtcaccactcccgtataggtcccgtgttataagtggtgttctcaggcaagagggaaaactgcccagagtacagaggggtcggcagctctgcataatattcatgacataatatttatgacaatattacttagaaaaaaactgtatttaaacctgtaaagacagactctcactctgttacccaggctggtctcaaacttctggcctcaagcaatcctcccgccttggcttcccaaagtgcagggaatacaggcctgagcctctgcacccgtcagcttagatttctttaaatctaagacttccttaattataagatataccattatttatgcgctagtaagaaataaaaagaactgccaggtaaacaataacaatgctttctcaacatttagaatcttttaaactaaaattttatttagtttagagattttatttagatatctctaaataaaatttagattttaaacatatgtatattatctatcgaatttttttttaagtccccccccctcccccaccccgttgtctctggagttttcttctagtccactgagcccagtacaggtttgctgagcccgcagaagtggacaactgcataccacgcttctgggcattaccttaaaaccgctctcaatgtttgagatgttaaatatgaaaaatgtacatcttggaatcaacaatgtacagtagattgtctttatgggattgtgacatactgtagtttacatgctttagtaatttatctacatgaataattttactaaaatcttttaaatcgtagaatctagaatcttaatattactttgtaatgagatgatacataattgtagaaatcatttgtaacaaagattttaaaagttgtcttaaagtgagttattttctttatttttacaaaaaaaccccaaatatcctaaatttgctgatcttttctgtattgatatatggctctcagtacatgttatctaatagatctttttgaagaacaaaaaaccccagaggtttatttgttgtttcttcaaggtaattttcacaccaagtgatacgttgttatgaagagacgatttgaaaacaaatatttcgaagtgttcccattattgtgtgtttttcttactgaagattttatgattgtcatcacagaaaatgcttttaaaaactcggaaacaatttgctattttgtttcaatcttttaattgagcagttcagtggattttaaatccatttgttaaaaaatataaaaatgcagcagcttctcattactttaaaaactgattgatatcaagaataagattatgatagccaaatgttataacaatcttgcataattcatggatttttcaacactttttagtgagaaggaaggcttttagttttgttaataaatcaataatttcaaaaatgcattttactctatctcatttaaaaatttaatttatatatttgtgtgtgcatatgtgtgtgtgtgtatatacacacatataaatatacatatgtttttctgtttttttttttttgaaacagcgtctcactctgttgccccggctagagtacagtggcacaatttcagctcactgcaacctccacctcccgggttcaagtgattctcctgcctcagcctcctgagtagctgggactacaggcacgcgccaccatgcccggctaatttttgtatttatagtagagatggggtttcaccatattggccaggctggtctcaaactcctgacctcgtgatctgcccacctcagcctcccaaagtgctgggattacaggcgtgagccaccgcgcccggcatacatatgtttttcaaggaaataaaaaaacaaccaaacatatgttggggatgtttctcaa

SEQ ID NO: 1002 - DNA, 4001 bp, Homo sapiens
aggccaggagcggtggctcacgcctgtaatcccagcactttgggaggccaaggcgggcggatcacgaggtcaggagatcgagaccatcctagccaatgtggtgaaaccccgtctctactaaaaatacaaaaaattagcctggcgtggtggcagtacctgtaattccagctactcggcaggcagaggcgggagaatggcatgaacccgggaggcagagcttgcagtgagccgagaccgcaccactgcactccagcctgggcaacagagcaagactccatctcaaatatatatatatatataaaactgataatgatggatgggtattttatttgggaagctaatagggattttaaaacagaatacataaatgtttaaatgtcttggtaaatatatctagatcataatgatatgtgtgaacttctgtatagctttgaaaataaaacaaaaaaaaaggtgagaaaaagaactgggaaatttaaacctaaagaagtttctcctttgttttgtttttgtttttttatcttttctctctcttttattcctcattttcagtggggttggctctcctttattgtgatatttggaaatgagagtcagaaaatataacagagataactcagttcaatgttcacattacagtgatgaagaaatagagaagtgaaccagccctccatggcaccgcaaggaagtggcacaactgctctcaaacctctatctccttacctctggctcagcgccctttctaaccccatgctgccctttcactctaggattaggtagagtggaaaggaacctagacttgtgaggaacctcaagcccattcagcagaggaggtgacataactctcccaagccatgctgttctgacttgtcattacccaggaagctgaggacttaaggaaatccaaactggccacacctgtgctcctggggagggaagcacaaatccacattgggcacctatgccacttcagcctgtacttccttctcctcctccttttttgcccacagggatcttggtcaaagtctgttcaaagcctcagaccctgggtgacacatcttatgtcaatgggctctgtggttcaaatgttatgaaagagccccagtggtgatgggatggagggatagtaatggaaagagcccaactgatgcctccccattcctctcctgaacaatccactcttccctaggtaggtggactttttaaaatgcaaacccagtcttggaactctccagtctaaaactcccagcataacgccctggggcctcccagtagcaggaaatctgctccccacagcatccagacccatcacagcctggacttcgcctacattttccgcctcatctctcttgcagatctcccacacctcacaggctcatctcacctagaaagccccgctgcctcacctaccttgtaaacaccaacctaacgttcaaaacctagctccagtgtgacttcctttgtgaaacttctcccctcttcctttcctctccccactcccctcctcctccccacttcaaccctggttgagttgaccactactttccttttttatattcccgctggatacaagatgcatatttaactttgaatttcaatgaaaacatctcagtgtttatctacctgaaattccaagttaactgggtgtcttgtatttgtatttgctaaatctggccatgcatagctcatacaattgggtggggagagtccttttaagaaattgaattcaggctgggcacagtggctcacacctgtaatctctgcactttgggaagccgaggtgggaggatcccttgaggccaagagtttgagaccagtgtaggcaacaaagcgagaccacatctctgaaaaaaaaaaaaaaaaaaagctgcatgtgttggcacatgcctgcctgtagtcctcatgcacacctgtagtcaggaagttgaggaggcaggacaattgcttgaggtcaggagttgaagactgcagtctgctataatttcaccattgcactccagcctgggcaacagagtgagaccctgtctgcgggaaaataaattgaattcaaaaatagaaatacaaaattagagacaaaagtaaacgtttatttagaaagagaaattacaacaaattacaaatcataaaagctaacaaataccacaaacaccacaaaatccagaaaaaaaaatctttattctttaactcctgacaactttttgtttccttcttctatgtcaatacttttttttactgtgcctctgggagaaccagagaatggtattgggttcaaatgtttacgtacctttcactccaatttctaacatttctcatggtcacatactcaagatgttgccagaaaagaggatcccaatctagaccccaagagtgggttcttagatctcacacaggaaagaattggagcacagacaaagaagcaaatttattggaaactactccattagagagtagggcatgcccagaaagcaggaggaggaacccctgtcctttaggaacatctctgcttataagaaactataaggagctatgattaaacttggaatgtgcagatgtgctcactaaaggtaggggctgttggtgctctagtgaccattaatccttcaacttgagtctgctcattgacgttatctctgagtaaagtgggctgtacttgggacatctggacattctgcaggcttggtgggagatgtcctatatagccatcaatcttctgtaattataagtggtggtgagcttagaaatgtgtcactccagtcatgttttattaaaccagaggcctggtaagcaggagttcctctaacaaaattcatagactaaaagagtagactcacactaataactaacaagtactgagcacatttgccaccccagggtctgtgtgaagcatccatatgcattgtctgttttcatcttcacacctattccatgaggtcaatactatttttgtgtccatcattttggataaggaagatgagacttggagctaccaagtacttcacccaaagacacccaggtggggtgtggtacagctgcgtgcagtcataggcagcccactccagggcttcattacaccagacatgaaagagcatctggcccacccttctcatttacagatgagggaacagctgaggcccagagagaagcattttgttctttttgttttttttgttttgttttgttttgttttttgagacggagtctcgctgtcacccaggctggagtgcagtggcacgatctcggctcactgcaggctccgccccccggggttcatgccattctcctgcctcagcctcccgagtagctgggactacaggcgcccaccacctcgcctggctaattttttgtatttttagtagagacggggtttcactgtgttagccaggatggtctcgatctcctgacctcgtgatccgccctcctcgacctcccaaagtgctgggattacaggcgtgagccaccgtgcccggccgagagaagcgttttgaatttgaaaattgaattcaaaaatagatggacaaaattagagacaaaagtaaatacttatttagaaagaaattacaacaaattacaaattcataaaagctaacaaataacacaaacaccataaaatccagaaaaaaataatatttctattcattaactcctgacaactttttgtttccttctcctatgtcaatacttttttttactgttattttctataaagagaataaaaaaatattcagtctgtcctttgctatggttgtttccatcagcttaccccaatggaaggttaagatttaattctttcataacactccatacaaacctgttatttctttcccccatcccaccaacataagcgtatcacaacggcacttctttctaggcaatgtgtcacccacattgtatcacaactttctgtttccttcgtcagacaactgagtagtggtggagctgggaccggaggccacatccctgaactctcagtccagtgctctttccattcacagaatctttgt

SEQ ID NO: 1003 - DNA, 4001 bp, Homo sapiens
gccttccagaccccaaggcaattggcagtggctacttacccactgcctcccggacttaacacacacggccaggaggggccagggccaatctccccattcttttccccatattttttgtgttccagatatactaaatgtctcaccttcctccagacacagcagctctttcacaatgcctaaaatctttttccagataaatgacttcatctggaagggcttgatcaccatcattcctgtctcctttccccatcccggtttcctaaacacatgcacactcacatactcaactcccactctccctggcaaactcctattcacccttcaagttcagtcatgtgtcactgttcttagcaaaacctcccttgaccacaccctcctcctccaggtggtaaatcactctctctttggggtcttacggcacttcctccccaacccttaactaataatactgtcatgttgcacagcaacatatcggagcattcatctgtgaccttcccccctaccccaccaccactgccctgccccagggagacaactcctccagggcaatgctggagacttacacatttctatccttggcacccagctgaaagcctagtttagaggaaacggtgttgactgattgatggtcttcaccactacactggaagctcaatggggtatggactttgtcttgttcagtgttgtgtcctcagcagtctggtgtgtagaaggcactcaataaaaattggttgaattaattgcatttaatcaagcctggacaattcagtgaaatgaaacacttggccaagttgcttaagttcctgaaaattgatttatctgaagattatcaatgactttggataattattaaatatatctttttttgtgcaagctgtgaaatatatggagataaacaaacttgcttatagataagtgggagaggggatgagatgtttgtaaaaataatagtacacaagatagaaagcaatacatgtcaagaagagaaagtgctgtgggtattcaggagagaggtcacttcctccataggattgatcagagggtcttcacagaggacaagccatttaacttgggacaccattgatgatgttttccaccctgaccttggtccacaggcagccatgtgaccctggtctcctggctatagctgattggaaagtggacaactgacctaagctgttctgttagtctctgtctcccagtaatttggtcttgggactttagagcactagtcagtcttggctggtcccttgaattaaagactggtagcctctagagctgtgcagttgcagtcctctgcaaactgctcagagatgcagagaaagctgccaagaaaagcagaaaggagtgactacgtggcctcagagagcgagaagctgagttctggctttctgatgacttctgctcctggttccagtccctctgtgtcgtgcagcagcttccatcccatggatattctgagacaccccaggctccttacagtaaattccccctttttgctgcagctagctggactgtaccattgcagctagcaaccttggtgaagactcttgttgtgtgaagaaatgggccatgaccagtatgggagctgatggggaaggggtatgcagatatggtttatttgtctgcctttccaccctacactccctcactcaccctcagcatctccagtatggtgacccccccttctcccctaaacctggccagcagtctggcaataaggaactttatgacagacaaaggcagtcctgtcagttcataggtgtctgaaaacccagtcttccagagtcttgaaataaactggatatctctggtcccagagaatggctccacatccagggtccctatagcagaaattacttaccccgtggaacagagccccaaagcactggcacacacacatggatatgtgtgtgcacatgtgtgagtggtaaggaacacgcagatctgtgcggaaacgctccctcagtgcacattcttggactcctgtcagtgtgtgcaagcaccgctctatggagaaaatcatagagagtcatcattacaaaaaggtacactcagctccctccttctggtggctttgaggtcggcaaaagtgcacacacggcaacctctttacaaaaattcaacccagctactctgaaccgaatcacaccctcagtcaaggcctgtattgtgtgggagagctccaggaggacagtggtgtttctcggtgcgctgtgggactctgacatttggtaaatcgggtcggggaagagggtggccagattttatggggcccagaggcatatataatgggagggagaactgtcttttaagaaaaaaaaatgtgtatataattactttggctgtggaaaggactaatgaaagtaagagatcctgaagcttttattagcgtcacaggaaattgacttgggggtgggaaggtgggcgcttaaaattaaatcccactttcctttgctctgtccttgtcatttctatacaaattgaagccccccaaggactgcaggtccacaacagcaccacttcccttgcagaggggatgcctgggctgtagtgtgggcttgcacacgccccctgcaggctagcgaggtcaagactggatggaacaacgggccaggtgaagaatgtgaactaggcagctgcagtgcactatgatcgcacctatgaatgaagagccattgcactccagcctgggcaatatagtgagaccccatctcaaaaaaaattaaaagaggaactaggcagcaagaggtctggggaatgtcatctgtccccatgacctacagcaggtgtgccatgcttcctccttcaactccacctcaacacaaccaaacacagaaggtgctgggctctctgagaaaggactgcctgtcaggaggtctgtggcctgtgagtcacggctctgccactagctagctctgaaatccacttcttctgcctgtaaaatcagggattaggttggatgacatctaaggtttttatcttaaccctcttcagaaattgcttcatctcatagtcacgtggagaaagagccagaagtcaatatccctgaatgtggcacttcctgccaaccacgacaccttctccagactcccatcatgtcccagggagtcctgatccctgtggggacatagtctgaaatggccagctgctgtcctcctttggccacggaacctctagggtttgtgagtgataagagtaggtctggaggaggcagcaggaaatgtccttgagaaaaaagatcaggaaaatgatttttccatttaaagggcaatgtttcaaataattttttaaagcaaatgaatgtagacacctgcccattcccaatatacaaattcccaaacattttcttgttttccaggaaaaacagtaaagggctcaggataagctacagtagcagaaatggagacatttgcaagaatacctgaactctcggaggtgggggatgtgtaaatgggtgactgcaggtcaatgtggaaaccctctggtgcctctgacgtccatgtgtctgcttaggaggatgtacgacatgacctccacctcaccccaccctccgccatgaattcccttcctgcctgagaattctacaccagttgagcaagaaagtacaaaggaggactgacttggcaaaatcccatggggccctggtgaaatgaacaggtttggcaatgattgtgtcactatgaccccggacaagtgacttaacttgaccatgcaaaagccaaggatgttcacatcctgtcccgcagcaaagtctctacactgcagggagtgagccctgacccttagaggctgaccccagcgaaggagtcagggaaggttcttcttcctccaagtcttaccccagcctcagcacaaggaggctttgtgatccggttttcgagcaatacttcccatttactgggctgtgaacatccctgagtctgtagtcctgggctggacaaagggtgagaatccagacaaagatcacaagacagccattactgtctgggcctcccaga

SEQ ID NO: 1004 - DNA, 4001 bp, Homo sapiens
gcatgggtgtgtgtgtgaaattgtgagtgttttcaaaggtacatagaagtgtgtgaacattgtaaaactattgcctctggtttgtgcagctaaaagatccagatgtcactgtagtgacttgatggaatcatggccattccctttccatttccagagcatcacccagagagggtactcctctagagcctggatgggtgtcccctgggttaaagcaagggctggtcctcatgatttcagagggctatgaacctgaaggctacaggatgtctaacagtgaataaccatcccacctacctatgatctcagttcttaaaacacacccatcccaatcaatgccaaagtcgcatataccttttcaaagtgactcagaatctggctgtatttcttcattgcttcctccccacaatggcatgtcatgtgggcatgctgaaaaggacccaaagaataatagattatattacagattctgattttttgccattgacatgaagcaggcagaaactctactctttcacccacaaccctgaggatgcttattcctatagaaaagctctttcagacctcacatttggaatcactaagttcatcatcagctaggagaggaagccaccttttaggctcaaacatggaactcatcacttcttttttagaaataggcaggcagtactgaaggcatttgccatccccgtaccccatctggcctccccacaacccccagctgtagtctaggagctctatcccagagctctttgagcccccatgagaaaaaaaaaaaaaagaattgaattcctaggtcctattcagactatattctgaggtcaagctcaatggtctactaattgactgcctagacagaggacgcactaatatactgtaggatacctcacctacagaaaaagtataatttcaaagacaacagagttatcattaatatcaaatagttagcatcttatagttctttagactttgcaaagtactttttgcctagagcatataccgaaaagtcaataaaactgagttcttattacctagtcacatgtctcaacacagattattagaacttttggactcagtttctccatccattaaatggaggtaggaaagagagtttagttgctaagccattgaagctgtgtgctgagatgcatcctgtcacccaagacccacactcacacagagccggaggtccttcttgatggtaagaaaggaattggcgaggctgctgatcttccggagagtataatggtcaggggtctggtagtttttaaataccctgtccagatagagtcttagcaaatggcgcaggaggcagcatcgattcgcaggctgcaaaaaaccacaggtatattggtgaggggaaaggggagagcagagacaagaccagggtgatggagatgctcccactccactcctcctcccagagtttgtctgggccaagcacatacctttgtgtcttgcaaagactcagtcctccttaagattctgatgtcaatgtttccatctttggcttgctaaacagaagaagacaaaacaagcaaggatgagtcagtgcctgctgccagggtcttcaatatcaagacttctcatccactccctgccaagaactagtgggaggtgtcctttcccaaaacattttaaatatttgaactacagttatttctttggaatacatcccccgggtaaggaatccccagcctgcctctttttatgattacactgccagtactgccaggaaagagaaacggacaaggaaggaagagaaaaggctttcaggagaggtagatacccgcttacgtaccacactgccccgtatctcagaaaatccatttcgtatttcctgaaggtttgtggcgatcacacagcttcccaaattgagtgtcttcagtccagtggaaggagtccataggagataaaacgcagcagagagaaggctgaaggcaagactagaggctttcatcttaggcctgaaatctggagaccacaggagctaggaattcaaagaagagagcatgacttactgagtttcccctcctccaagtgtccacggggtgaggggtggggggtcaggggaagagaacagccttatctggcctcagacagtgtggcccatccacgcaacttactaagaaaaactgccaagcctcccgtgaagagaagatttcaggtctgagttcagagtctgagtgcgagttggtggcacaggtcgtggctcctttattctgtccccatcctggctccgccgttagtgcccagcaggtaaggcctggaacagcaggcacttgcagtgaatagatagagaatgacatttcaggggaaatgtcaaaacttgttttggggaattgacgcatatagcctccccttccagaaagccaacgtagctcacccttctggtcccctcagacccacaggggaactggggagaaatcgaatctcacagaagctgtggctgcgccatcgaaaacacctagggggaaattgtctggattttatggccacccacagggcagagaaactgagctctgtttggcatttgtctgagatcagataggttatttgagggtaacagattcgcttaagccccagaggcaaatagaaagtcaatgatttcataacaagcctactgccagggaaaggcaagacgtgatgggcaatcagcccgattccacctaacactcgtgtctgggactccacagcgccctctgcaggaggactgtagtcaggcactcctgggtggattcgagagtacacgctttcctggacctgcaactcaggtcctagaccaagcaaatggtcccaaaagtcagagaagaaaggcaatgacggaactcatttattcttgggcgagcctcctcagtaagagagcaggttagggtgtttgctgagttttaagataaaataataatgggctgaggttagggtaaaacaattgaggcactcattttaggtgcaaaatttaagggagcactaaaaaacctcagtcatcaagataaaaatattttagtgcaatatcaaaatgaattaaaaagcttatgacaaacaaaatatcaaaattttatataaagacaaaattcgacagtgccatgctgagccatattgaagcaaaaggaaaaatttgtaccactattcacatgttttcatgtttcattcttaatggttaactttgtttctcaaaagcatatgatgaaaatattattgatgagtttccttcccttaaaaccaggacagtaaaattataataaattttgtttggggcagaaataaaatatttaaacttaaagtcatgagtcgtaataaacctactttttaatttttcaattttctcaaatactttaatatttttgaaagaaataaatacataaaatttataaagacatatatatatacacacacatcatatatatatatgcacacatccatatatatatggctggctccatagcttggcacagcactgataatcattatcacttactgaatttttcctatatgccaggcaatatgctagacattttttacatttgtgaccactcgagatactgtcaaatgtaggaaaaggaaaaaagcaaaccaaacccaaaagaatcaaagaggactctgggtttggagacaagagaactgggtccaaataaatcctcgctttactagtttccattgatgtgggtcattccagtttacccagcactgaggttggggggcagggaatggttcctgaaatacgaaaatttcagttttaaaactggaaaaaccacaggtaaactggaatgagttggccaccctacctctatgtgaccttggacaagtcaactcacctctgagtttaattttcttaaccccaaaatggtgataattaaacttaacccagaaattgttttgattttaaatcgattatttaaatacaataatctatgatttatacacttagcacagagcaagtgatcaattcattttaagtagagattgatgttagttgtcctgaactaacaatttgatgagcatttaat

SEQ ID NO: 1005 - DNA, 4001 bp, Homo sapiens
ggctgagtctaaagttgaggaaaggagtccagtcaaggtcagacctgaacagtggcttctggttgggtggtgggtcagggcagaagggtgagggtgggctttgagaagccaggctccatcaaggcttggggtagagtctgcagcgggaacggttgctggttgaggtcagtgttctgggtgggaaatagagggcccatctgggttgcaaggaggctggtggctgaggtgggggcatgttgccaaggcaaaggaccctgggctacgtggaggttggcaccacttttcaggagggaactgcagttagcttcctgaagtggggtaagtgaacctaggcccactcctgtcttttagggatgtcagggtctaacaagatctccccctcttctcccaccctcctcgctccttttcctcctcaaatctatcatccattcctcagcctgtgttgcttcggcacttcccgggtgaaagtctatattgtgaaatctggggagacatgtgttgtgtggagcctggcagcctggcggatttataaaaggcaacttgttttttcacattcatgtggaaaaacaatgttctgtcaaccagctgggaagctaaggaaaaatacacaaacaagaaacaattccacatgctctggagtcagcctaagattgggggggtgagggcccggtgtgtgcagcgcgaggcagctgacccttgacaatctcctaagggctatttcttggggtcccccatctcaaagggctgggagcctctaggatttctaaccagtatggctgagggtctaaagggacgtgtcttggtgcctcaagggggtgcctcacatcttcctggaacgcccagcttgatgctgggaagcagactggagggggtcccacagagctggaagccctggagacgcaggcagccctggcgggacagtggcagagaaggtgggaagctctgccttttcgtgggcctcgtcctgcacttgagcaaggagggcctggccgaggccatacctgctcgccatcctcaatcaggactatgctttgacttcctaaggaagttccctgaatttcatgcaatgcaccaggagagcagagagagagtctagggtctcatgtaacgttctccataatgatgagccccccactccgctcactttattggctttgaacactatgcccttaagacctgtttccaaatgagtcctgtgtcttaagacctattaatgtagcagacctggccactctaggagaaaatgctctttcagatctatgataacaaaaggggccaaagaggccctgcaggggcatggagggaggcaatagtgaactcaagcttcgtttcccccggtccttcctcctcctcccctgtcaggccagtgccaagtgagaggcagaggaaggatggtacaaactgtgccgacaccgtttgagggaccgaaggatgtctgcctcctccaggccaattctccattcactgaggtgcagcgatccagcacccccagttcagacagctggctatatccctcaagacccgagggtcctttgggtccctggaagaacccagggtctgaggcaccctctcatgcccccagcaaactaagctgggcatttgcttctccgtgaacacccggcaccctgctcagccctagcaggggagaaactgaaactggctatgctcgggctggggagggtgctggggagatgaccctgatcgttggcccctgggataagggaggtctgaccacagggtagatgggcactcaccagccagggatcccacagtcaagatggtcagcagcgtcctcatcggggctggcacagagccctcccttggcctctactctgccgtgcacagagagagggctgggagtcttggcgccctggcagctggctccacccgggcatggggcggggagaagggggtgggtgggacctgtgccggtggggagcaggggtacaaaggtgtcctggccctgtgtgctctggaattccaggttctgggcgggatctaagggagttcccttccgacttgcagaaaacagcaatagtaacaggctggcttgtttatctggtccggtggctgattcatcccaagtggtttatcaaggagctgaggggcagaaaaggcaagaataatccacgatatgcagccttatcaaaaagcaatttggcactgtggatcaaaagcctacaccacatacatatcttttgctttaataattctattcctaggggatttaccctgatgaaaataactggacaacagagggggaaaaaaaaggtcccagaatgtttcttgcagcaaaggaaaagctgtgactcctttgcttttctggcaggaggagattgagggcacccgatgctcctccttgatcctccatatcaaggcaggtccccacgcttggggtgggcttgggaacagctctcccctagagaggccgttgggggtgaggaagcccagccgctcttaccttgagcctttgggtctaggatctgcaaaagtttagaaaaaaaatggaactcaaacttcagtgattctttctgctgtgctagagatggggctgaacttcatgaatggggctttggttcgggacgatgaagattcaggctgctctcccatcattttgccacgtagggcaggatctgcacatgagcttcgtgtgaatgaagggacaggtgtttaggaaatggttttctccttcctgcagggcctggagaaggtagaagggccctggggcctggactctggtcagggtggacacgattggagggtcctgcccctggggagagtttgcctggccccaagcacacaaaggcaagcgaaattttagcagggatcctgccaacgggttgggtgtaatgggctgtgatatgctgagatcggtgtttaagtttttctttcctgaattgtaattgttatcagccctgattgctaaagtttgtttgacaaaacagccaaatctaagctgtgctttggaggaattaaggtagggcccatgccagtcatttcctgaaactgcaggaaactacattttctagactcctttatcaactgctttctgataggtttagcccctgggggaagactggggaggcagagatcagagcatttctcccctcgttttctgtttgagtggcttccccagcaatggccatatccctctgcagttctggctccctctggacagtccatcagccaggcaaccccttatgtctttcttgttcctgtttggaggccagctcctggctctggcaacaccttctcccctcatctttcctttcagttggtgggatggcacagcttcctgctttggggaaatctctgaactgtctgtcctgattagtgtcccagctccttcatcctctgggtgacgagctcctttacattaaagtcccttggtctgaaagactggagaggtttctgtgctactgaatgaaccatgatggatagagggtttttgatgactttgatgacaaggcagtgtggggaagctacagcgagaaaaacaggttacaagggacgcttagggagaagagcaggctttggtcccaagtggctggccgagaggacaagacgcagccccaacaggtctgtggaacacgaaagtgttccttggggcctctcagaagcactggaagaaggaacttgatggaggaaaagggcatcctgtagtttcgagggcctgtggttatgtaggaattaacgggaaggaagacacctggattgctaaggaatgtgggaacacccagacttcatttctaacagtttaagaaaaaaataggtggggcgtggtggctcatgcctgtaatctcgcactttgggaggccaaggtgggcagatcacctgagatcaggagttcgagaccagcctgggcagcatggcgaaaccctgtctctactaaaaatacaaaaattagccggacatggtggcgggcacctgtaatcccagctgctcgggaggctgaagcaggagaattgcttgagcccaggatgtggaagttgcagtgaacc

SEQ ID NO: 1006 - DNA, 4001 bp, Homo sapiens
agttataatagtttgacaatagaacatgccaactcaaactaataagctcctttgtggaaatatccacatgtgagtaagagggctgtctagaagggaaatttgagaaagaaatcctgcatttggaaggagattgggccatttttatttcattctatgtaatttttatgcacacattttttctagtctaataatatttgtattcttcagagattctaacataaaaccatgaaaatgataatcactcaatattccatttgttgaatgaaagatagcaatagatacataaaacaccatacctccatgacaccagctgaagagtatgtaaagggctattactgcatcccattgaatagtgacctgattcatgtctggaagcaggaaaagactgtttccctctggaaaaaaaatatgaaaaatgtttaaattgtagtattttagtaaaataataaaaagcataacatttttccctaagaattattgtatttgatgggaacctttgattagggaggaagaaggaaagaaggaaggaagaaaggaaggaaggaaacagagcaaagaaatgttactggtatatttaggagatataacaagagatggagaagtaaagcaaataaatggaattttatactcttcaaaagtcactatgaattaactcagtagggcatttgatccattacagtgcctcctaatctagcctttctcatcagaaacctcctcctctgagttaacttctttttttattttatgttttaaatttttttagagacaagggccaggctctgtagcccaggctggagtgcagcggcattatcatagctcactgtaacctcaaactcctgggctcaagcggtcctcccaactcaacctcccaaagtgctaggattacaggcatgaaccatggtgcctgggctgagctaacttctggtgatgaattcttctccctgccaaagttacatacttatcacactccagaaatactagtctttgatgagctaaacttgggaagagccaaaaatttcagaactcccagagaaaatggattcaaaattaagaaaagtgaagtgagattaagcaatatgtgctctcaccagtgagactctaaaaagcgtttcatctggggaggcgtggtggctcatgcctgtaatcccagcactttgggaggcagaggccggtggattgcttgagcccaggagttcgagatcaggctgggcaacagggtgaaaccctgtccctactaaaaatacaaaaattagcccagtgtggtggcatgtgacggtcatcccagctacccgggaggtgaaggttgcagtgaaccatgatcacaccattgcactccagcctgggcgacagagtgagaccttgtcccccgcaccccctaaaaaagaggaaaaagcctttcatctgtagagaacgcgaaaggaacacgttatagaaattcctaataataccgttgttagtttacaactagagttacactatttgattaatcagttacatgaattaactcatttactcaatgatcaacattattcagttattttatctgtttaataaaacctgagctttttctataaaactacaagagaacgcaatgcatggctcatcatatcgcataaaatatctagtaacatttaaaaaaactggggtccccttggctcagaaatatagggatccctttcattatttgttagcaatagtaattcttctcttcataagaagcaacagaagccctaaaaatgttcctagttagaagttaactgatggaaatatgcaataattattatttaaagtaatgtgatgccatataatattatagattcccttttcatcagtaaccactgcatggaatatcatgagaacttgcaagagaaaacaacttggcccatgtatttccaaaaggaaatatagctgtctttaagtatttggatgatcgctgcctatttacctttcaacctgtttgaagcacataattccacttcagagccaggctgccacccttgttggctgtgtcatgtcttctttcctcactgcctgcctgtcagcactcactttagattttcacttctgaggtcaatggaaatgtcagcagagccctgacctacattgcagactcttgaagaggaactcaaactgtccaattcgaaatgactggctctcgtgtcactatttggggaaatccagattactgaaagtgaactgttttgtcggtactttttttttacagcttaatttaaaatggtctcatccaagaggcagaacacttatacatgttttcttaaaaatgtcaaacattttgacaccaaaaatatgacgcttagttttaatttacaaccagcattgttattaattatacacttgtttctttttttagttttccagctttgttgaaatataattgatgaataaaattctacaatttgatgatatacaacatgatgatttgatacatacatattttgtgaagttattatacaatcaagttagttaatacatctctcatcttatttagttactctttattttgcagagagaacattcaagcaaatttcaagtatgctgtataattcagtattgttaactatggtcaccatactgtatatcagatctcctgaacttactcatcttataactgcaagtttatgcccttcgaccaatagcttcctttccctccaccaccctctaaccttggtaaccaccattctatcatctgtttttatgggttcaactatttcagattctgcatataagtgagatcacgcagtatttgtctttctctgtctggcttatttcagttagcataatgccctcaagttgcatctatgttaccgcaatggcagaatttccttcctttttatggctgcataatattcctgtatagcctacagattctttaccaattattccactgataggcacttaaaatgttatttccatgtttgggctattttgactaacgcttcatgaacatgggaaggcagatatctctcatggtgctgatttcattctgtggggggactatagatccagaagagggattgctggatcctaaggtaggtctattttaattttttaaataaaattgtttttatttcacactgttttccatgataactgtaccaatttacattcctaacagcagtgtacaaggctgccctttctctgtaccctcagcaatacttatatcttgtctttttatcataggcaccccaaaaggtgggaagtgatatctaattgtagttttgttttttggttttggttgttgtttttgtttttgttttgagacagagtcttgctctgtcacacaggctggagtgcagcggcgtgattacggctcactgcaacctctgcctcctgggctcaggtgatcctcccatttcagcttcctgagtagctagcaccacaggcacatgccatcacactcagctaattttttgtagttttggtagagatgggttctcaccatgttgcccaagctagtcttgaactcctgaactcaagcaatctgccagtcttggcatcccaaagtcctgggattacaggagtgagccaccacgcccagctcattgtagttttgatttgtatttatgtgataatcagtaatgttgagtacctcttcatatacttattggccatttatccgtcttccttgaaaaaaaaatctattcaggtccagaatcgcctgatgacacatttcttagaaggtatcccagtcattaagcaacatatgactccaacactgtgtggagaattgattgaagatgaagagcccagttaggaggctatggaaaatcaagagctgatttttgttttattttattttattttattttattttattttattttattttattttgtgacagagttttgctctgttgcccaggctggagtgcaatggcacaatctcggctcactgcaacctctgcctcctgggttcaagtgattctcctgcctcagcctcccaagtagctgggattacacatgtgccaccatgccccggta

SEQ ID NO: 1007 - DNA, 4001 bp, Homo sapiens
aaagtggaattcttggccctgggcccctgatacctggctccagagaagcagggtaaaacccaggcaagggagcacaaccatctgcatttgagaggctgtcgccagcaaaggagggcagaagggtctgctgaaagaaagggaggcagcctgtgaggccggccctctgacccagagttacatgccctgggaaaatgctccgagggtctccccgggccaatctcgagcactctccaatgggcaagttgagactattgcaaaccggcagccttgctaaggtgcagtgggggtgaagcaggggtctttctgcccctcaaacttaaggccgctcgtcttgccatctgtccacctgctcttccccaccttgcccgtccacacccacacgccctgcacctcctccttctccatcgcagttctctctagcctacaacctgcgagtcagaatttgacccagaagagtggagaaatgggaggttctaatgtgccacgtctggggagcccaaacccaggaaaacaaagagctgaactagacatgtgcttatccaagttctgccctgaagccactaggcacacataggctggcaggtctttttctcctccccaggagacggctgtccctcactcctcatcacaagggagcaaggggttaatcctggtcccagggaggggcacagagggcaggtcagggtcacacacagactatgccacctccactaaccactcactcttgagtctaaaaattcactttttttagtaaccaaatgagagagaggcatcagatttccagatgaatcatctctaaagccttcctctgaagtgccagttgggaaggactgagtgaagagcctccaagctggggaacctaacgccattatgtatttattataactgatgcagagaatttctttccccctgccttctttgccctttgtcctttccctccctctctccctccctccctccttacctttctttcttccttctttcctctctcgctccctccctttcttactttctccctttctttcgtacttctttacacaatcatttaagaacctttcttactgcaggcactggtctgacacctaaagaaactgcctcccacccctacaccgggaggaagaccagagaagacccggttctgctggtacctgggctagggaggcggcgacccctgggttatgggtcacgggggacgggggctatgctttagcatctccctcaatgtcttttcattctgttctttcaaactccacaggcttttttttttttttttttttttgacagaatttcagtctgtcacccaggctggagtgcagtggcatgatctcggctcactgcaacctctgcctaccaggttcaagtgatgctcatgcctcagtcgcccaagtagctgggatttttgtatctgaaaatatcaaaaacacatgcccaactaatttttttttgtatttttagtagagacagggtttcaccatgttggccaggctggtctcgaactcctgaccttaaatgatctgcccacctcagcctcccaaagttctgggattacaggtgtgagccaccgcacctggctaaagtccacaggctttgcagcctctgttgaaaattcatctctcagtctcgtgttcctcctggccttcctcccaagcagcctcaattcttcttggtgttaaattggcgaaagcagctcctcatcacagtcatgtcttgtccctacatcaacactcaaaaaaattgacttctgctgtccccaccttgaccccttttcacaaataaagcagaggtctagtccttcaaaaaaaagtaaccaagaatcccccatgctcacctctggtcctgtaagtgatgcttgagggctggctgcctggaggcagctggttctttttacagaaaagttagacaggcaccttcaccattcaccaatcagaggcatagctgtgggtggaaggttcccgtcccagccgtggaagtcatttcagaagtaaaggtttgcaggcaagcaaggctttgtggagatttgggcatatatatgggggctgatgggggaggggtggaggaaaaagagggaggtggagaaagggaaattggtcatgctttcctagagaattacttcattgcctagtcacccatcactttaaggacaatacagcgatggggaaagcagcccctgaggtgagatgagacctgggtttgagttcaggctctaccactggctgtgtgggcaggggcaagtctcttagcttctctgcgctgcagtctctgcatgtataaatttttaaaaaatttgtcccacctccccccaagggcaagtgtaataaacagaggcaaaaacaacacagaggtgcttggtaaactctgtacacatgtaaatacattattactgtgcagcatacaccagtctccttcctgtcaaaataattcaataatgatgccctattcatgctgggacagtagtccacagcgaagaaataacctgtaagtacctctcctttaatccatcagggccaggaagttgaggagtgtttcctgacatgcagctacccatggtccctagggttataatcactcaaccaaaatgtgcctctccttaggttctggaaaccaggaagaataaggaaatgtacgcatggacaagcccagaaagctgggaggcctggtgctctggtgggctagtcttggcctgtgtggctctgaaccactcaggggacacagacagcgtgatgtgtcaagactgccagggcagtcaagagctctgaccctatctccagctagcaaggcactcagctctagattctaccatgtgcccagtgagggcatcaagcagagcagtgtttcccaaagcacagtcctcagactctaggtttgaggaattcttgtcttgcaagatcctccatgaaacagatgaatcctaatgaggtcagttagagagccctggcatgtgctagcccgtcctggaaatgtctgatgcttcttaactctgtttaatccagcatttcccataagtatttgcccacatccctgaggaatacattttgggaatcagggattggccaactgtaggtcacaagccaaatccagcctgccactgctaagctgagaatggcttaaccttgcgacctaagagtagtttttacgttttttaatgattggggaaaaaatcaaaagaaagacattattttcaggtttccgtatccataataaataaagttttcatggggtcacatatgtttgttgacatattgttgctaattgctttcgtgctacagaggcagagatgagtagttgtgactgagaccatatggcacacagagcctaaaatagttcctgtctggttctttacaggaagagtttgcccaacctgggtccaggcatgggaaacgggagtaggaatgtgacgtgggggacaggataactgcctccagctcagtggagatgaaagaaaagaggagagtgagtagaacacacccttggcagactcttcccaatctctctggcaccaacaccccctccctccatctcatactcagtgttgtttattttcttaagcaaacaaaatactcctttgcaatccctggccagcagtctgcttggctatagctgccaccagcctgaatcctttgttcctggagggcccgagtcttaccctccagaagtaggcacagccccacagcgcactctcttcccccactccccccttcccaccatgtggatttagggcattaccaagaacccctaactaactactatgagataaagatgtcaagaggcagtgatgagacagaaaagaagaccaggtgagagtgctggagtaataggtgagtgggaggcaggagacagctaaagcaggaagctgagagggaaaatgagcccccagggcagctgaaatcctagactactgtctgcagataggcggggagggcaggcaggtgggatgagctgttaaagggcaggctggaacagaggcatgaggtcatggatacaccttggctggcctcagggta

SEQ ID NO: 1008 - DNA, 4001 bp, Homo sapiens
ctaacaccaccatgggcaagcctgggcctccacttccctccctcagccttttctgtcccagcactcagccagacaagagtgactctcagcttgccccaatgcccccagctctgcctgctgatctagttctatatttgagagtcttagacatctaccacactggagcacagagccacgggaggggttggcctccatcaccggggcctgacaacctgccatcccgccatcccaacctccctgaacctcagtctcctctttcaaacaaagttatatgtagatacagtggaggattagaaaacattgaatgggtgccccaatcaacagtgtctgttactggcaggagttataaatgtgtattgaaaatggaatcccttctttttttcttccaatcataaggaccacaaccatccaaaaagcaaagagagcctcagacactccagctcagcctctagttgcagaaagtcacctcctcaaagggagagatcagtgttcacctaggactggaattcagtgtgatctagtggttgaaagtcttagccttcagcctccccagcctgtcagctgttccagaagcctgtcagctgccccttagttttctgctgtgtcctcaaagaagcactgggaccctaaaataaacctctggagagccagttgcccaactcttccagaagagagactagacacgcagctgggcatgcggccagagcccaagaaaagcctggtttgccaggggcagattacagtcaacgggagcagtaagtgcctctgccctctccctcacgggtccttctcttttctagaggggagtccagcacgtgccagccccaggaggtctcactcccttgccagcctcccgactcaattcccaggactggggcacttggcttcccagagttggtggctgccaaagtgactccgtgcagcgggaagatccgtgactcagcgcccgtgatgtcagtcccttcatagtcagggcactgtcatccacacatgcacccgcgggggtggggggaggaccaggcgaggtggacccccaatgcagagggagaagaggggcgctggtacaaaggactccccaggcgggtacatcaccccgctggggcgcgccctctcgggcagtctccccttagagtaacctgggacgcggttgtgtaaaggctcctgggggcactgggaaggaagctcgagagtcaggtttgcaaggacacagtcctgtacacagaccgcagggttcccgcacagcttcaccgggcattccggggagcgctccggaccaagggagcaagcgcagcagggggcgcaagagccactacccgcgaccacacagctaggtacccgcggggcctcaaggcagccacagaaaaggggatccgtcgcacctcctttcctccctccagcctcccacagactgcggtgaccaaggcggtttcccccagccgctagctgccccagccctccaggtgcgcccgaagcccttaccctgcgcagggcagcgccttggggccagcgccgctcccggcgcggccagcagggcagccagcagcgcgcagccgacggccagcatgcttcctcctcggctaccactccatggtcccgcagaggcggacaggctaatgggaaccgggcggcaggggtggcaggggcggggcggggcggtgggcgggcaggcgggctcaggccccgggggcagcccccatccgcaggagcccggctctctacacacactgcgagtccctcggccccgcgccgcgctcggctcctctccctctggcccggctcagtgtcagtgcgacttcccactcgcacatgactcagagcggcggacggtcctggcaacgcaggaaaacatttgaggaactcgcgctggagcgtctctgggccgtcccagggtgcggttacgaaagccggagcggatggcgcaacagccccgcgcaccggccgaccgagggggtggcttcctgccacagcgccgcacctgagcggggagaacaggggaccgccagccccaccagagcccttcctcccggttctgttgatgagaaaagggcgtatcagccaccagtgggcagtggcctagttttgatttttggtttcgtgaacgggattacgctgtgaaaggcacacctggagagccctcgaggaggcgatgttcctcttacccttagggtaaaacagtgcttggtagcccggttgcccactggaatcagccaggagccctaaaacccaccaatgtctgggtcgggtctccagagattctgatttcatcggtctggggtgaggcttgggcatcggaagactcaccaccgtaaaggcacagtctttctgcccagctgctcctcgcaggctgcagcagaggcaaggaaacggtttggactttgcagtcagatagacctgggtccccatttagacctaccatctactgtgtctgtgacttcggttcagaatctgagtctccatttcctcatctgtcagagataagaaagcctatgctgcccagggttattaggaaggttctgtggatggcacctaaacacctgacacacggtctgggccacacgtgctcagtagacatcagaacgttcatggctgccctcctgacttgacagacagacactaacaccaggggcagtggctcacgcctgtaaccccaacactttgggagagccgggtgggtggattgcttcagtccaggaattctagaccagcctgtgtaacaaagtgagacccccatttctataaaaaaatttaaaaattagctgggtgtggtggtacacacctatagtcccagctactagggaagctgaggtgggaaaattgcttgagtccgggagatccagggtacagtgagccgtgattgggggctgctactccagcctggatgacagtgagaccctgtctggaaagaaaaaaaaaaaaagaaaagaaagaaagaaaaggaagggaggagggagggagggagggaaggagggatagaggggaaggaaggaaaggaaggagagaaaaaaagaaagaaacaagcacctggcttttgagcaaccacaaggaccttgaaggggaccatctgtccgtcccttggaggggaactctctcaaggacccccacagagcctaaagctgataggatggcctcatagctgaatctggagggaaagaaaaatgctgaaataaagtttaggctgagaagcttctagaccagcaactgctcattagaatgtgtttttctacctttggtttcaggccaatcctaacccagatcaaagatcctgggacagctggaacaggcatggcctaatggaactcccaagtggacagggccaggcatggacggacagagcttctgaaacagtcctcagaccccgtgcatctggatctttctgtaggaaccacccatcagcagtgccagacagaaccaagcacatgcactgatccaccgcacgatgggagctggtgtgggtgagcttgtttgctttagccatgcccacagacaggaacagaagagcacagtggaggccaccagccctctcgcctgctatttcaaaaggggttgcagcagggctggaaagcggttcccactgtggttgcccccttcctctctgtggcacacacagacctgaaaataaccagagagggactgtgagctgccagcctaaaacaggaaggctgcagaaagtcctaggctcagataggagagtttaaaagaatgttgaaaccaagaacgggcatcacagatcccacctgtctctgcaccaaagcagacctccccctctctaatctactggtggggagcctgtgtgctctgtagtcatgcagatcccagctttaccacttgctggctgtgtgacttaagcaagctatttaacttctctgaacccctatttcctgatttgtaagataagcgcagcaatatacaaagttttagtgttgtggttcacatgaaaaaatttaatcctggccaggccggacgtggtgcctcacacctgtaattccagcactttgggaggc

SEQ ID NO: 1009 - DNA, 4001 bp, Homo sapiens
tgagactggtctggagtttgagagaactggaatctagtccctaatcaatcatgaacgtgctatgtgcatattgcctctctaggactccatctctataaactgagagggctgaactacagttcctgtagtaccctccagtgatatgattccatttcataaaaagctgtgagccatctaaagagagctctatgtttcccttcttctctcactccctgcaaacccccagagtacttcttttaggcagaccccagcgtgtctgtaaagagcacctctgactcagggacccctcccccccccccccgatgcctggctgacttcagtgctgttgtgatacaggctcaaggactaagtgccctgagaatattgataaccgagagtagaggcagattaaggatgtgaagaatcagtgagggtgggagtggaaggcactgggaggccaggggagcggggtggcatggatcagccaaaccctgaaattagagatgattcatatctgaataatgtgggagggatgaactcaaagcagccaaaagaagaggctaactctgctgaggatgcctcccccagcctaaacccagcagtggggcaacggcaatgttaggggcatttcatttgaaatgggaaaaatatttaggcaatgaagaatcttattctgaagctaagggaaatggggtatttgccttttcttgctaaatgtattttaccccctttacatgacttgttttagctattttaagcttgttcccctttgcctagtgccttgattttgtccagatcttctggctggtgatgctagaggtgacaaaacttctcatgtggtactattgtcccttttctctcctgccttccacccccatcctgtcctcacctttctgatccctttttccatttcttccatcattctgcctccaccttgatttgaatggttgcctctgacccagtccaagctatccagacattcctcacccccatcctactcccttcagcagggctgctttgtgaatctctcagggctggccaccccaaggccctgtatccctatgggaatcggaatcctcatgtggggaaataggttaagaacaagagcatctactgaccccagcagaatggggagaaagttcaccaaaaaggaggggagggcacagaggacccagctagaccagtgactttgatgctggggagaagcccaatgcctctaaatctctctgcaaattatcttttagggagcggagagtgcacctattagaaaggctcttctgctttctaattatcatttgggaccactccccaaatgataccaagtaagagagagccaggctctaaactccacaaccagtgaaggttccatccccatcttcttcccaacctccagttccttgcaccctccagagagccacagagagaatgccctgggtccccctccttctctagggaagaaattaaggagacagtcctctagcctccacctccagaaaaccagttcatttaattaatcagctccctctgagcttcctttattccagccaggcttttcacaagactcacagcattacaaactcaggataagaccgaaggagaaccgttttatggaggggaaatgcattcgaaagaacaacctcagcgccaatgagtcaaacacctgcatctagatgcgtctcacttgtcattgggcttctcccccgccgcccccatcattctctctctctctctctcacacacacacacacaaacacatacacaaacacacacgttgccccctcccccactttccaccagaccgctaagcagctttaaacatggtcagtaaggaggaaaatgggggggcggggggcgcggtgagaacagaaccactacaggaatatacaaagttattcgtttctgttgaaaaggactcttacctgttagccagaagagagaaatccacctcagcaagaccctatccatcttccccaacttcccagccgaattacggagtgaggaaagtgggaaatggctggaacagaaggatcgctgtcaccccgcggcagcgggcggcggcggagcggcgggcaccgggcgtccctgggcgcagcgcccgccgggccggccgcgcaggcggggccgggggctggatcgcgccgccggctgagcgcgcgctgccgcgggcttccggggtccgcgcagcgctcggcggcgcatccgcatgcccaggcagcgcggcacggggcgagcgtctccccgccgcagagcccgccgcgcgggggagctcggccgccgcaccgcctcccgcgcctccgccccgccgcccgctgccgcgactgccaaagtttctcggtcacgtgctggcccccggcggcccaaaggtcagcgtggagtgattgaggccacgcggagagagggggtctctgggtggcaggcagcgagaggcgcgggggaggccgccccgcgggccgcgccgagcggggagcgaccatcgcggcttctcccagggacgcccgcgctcgggaacccgggcgagaacgctggctggggactcgagcaggggagcctgtgtctgcgggcagccacagccaacctgaacggggagagagtgacagcggcgagggtgggggacggcggggacttggcgtaacttcttacaggacttaactagcaagtcctctaggctagaatgttcgcttctgcggtacccccgcccctccgtctggtttcctttttgacagtgcaaggaaccaggcaagaggctccgcagaattgaaaaaggtaggcgggaatctcgcgtcattactttttcctgttaaaatatgaggtagaataagggcatccggccctttaacagaaaatatgtaaaaccagaatgagataaatgattataacggcttaaatccatccaacactttatagattccagcacgcattcacatggattattcctatttgtcagacggatttgtcttgtgtctcaaaatgtatgtgttgagagagaactgagaaatgtatgatttgcttaagaaatatatttatgaagcctctactaggtgctaagaactaaggttacaaagtggaatgagatagacttcctgcccttaggagcctcatcttgggtcgaggaaagggaggaaggtcagaccattaaagacatgatacttattcctagtaaaacggggcaagtgcaataatggagacatagagaaagtgccttgggaacatagaggaaggactaagttagtcgtgggtggggagggggcaccacgataaaggaggggtaacatctgagctggcatttgcagaaagcacaagatttgagccattcaaggatccctggtggaaagggggcaggcgagggcattctgggcagaggaaagagacatagcagaaaggtctcaagtagcatctgaaaacagagtggtgccaggctggaggggagttcctggagcagacagactccacacctaagagtgaatgtgtacacagacagggagaatatgtatgtgaacatgtgagaaatgggaagaatagaccctgggcagctgtcttttatggctgcctgacatctcaattcccttcttattctgagaaattccaactgcagaagccagaaagtctagagccacctccctgaccatcccagctggaatgcaggcccgggcccctggcatagccaggctgacctctccctcagagctttttgattctggagcaagtggtggatataagaaacaaggacagtggagaattgattttgtcactgaggcagcagcagcatccagtgtacatgatcagctgtggcagaggtcaagccaccaggatgctccaaggtgtgatttttggctgtggtcttgcaggctctctgggttctagcctctcttctacacttggctcttcacttccccagcaattctttgagccacccaatatcctttcataaactctttctttgcttattttggccaggatgattttttcatgctatgtactgcatgagagaaatttgaggactatttcctttcatatacagaaaa

SEQ ID NO: 1010 - DNA, 4001 bp, Homo sapiens
accccgtctctactaaacagacatacaaaaattagctgggcatggtggcaggtgcctgtaatcccaactactcaggaggctgaggcaggagaatcgtttgaaccctggaggcagaggtcctgattcctctgcctcccaggttcagtgcagtgagccaagattgcaccactgcactccagcctgggtgacagagtgagactgtctcaaaaaaaataaaaagttcaaacaaggataaaagctggaatagccataatttaagctatcactatctttatagtaacagatataccataaatacaattacttgttcagaacaaagattataatcatgtttaatgccaacagtagccaaggaattattctccccaccatgcttacactgtttctgtatgtaaagcaacacacagttgactcaaaaccccaaatcttttcacaaatcactttccctccctatttcaaccatctttttttttttgtagtggtgccatcttggttcactgcaacctccgcgtcccgggttcaagcaattctcctgcttcagcctcccaagtagctgggattagacacatgcccagccaacttttttatttttagtagagacggggtttcaccatattggccaggctagtctcaaactcctgaccttcaggtaatccatctgcctcggcctcccaaagtgctgagattacaggcgtgaggcactgtgtctgccctcttcaaccaccatctaacttcattaactgggagatactgggctccatttcaacagtgaccagaaaatgtgtatcattaacccaaggtactcaccaaatagaagtcaaatgggatatgtggtacaaagggcctgaacctaaaacatgaaaaacagccaaattattccctaggtaggaatcaagcgagatgtaaataacacgccaacaattttgaaaacatgtcagtcctcagaatgagtgacaaagtctccggggagggaaagaatcattcttagcatagtggggccaaattcatttaacaggagtgcaggaaaagaccacagttggctctcgcaaaaccaagtgacattagtctactctaaaactcctatttagatgacaagcagaaactaacaaccaagtgcagagatgctaaaagctggtactcaccctcctcctgggcctcctctggaaccaaagcgcccaccacgaccacggcctctgtcacccctagaaatgcagattttattttgacctcattgaaggaatacccaccggccatatcatcttaggttggctactttcatccctcggaacctcccaacggtaggcaagagaccccactcacacttacacttgtccccattccaaatggtgcccagttacacccccataacctcctctaagttaatccaacccccatcaagtaatgatggggctcagtgagccctacacttaataacccataatcctgggccacacgaatcctaatacttcggaggctaaagattgctcatttcttcactaaggtacacatttatcgggcgtgtcctaatgtcaaggccttcgcactgaggatgaatgcggctcgctccagcattctcagcccggatgacgggggcgggggaaaggtggggagctcctccaggggcttgaggacaccccctcatcgcaacccttcagagacaaaggtgtcgaacccccctccccactcctgggcccgaaccccatcccgggcccaagtttccccgcctctaccggcctccatctctcccactatcctagaccaggagttctcaggtttttggccagcccccggatacatggccctttctgatactccgacttctttcggcccacgttcacaaagttttccgtcgaatacctgaaacctttcgaccgcttcgacccacttacctcatggcgccttaaaacacgaacaatggaggccgcaccaaccgccccttcctctgagtagcagacaactgaagaggcgtcttgccggcgtgtcccaataaaacccggtgcgattggctcccgccttaccccatcgcttatgcctattggcttactttgtcaaaccgggcttatgaaccaataaaaaacgcctactgtgtcaggaactagccaataagaactggttctatagtaatgacgaatttttgatcagacattaggtggcactaaagaagtcaggacaacgactacgtagtgttctataacaatcatgagaaattttagttctagatagcagagtggcgcagcggaagcgtgctgggcccataacccagaggtcgatggatcgaaaccatcctctgctatcggagttttttcattgccctgtacggcatacgtaatctacgtttctttagtgaaggaaaatatcttgccaattttcctacctcaaaaatgcaaccaatatcagctatttttgccactagcagttgaagttgatggggaaaagggagtttaggcaactatgaacactgcacgtctacaaactcgaagcaggagaaacaggttttagataggagaggagtatattgattgaattagtgtggaaaacatggttttccatgtccatggaaacaggtgatccacccgcctcagcttccgaaagtgctgggattaccggcgtgagccacagcgcccagcttggttacataaattctttagtggtgatttgtgagattttggtgcactcatcacccgagcagtatacactgaacccaacttgtagacttttatccctcacctacctcccttccataagtactttttcgatatttaatttactacagcagaacgtaaacatcttaagtctaaacgtattctggccacgtaaccaccatccagattaaaataaatattattaatttttaaaaaacaagcaaacaaaaagcggaccgagtgcggtggcttgtggccacccagcactgtgggaggccgagacgggtggatcacccgaggtcaggagttcgagatcagcctggccaacatggtgaaactccgtctctactaaaaatacaaaaattagccggcgtgctggcgggcgcctgtaattccagttactcaggaggctgaggcaggagaatctcttgaatccgggaggcggaggttgcagtgagctgagatggcgccactgcaccccagcctgggcgatagagggagactccgtttaaaaaaaaaaaaatcttacttgaggtttgttgagcttcttgaatcaatggcttcaggtttgtcgtccatttattaaatttatcagctattatctcttcaagtattagttttacctattatttccctcgttcctgaactccaaataaagacgggttagacttttcccccagtaatctctttgtctcttaccctctcttctattatttcattttatttagacacagggtctcactctgttgcccaggctggagtgcagtggtgcaccatcatagctcactgcagcctcaacctcctggcctcaagagactctcccatttcggcctccctagtagttgggactactcaaaggcacaggccacaccactccgagctaattttatttttttttttgagatggagtctcccaggctgcagtgcagtggcgctatttcagctcactgcaacctccgcctccccggttcaagcgattctcctgcctcagcctcccgagtagctgggactacaggcgcccgccaccacgcccagctaatttttttttttttgtatttttagtagagacggggtttcgcggtgttagcgaggatggtcaccatctcttgatctagtgatctgcccgcctcggcctcccaaagtgctgggattacagacgtgagccaccatgcccggccctgcccagctaatttttgtatttttagtagacatggggtttcaccatgttggccagactggtctcaaactcctgacctcaggtgatcctcctgcctctgtctcctaaagtgctgggattacaggtgtgagccacctcctttggccccgggcttacttatttatttatttttgtagagatgg

SEQ ID NO: 1011 - DNA, 4001 bp, Homo sapiens
aatcactttttgtcaaacccaaacaaactagagagcctgagggagaaagctcatgcttgcaagtctgagataaagatcggtctcaagaaggaactaaaataaccacccaagaaattctttctttaggaatgcagtaattcagataagataagataagataatcttttttccttttttttttttttttttttttgagacagggttcttgctctgtcacccaggctggagtgtagtggtgcaaacaccactcaccacagcctccatctcctgggctcaagcaattcccctgcctcaacctcccgacacacctgactatttaaaaagctttttctgtaaagacagccatgttgctcaggctggtctccaactcttggcctcaagcgatcctcctgcctaagcctcctaagtagctgagataacaggcatgaggcaggttgccaggcctgataagatgctctccataacacctgcccagtaatggcatcttcaacaatggccaactctggctttcagtctgcaaaaccaataaactctgttttcacgcagcttatctgcacttactttgccaataaaagtttccttttaccctcccctcttccatgcatatatggcttgccaggcctgtgcacctcgggctataacgctcatttctcattcccaaataaattcaacacatttggagtgttttgttgttgttgttattgttaacatcttaaaggccattaggggccctaaaaacatcaaagctcactttagctaaaaggctcaatctcacctaacattttctaatgctgcaaacagatttaagtttttaaccgctgcccctgcctccactcctttcaaatagatgtgtgcaaattaatttgcagccaataggaatttagcccagaatgtggtagtatcatcctcagtggaaccgacattgtccttctgggtttccaaaggcttctgccttcctttaagaaacacttgtcgcgcacctaccaatagccagaccctaaatgcagtcgaaaaataaggccctgaaaggggcaccctctaaatggcagaggcaagccagtaaacaaccaactggaattcaaagtgacaagagccacttggaaatatgacaaagtgccaagtgaaggggtgttcacttaattcggcctgcgtgcgggacggctggggcgctttggagagtgggagtgatctgaaaatgctttcctgagcttgatttaaaagcaggagtccaggaatttcccctaaggctggaagcactttccgacagaacctccccatctacgcagcaaggctggcagagcccagggcctgaccgctggcttgggaacctccgctacgggatgaccaggcgccgcgacgcggccgggcccaagtcgccccctcagcccggctctgagcaccccctcctctttgtcccctcaccccgttccctccttccacggccaccgatggagggaaagactccgcccagctctgggagcgaaacaggggcaccgatctgggcgcaaaataggatccgtgccacccccgaataccagtgggccgagattcgaggcccgaaaggcctggggaggcggggcggcgcccctccctgcccgcggcctcggcgagccctgcgcggcggggcggggaccaccgtggggtcacccgggcccgacgcaggaggacggcgcccccgccccgcctcccgggtcagcgcggacgcacgccgcgggcgccccatcctcgccgcggcccctctgagcgcccggcggcgccctccacctccggctcccacccactccaggcgggcgggcggggagagcgcgggggcagggcaggcaggcccgggaagccccgagggagctgcccccggccggcctccaggcgcggggacacccaggggcgagcgcgcactgcacagccgggacctcacgctttacctggtgcgctggaggagcaggtgggagcccgggtcgggcgggctcggtgtcggccctgcctcacctgggcggaagtgagaggcccagggtgaccgcgcctcacctggcaggccctcccctcgccccgactctccccgcccggggcggggcaccggggtggcgcagggggcgggggagggagcccggggccgcgggaggcgggctccaaggagggaggacggttgccctggctgtttacgtgcaggtgaattcctaccgggcgcgggatggccaagggcctgggaaaagtgggctgtgggggcggggtggcggatcagaccgcgcgtggtggggacagccgccactgacggggagggagatccggacagaccggtgtggttggaggcctgcgtgtagagcgagacccaagatcaaggaaattgaggaggatatcgatgaaagcgttgggtcaatccgcttaacactttgtctttttgcccctttcctttcctgttctctcatccctcctttgttttctctattcgctgacgcaaaataaaatattctaaaacgtgtaaatgtgggagtcattattttcttctcatttagtggaagaaagaaatccagcagtatttgcctgctgtatgctaggtgctagcttatgcaatgtctcatttactctctgaagaaactaatgaggaaaccgtgcaccctgtaggttgactggcccaaagtttggaacacaggcaaggcattttgactctaactacagtgatgatttcactatacgttaattttcttttatttgtgatgtcacaccttcgagaaaaatatgtcccgatagccttcttccactccctttaataactttaggcttttgatgataggggttttactttgcctgatacagtccacacattaacgataaagagaatcaatcttcaggtatcttattcatagagtacatacagtaattgttaaacactgtgattgattgtgggaagatgtgtaaaatggtatccctgtccccaggaagatgaggaatagatacaaaacaactacaacataaagactttcaggcggggcgcggtggctcacgcttgtaatcccagtactttggaaggccgaggcgggtggatcacccgaggtcaggagttcgagaccagcctgaccaatatgatgaaaccccgtctctactacaaatacaaaaattagccgggtgtggtggatgcgtagtcccctctacgcaggaggctgaggcaggagaatcacttgaacccaggaggcagaggttgcagtgagccaagatcctgccactgcactccagcctgggtgacagagagagaccccgcctcaaaaacaacaacaacaacaacaacaacaattagcccggagtggtgccgtgagcttgtagtcccagctactctgtggggctgaagtcggaggatcacttgagcccaggggttcaagaccagcctgggcgacagagcaagactccatctcaaataaataaataaataaataaaattaagatcatgcacttggtgctttgtagtttgcttccttgttttaaaagaaatgtaacacttgttagtcatggtaagaagacacacaatatcagcatggtttctgctttttaggaactaacaaactactgagggaaataacaggcaaattgccagatggaagccagacctcagaaaatgaagagatctattatgttttttgaaagcatgggttagaacttaaacaggtcttaaccagagtctgagattaatttaggtaaaatggagaaggaaaggctttccaagtcgggggcaaaataaagttggagattgagtgggaaaagggagaggattgaaaaactacctatcaggtactatacttattgcctgggtgatgaaataatctgtatatcaaaccccatggcctacaatttgtctatgtaacaaacctggtttttttgttgttgttgttgttttgagacagagtctcgctctgttgcccaggctggagtgcagtggcacagtcagctcactgcaacctctgcctccctgttcaagccattctcctgcctcagcctcctgagtagctgggatt

SEQ ID NO: 1012 - DNA, 4001 bp, Homo sapiens
caggagttccagcatgcagctatgagtgcactactgcactccagcctgggtgacagaaagagaccccgtctctaaaaaaaagatcatgtgaggctgggcacgctggctcatgcctgtaatcctagcactttgggaggccaaggcaggtggataacttgaggtcaggacttcaagaccagcctggccaacgtggtgaaaccctgtctttactaaaaatacagaaatgagccaggcatggtggcgggcacctctgtaataccagctcctcaagaggctgaagcacgagaattgcttggacctgggacgcagaggttgcagtgagccaagatcaccccactgcactccagcctgggcaaagaccaagactccttctcaaaacaaacaaacaatagatcatgtggcttgttagtaacaaagcctgggtttgaacccaggcatttggaccacgaggctcaagatctggactagtatgttaaactgtctcttctcaagaaacttcctccttagatcttgaggattatgagttagtacgtgtgcagggtttaaaatatagtgttcaaaaaatattaactatcattgtgataattattctaggagactcagaccctgccctggagggacagttgaagttcagctggagggtgcagtgatgaacaaccccatggcccagacaggtggggaccaagcccctcactcacgcgtgttcctggccgccgtgctccaggcggtagcgcacgagtcccaggaggcggctctgccggctgtccccctcacacagcacaccttgcaccgcctgcggctcagagtcaagggaagacaacccagaggcgaggcctctccccacccaggctgtcccaccttccctctgttcccctgcccccccagattcactgtgtggccttgggtgagcactcaaaccatgtgctgaactaacagacaaacaggctctctaagccttccttatctatgaaatgaggataataatccccaacttcatagggagttaggaggataactgcgtatttaaagcatttggctgagagtccaggactcagtaagtacttagtaaatactgatttccttctcccctgatggttcagaggggcaggagaggggatagacacctcgacaccttccattcctcttcccaaggccagggcaggctcagggccgcagttagcacaggaaggatatgatgacgcagtattccccctcagccagcgtctcctggattgccacagactggtccatgctggcccctgctgagcgcacacaccctgtgggaggggagataggagccccgctttggtcaacaagttacgcatggggtggtggagctgcctcagaggggttgggggcaggagggaggggcctttgcagagggagatggtaccggggaggcctgatcctcctcctcctcctctttgtcctccctagaataggcctttcagtttttagggataggggtccagtccctttgccccgctgggatctacagtttgctatactgcctttgtctgggagggcatccagttgctcttgagtgtggtctatccttgttggaagtggggtacgtggattggagaaggggacctagtccctttgctcctaggacatggctcttcctctcttttggggacagtttttgttctgctagcgcctctctgggaggtgtcagtggtgtgtccatgtggggttcagggaacatccccttactgtcattcaggagggtcccattcctctttccttggagacaggaagtgtcccattgctgcttgcccttcacccccgccccagcaggcccattgcatcagctgcaggccgggggttggggggtgtcccagccctcagcttgcccactccctcctgcccagccctgccctggctttcctgctctgctcccacccacagctccctgacattgtcacctacctcctgagctgtcaccacagggcgcacgggactccgctgccccaggttccgggacagtgactacatttcccaacagcccctgcgccacatggtggtcagtcagcctgcaagtcccagcatgcccgagtcaatcgtggggtggggagtctctccatccgtgttaaccccttaggccctggggtacactgggcttcctataccagaaaggttttctaatgattgccctcactcccatccccagccctctaggtcatggggccagagcttcccacccagaaggaagatggtcacattttatcttaggggaagaatataatgcatttttattttctccttagttccatcctcagctcttctcactccagggtagacaacccggacctctactgaaactcttcccctaaaataactaccttctcctggtttaatggagggagaaccagactatgaagaaccattatgtccattttccaggtggagaaactgagccttggataggttaagcagtttgacattaagtcctgcagctagcaggtggcaacactgggactccactgaaagtctgactgcaactcctgggccatttataccgctacacactgccctatttcctcccttagccccacccagccctcctgccacacagggctgtttgaggctactgggtgtgaacgcactttataaagggtatgacactgttcctgtccggcaacgtccttcccctgatccgcctggctttgtgaccttggccaagacctttcttcccttgggactcaatttccccatctaagataaggaggttacccaagatggacaaaaagagccagcacagggactgggcacagtggctcatgtctgtaatcccggcactttggaaggccaaggagggaggatcgcttgaggccaggagtttgagaccccatctctaaaaaaaaatttttttaaatttagccgggtatggtggtgcatgcctgtagtcccagctacttgggaggctgaggtgggaggattgcttgagcccaggagttcaaggctgcagtgagctgtgattgctcacccagctcagataaggaatgctaggatcattctcacttggcctattggctgtttaattaagctgtaagctcccgttggacaggactatgccttttcatcaacataccagcagtttctggcacacagttatctatggagttagtgaattactttctgaactattttaataaatacaccttctctcaagctttggcccaaactgaaggaatgggccttcagtgctggggagggggtgactgttgtgacttgtgaacagtttcccttcctctttccccaagtgaagtggccatcctaatgaccagttcaactttgcatatgtaaaccccttccagaaacagtcgttgccttcttctcaatccatttcttttcctggaaacatccacagcacaaatggagctcaagtttatttgaattcagtgtctaagtcatgtggacgatgaggggaaaggggattgactcagacccttaggatcaaggggtggggtcactgcagggaagcagaggaaccccaattccagccctgctctagtgtcaaagcctggcgaggagggtctgggcaaagtagatggggctgtgtgctttttatgatgaagaaactgtccctgcaggatttgggggtcctcccactgggtgggggtcaggcaggaggttttctgtttttccagacaaaccctatcctctccctgagattagggctgagggcctgcccccttggggggttccatggtcaggcctaggccctagaaggggagaagtgaggagccttaagcccagagctgtgggcttgataaaggccttttactaaagatgcaactacaggaatcagagctggagggggacctgaaggcttgtagatcctacagggtcttcttgactgctgctcccagattctgctgggcccagctaggggagcaggaataggagcagagcagagtggaggagaagtagcatagccacagccagggcccagtgcagggggtttctggtggccccaggagctgcctggttgaagt

SEQ ID NO: 1013 - DNA, 4001 bp, Homo sapiens
ggcacgatctcggctcactgcaacctctgcctcctgggttcaagcaattctcctacctcagcctccagagtacatgggattacaggcacctgccaccacgcccatctaatttttgtatttttagtagtgacggagtttcgccatgttggccaggctggtctcgaactcctgacctcaggtgatccgcccgcctcagcttcccacagtgctgggattacaggcatgagtcaccacgcctggctgacaaaatttttaaaactatttatttatttattttagagacagtctcactatgttgcctaggctggagtgcagcaactaattcacaggatcaatcatagtgcacatcaccctcaaactcctgggctcaagccttccacctcagcctctcaagtggctgggactacaggtacgcgccaccatgttcagctttcaaattattttaaaataaaaataaaaccgaaaccgtaacaataattcctcaccagcatatggctagtctctgttttttgaaaggaaatgaaagattgagatccctgcacatttctcagtcggggcagctaactggcttcagagctagctggcctgacttgtcatagaagactaagggaatgaagtgcctgcatggcctggctctggtgtactggctgagaacacagcacccacctctttctgctgccattggccttgtcctccgccaattgtctggattctggcagtctcttgtgaaggggcaaggagatgaggtgctcttaaactctcacccgtcccagcaccatagcccagaatgtcatggaaactctagtgatagtgaactctgagataagcccaaggaagatgcaaactatcagcaccatcaggcgcttcgatcgcaccttgtgatggctgcaatgaaggagaaacaagcaccgaggaagtcctctgctcacctcgtttcctctcagtttacaaactcttgtgcaacatgccactcctccctgcccctcatagtttccaagccttgtaagagcaagtggagggctggcccacactttacacagctacttgacaggctcttcattgctggcaaatgactgtcacaaataggtactaggggtcatgccaaagctcacacataaatggagcctcacggacacacccaggggaaaaaagcaccaggggcccttgcagaaaaccctggagctggacaaaaaaagacaggtctgcaggtcctcccagagcacggactcacccaaatttcagccctgagcctcccatctccaaacgacaagctcctgctcagcaactggccttctgtgctccccattatccaccaactgctgggtgggaaaaaacctagtccttttataacctgtaacttcatcctggcctctagtcccagagtagacagggctccccaagactccagccctgtacactgcgctatcatcacaggggctgagaactgacagagccccaacacataccatacctcacccaaaggaagactctatcgtaggcagggcaccactcccccacccgccccacgcgacaaactcggaagatcaggattgaagagcaagctcagatggagcaacaggcccagagaggggcagcgagtggcccgaggtcacacagcgagttcggaacggagctttactaaaaccccagcctccggattcccaagtaccccattcccacccgcctaccctcgtcacgcacgcctaagaagaacatcacagaacttctgccccagtgtcccagcctccagagggccaccaggactttggtcttcgccccgagcgtccactggccaaaccgccgaccctgcccacccgagggccgggcgcaccgccgcccccggcccagctccccagcccagcttcccgccgcccgccgaacctgcagtgttgcgctcccgagagccggcggcggcagacatttccctgcctgcttcctcaagctcctcatcccgccgcccgtcccgcgcgctccgcccccagacgaacccgcccccgtgtgcccgctccatcaatcgaaagcctgtcttctccatcgctccgccccaaaacagaacggagcccgccccctgtggccgggcctcctccaatccccaccgtttcttccgggacggatacctgcctccgccaattgtcgcgtaccctggccaggtaactagggccgagttacaaccgcgcggcgttggcatctccagctccagctctgcgcacctataccgagacagccacaggaattcaggatcccgggtcgcagaatcgaagcctgtgcaggaacaaatgggggcagactgagccacgagcttgaagagccggctctgcatgattgtattatcccaagagactccggccctgtttctcccgcgcacagaagggttctgtgcgcactgaggttcaaatgcaagaataattgtgaacacaaaagtactattccaaggcagagaccaccgccattccttgaacctcacggtaactatgtgccaaggtctgtgcctcgtataaatattatcttcctactcctcgtaacacaccttttatgagggaggaaactattatcccaattttcttttcttttctttttttttttttttttttttttgagacggagtctcgctctgtcgcctaagctggagtgcagtggagcgatctccgctcactgcaacctctgcctcccggattcaagcgattctcctgcctcagcctcccgagtagctgggactacaggcacgtgtcaccatgcctggctaattttttgtattttagtagagacggggtttcaccgtattagccaggatggtcttgatctcctgacctcatgatccacctgcctcggcctcccaaagtgttgggattacaggcgtgagccaccacccccggcctattatccccattttatatacaaggcaaccaagttcagagaggttaagtctgaggtcgcagagtgactagcagagtggaggattcaaaccgatgccagagggttggaggatttcaccacccataacctccagcagcagttggcagcccactccagagaaacacacgccgtaagtaagcagtgtgtttactatgaaatatatcaagacaagtcctctgtttctcccttaaccagactgccactctccctcttagaaattcttgagtcacctctgtctctgactcaaaccctctgactcaaactatctgactctggaacagttgctcttaaccctcctgctatcccacctgctctgtctgtagagctgcatgaacccgaccgaactgaataggatgtgcaaggacatgatatatgagaagacttgagttccagtcctgactatggcactgccagacacagcttttaagttgtcttcagcatttacatactattaacccatacttggcctcgtctgatcctcaaaaaacttggcttattgaagaaggcaagtttatatttccattgtataaataaaaaagccaaggtctgaaaaaataaaatatatagtagggccaggcgcatgcctgtaatcccagcactttgggaggctgaggcgggcagatcacgaggtcaggagatccagaccatcctggctaacatggtgaaaccctgtctccacaaaaaatacaaaaaattagctggccatggtggcatgcgcctgtagtcccagctactcgggaggctgaggcaggagaatccctctaacctgggaggtagaggtttcagtgagctgagatcgcaccacagcactccaacctgggtgaaagagtgagactctgtctcaagaaaaaaagaaaatacaaaaattagccgggtgtggtggcgggcacctgtaatcccagctactcgggaggctgaggcaggagaataacctgaacctgggaggtggaggttgcagtgagccaagattgcaccaccacaccccagcctgggtgacagagctagactctgtctcaataaataaataaataaataaataaataaataaataaataatagataaaataaaatgtagtgttcacattcac

SEQ ID NO: 1014 - DNA, 4001 bp, Homo sapiens
tattatgtaatcacatttttcctttttaactttttagtataaaacatagcaaatacaaccaattattaaaatacactcttaagcaaggcacagaaagacaaacaccacatgatctcactgatatgtggaatctaaaaacgtcaaactcaaaaatgtatagcggagaacgatggttatcagagggtgagggtgagggggatggttggggaagagatggtcaagagtacagaatttccattagaaggaataatttcaagaagtctattgtacaacatggtgactatagttaataaaaatgcattgtattcctgaaattgctaaaagagtagatttcaagtgtcctcatcacaaaaacataagtatgtgaggtaatgcatatgttaattagcttgatttagctattccacatgtatattgtatgtatacctatttcaaaacaatatgttgtacacaataaatgtatataatttttaccaattaaaaaaataattttttaaataggattttcagccatgcccagtggcttatgcctgtaatcccagtgctctgggaggccgagacggaagattgcttgaagccaggagtttgagaccagcctgggcaacattgcaagaccccacctctacaaaatatttaaaaattagccagatgtggtggcacacacctgtagtcctacctactcaagaggctgaggtgtgaggatcacttgagtgcaggggtttgaggcttcagtgagctatgattgtgccagcctgggtgagagggcaagaccctgtctccaatcaaataaataaataaataaataaaaatctaaaaataggattttaaataaattctacctcatactttaatatggaattaacagaaagaatttcagtcaaatttttaagttagttgaattgaataataaagaaatatagtgaagtcagccgcttcaccgtttctgaaagacatttggttcatttcttccttcaaaatcctgatcagacaattcctactactagaattcccaccctgcttccccaccaccttccataatccccaaatccttcagggcctctgtcagtaaccaccacctccatgatgctgtcacctattacaaaataggtgacattttgtaataggtgacattttgtaacattctctttcccacccgagactcagtatggaattagtaaagaccttggctcttgaagccagatagacccagtttcctacctaaccacattttcaccagctgggagaagaattttcttcttggtaaaatgataaatggtggtaattttgcttgcttcccaggatccttatcagaaagctgaatgaaatgttgcacatgtaacttcccagcacttaaaagtgctcaattaaggtcagcttctttccttgcatccatatttaacaactgccggaattctaacttattatattgtacaattattcatgagtgaaagtcttgctacttcaacacgctccttgaaatcacatgcttcgccatagcctccaaagtaccttccacagatgctgagcccattgaagtagtcatgcgattaaatgatttcaagcaggggactaaaaaatgaggtagttattttttgaaaggtagcatgctcatcactttcccaagccaaattcagtatattttgataattaatcccttaaattgacataaaaaatgcctcaacagtacttagagaaacacttaataaaataatggtttaaaacacagcttgaaaaaataaaagagacatgtgaaaggaaaatagaggagacacatgagttactgttaccttgctgagcttgagggatcccctcctgatgccttctccacctggagctagcacagatatagatgactgtccgtatgtattctagcccacagagtctcacagactccttgctccgcacttctgagatggcaaataggacagagaataaaaacagagtgaaaatggagcccttcattttgctgaggactgaatgtgaatctgatatggtaaatatagtcaaatcaaattctggagtgactgtcactctcttgaccaatttatactaactttcctgacatttcattggtcagaacctcatttttacaatatttgctaagcacatagggttacacagtaaagttttgaaaatgcggttttatgagtattgccagctattcagtctctccttaataccatcaacgcatctgtgagatgataaaaacagatgccctcttggaaggcattatggaaaactcacggactttgaaagttgccaagaatgagtttcactctcagccttgctacttactgagtgacataaggcaagttttaaactttttgagttgaggcaaagcctggtggctaacacctgtaaccccagcactttgggaggccaacacagatggatcacttgaggcaaggagttcaagaccagcctgggcaacatagtgagacctccatctctacaaaaaatttaaaaattactcaggcacaatggcatacttgagcccaggagttcaaggttacaatgagccatgacagtgccactgtactccagcctgggtgacagtgaaaccgtgtctctaaaaaacaaacaaacaaacaagtaaacaaaaaaaccttttgaacctcaataaccatatctctggaatgggaagacccatctcacaggggtttttttgaatattgaaagcaatatgaatgtcagaacaatgggatatcacacttaagtaggcaatttcttatgtcctgagtttgaatcctggccgttgctgttgcctggctgttacttaccagatctagactcttaagcaagtttttaaggcatccttctttgtaaaatagtgttgatgattgtaactacctcataggtctaatgtgataacatgcgtcccacttggtacaataaacagctaataggccaggcgcagtggctcacgcctgtaatcccagcactttgggaggccgaggcaggtggatcacgaggtcaggagatcgagatcatcctggctaacacggtgaaaccctgtctctactaaaaatacaaaacattagccaggcgtggtggtgggcacccgtagtcccagacactcaggaggctgaggcaggagaatggcatgaacccgggaggtggagcttgcagtgagctgagatcacgccactgccctccaacctgggcgacagagcgagactctgtctcaaaacaaaaacaaacaaacaaacaaacaaacaaaaacaaaaaaaaacagctactaattattagctgcttctcctctcaccatcagaatagaagactagaaaagataacttcagaattcagaagattttatctgactaggatcttgttatccttcacctatgacctaggtacacttttctcaacacacgtatttatgataatagaaagctaagtccatatcccaaatagctaaataatgaaatttctcttttggtaaaacctctgaaagcactagctcttgcaaaggtcttacctaaactgagaatcccagagtttgggatcttaaagaactgttgactcaggttttagcaagttgaacaaataatggttcagttgattctgtgaaatccttgtctgtgattcctggttggaaaaaaattgctaagtctgtggccatgatcatatcatttgtacttcttgtgaaatcactgttcttctgtagggaagctggaaaatacaacaaaataatctgttatctaattgaaagcattctttgctgtaaaaaataaaaattatttctaagagtcttgctttctccatttctttggctgtagtgtgaagaatggattaagaaaggcaagacttgagaaaggaaaaacagaaaaaggctgtttcaataatttagatatgatggtggcctaaactaaggccatggaagagagataggacacatgtgtattcaaaatatagaagggcttggtactgactgggtatcaggggcaatggagagaaagatgtcaaatatgatacctcgatttctggcttgttcaactggg

SEQ ID NO: 1015 - DNA, 4001 bp, Homo sapiens
agtctgaatgtttcagcctgacattcagctcctgctaacgtctccagcctctacttcccttcccaccgagccctccggtgttatcacaaacaccacatgccacatgccacgctatccaggccccattcctgatagtttgttaagagaggtgggcaggcaaggctggctccctgggggttacttcacatcttctccctgttgtcattaatggtcctgagcttggctctgcccagcagctgtgtatgtgtgtgtgtgtgtgtgtgtgtgtgtgtgtgtgtgtgtgtgtgtgtgtgtatgtctgagcccacgcagatacacacacaaaaaagagggagagagaatgagaaaacacttctatcccttccaggcaaaagccaatcaggctctgcgaggcagataggggttctctcaggcgcccacttcccatcatgcccctgcctctccagggctcccctgatgggagtcatttggaaaaacaaatctaaaaccttcacagtttaacccctgccttccctcaggacctggctctgtgcagagctgcactgggaacagaacatctgggtcccctgagcaaatactagcccctccaaggatgtgctcctgtcctgacaaccacactcccagctggcatctgctgtgcagaagaggagggggttcggtggtcgggggagtggtgctatgccttacagacagaggatctgtgactagcaccctttaggggacctcctacccagcccattgcatcactctcccatctccatgggaagaggagactcccctgcccctgggagcccccagtctgaggggcatcataggacctctcgggcaagcacagagtctggattcctgagctgcttcagtttggaggggaatggtgggactggggaaggggatacctcctaatccttccctttttgaagcttccaccctcagctctttttcctctttccaccaatcccccagcacctccatgagggtcatttagtctatatagtccccccacccctcctctctaaaacgtactgatgggcagtatctagcctgggggacaggccctggggtgttgaggaagagcagtcttcccccaaaaccagccttcctccctgtagggattgggccctaagaggggggacacaggacagggccctggaggcaggagctcaggacccagtctagctttacccttagttctcagagctgcagtttcctgtcggcaacattgcctccattacttaatggtgcctggttctcagctacctatcccacccctgcctcttcccattcagtggccctagagatgacttctaacactctcacggcctcatttgggttttcaggcaagcttcactgggatcacagtttcactagtagggacggaagatatctacttgtccacgttttgaagctcttctcatctctgagggagctgagggaaaaacacctttatgtggggaactaactgcttttcctgctgggcagttctcctgagcgctaaccccaacccccatgttccagtgcagagtaagtggaggtgctgtggctgcaagctcagttttttggcctcccagctggctgggagggaggtaggggtctgggagccagttctggggactcaccctctactgtatccaggccaaatcccaaggagaggaagatcacaggcaggcatgctccccagggccacagactaggcactgccattgtcccagccctggcttgtgtccagtcccggctctcctcccggtgactctggggagaacggtgtgataagccctaagggacacagagaccagggttcagataggagagggagggcaggggcagagagacaaggaatcccacacagagacagcaggagacagaaaaaaagaaatgagagtcacagagacacaaagacagtgacaggcagttggagacagagagactcagcatgagattgagagatggggacagagatgcagacagtgacagggagagtctcgggcctccagagggagaaaatgacacagggttctgagcaaaaggcaggccgagaggccagccaaccctgagggcggagcagcaggctggggaccgctcccaaggagggcagcgggggtcccggggcgcgtgggactccgcagggagagtctccctggatccctccgggcgcgcggccccccagcgccagctgacagtgctggctgcggtccttcccagggccggcacgcaggggccgcgcccagctcccgccctccccgccccccgcctaaacagattggttcgcagggacctttccgttctctccacccctcccgccaagtcaaaatatttagcctgacaactgaggggaggacaggtctgttggggaaataaggccaaaatacggggggagggtgggccaagaactgagcttcctcaaatcccgctgcggctgcagcggctcccgccaaccctttgtccccaccacaggcttcttccaagtggggctgcaccgccggaggggcagccagcgcgcccgggcttctggggagcgctgtgtctagattctgcttcccggtgccttgacatctgcggggtaacttctggcagcctcgacccgggagaacgtggacagcccttggcctctgggagcccctctcagcctcctaggaggcctccttgtcctctttggagaccccttagcgccaggctccgtcaccgcctagtcccttggttctgaccaagatcccgaggaagaaggcgatcactgtgtagggctctgcctccgtctggtcaccttcttgagctcaggctgctcggtcggtctgtgtgtccctgtctcggggacttggggggccatccgtgctggggccttggcggagagaaccgtgagcctctaggaggtcgtccttcccccgctccctggggccttgcctgtctccccgccaagagacacccctcttcccttcgctctccccagcttgagacggatgggttagtgcagccacggaggcttgcgcggtgggaggggttgggaccagccttctgctgccctgggtgctggggatcccggggctttccaggtgctcggcctccaaggtgcgcggtcctcagctccacccgcgggcggctcctgcgtccgaggagctaagagaagatctattaatttcttcacgaataaatcgatgctcttgtcagggaggcgatcgatgtcagccctgccctgccttgccctatcctgccccggggccggcgctggctggccggggtcagggactgaagctgagacctgaggcgttgctcactgggggctgcagatcgcacccccaggcacccagcgcgggcggggagctcgcgcctttgcgcgcgggcttctcgcgccaccctgtggcttctcttggaggcgcggtcttggctctccggactcccttcggccggattaggcgaccccttccctttctctgccccgtctgtgtcttcctccccaggttctgcgattgatcctttggtagtccttttcgttttcttcctagagttcggagaatgttctacctaacttactccaagtgacatgctcactcccctaggcacgcgcgccgcgaggatggagcgctgagcctggggctggctaggatgacctggacagcaacctttcctcaacgcagtcatcttccctcctccccaaatgtaaaaatgcagctgctttaagctgagagaaataacgtatcagcttcccacctccggcctcagcagacacctccgaggcgttctgctgcggcccctcagcgtctgccggagctgaggcggatcctcggggagaaggctgacgctgggggcccctaacaggggagggggcagaggggggggcgtcagagagtaggaagcgggtggagaagaggggcaaggcggggccgggcgggggccgctggctccgccctttcctggcggctgggtctttaacaccgcccagcgcacatgtcgggggaggcctggcagctgcagctgggagcgcacagacggctgccccgcctgagcgaggc

SEQ ID NO: 1016 - DNA, 4001 bp, Homo sapiens
atctgacccattttttcaaatctaaattctgaatttcacctgtctgcctgcccaccctctaatagctgataaagttagaagctgggaaacagccagtgaagagctaaggcctgttaatgtactcatcctgtccctggataaccaccgagttgaatattaggccttacaaacagttaagcaatcacgtctcagctctggatctcatattctttttttttttttttttgagacggggtctctcgctctgtcgtcaggctggagtgcagtggcgcaatcttggctcgctgcaacttctgcccacgggttcaagcgattctcctgcctcagcctcccaaacagctgggattacaggcacaagccaccatgcccagctaatttttgcatttttagtagagacggggtttcaccatgttggccaggatggtctcgatctcttgaccttgtgatccgcctgcctcggtctctcaaagtgctgggattacaggcgtgagccaccgcacccagcctagatctcatattcttaagtacatattctcgtttgtaggagtggaaaggtatacgtgatcaactctgagatggcagaatgagaaagctgggtaagaggacaggaggggcaactatcaggtcccctgaagtcctcattcaggtccattccatttcttcgctccaccttctttttcagaagcgatgtgttctctcctgtgtgtgtgctatctggttctgaaggagaatcccctaggtaccattcaccccactacagtggctgatgccaccaaactaaacactactcacttttcttaagtcttcactcattctagatgcccagttaacatcactggcaattggttgtgtctacacgaagtcaatgatagcatctaacaggagggtccaaggtctactgccagctcttaccagcccccaaacatctacacagacatacattacatctcaactcaatatattgacctaagtctgaaacagggttgatagtaaaaatagctggggtgtgtatgtcgaaaggaatgtcaaaaataaattcggtaaacctggatgttgtatcccttccttcaccaacaccccccacccattttcatactagtggctgctgttactatgacaacctgtccaggaagttggcccacatttcttccctcaggagcaggaagctggagcagtgtttgtgttacttcacaaaaaacttgaaagcctccacccccgcccccaccccccgtcctcccacccggtatccgctccagtatccctccaaaacccaatttcttaactcccttccctccccccacacctacctcctctaactcatccttggcatccaaactggttgaaagtagcagcctcccccctcctggggctcctgctcccgctcctcctcctccacctcccgctgctcccgaagcagctgctgctgctgccgccccttttcccttctgcaactccatggctgcagccaggagccgggaaaaggtcagggagtggatggatggacagtcctagatatcgggatctctggattgccagggactggggggcaagaggaacaagttggggaggggagagcaagggcccctgtcctctccactcctccctcctctccaaaaggccgcgcctgcgttgggggcgaaggcacagtcctctgggtcctgactctggggtggcagtgctgagggaaaggcgttggctccgaagtacagtggggtaaaggcctgtgtccctatgggaagggtaggagaggcttccgcccctgaagaagtggaccctaagagcgtctgaccctaagaaaggagggaaacccctaagtttctgcctcttttccccgtggggggaaaagaggagtcctgcccctgaattaggaggtaggaaaccttcctggctgatgccccaaggcttggggagtgcagcgcctttggatccggcccctagggggtgagggtgaggcaataagcgctatgggaggacggggaggaccagcgtctccccacaccacacagaagcggccatagtggaagggcggggggtgggaaggcggagggcgggggagggggagaaatcgtctaggcccgcgccggaagtgagcagtcgcggcccctggcctccgccaatagctgcttccgcggtggcgctgagtctccaaggggtaggaagacctcggcggactggccttttctccgtctgccaatggtgttgagggagaagagagcctggtctgatggacaactagcgtgcccaatcgcttccctcctttgctctcggggtggggtgggagcgcgaggcgatgaggaaggagagaggctgcgccggcgtgcgctgaggcgcatgcgcgatgtcagcctccgccctgttcctcctagaatttgggtgggtgcaggaacctgggcaatgtccctgcgtggctttgagagacacgaagcctgccacgaagtggcagggcgggggagggaacgtaccccaacccgtaggcagtcacagagcaaatgccgtcgggtggtatgaagccagcttccagagctaagagtgcatcacacaggcacgtgtatgcactcacataagtgcaattatcagactttgcaaaaaaagtgcattgccccttaggccgagtccgatggctgacgcctgtaatcccagcactttgggaggccgaggcaggcggatcacgaggtcaggagattgagacgatcctggccaacgtggtgaaaccccgtctctactaaaaatacaaaaattagccaggcgtggtggcgggcgcctgtagtcccagctacatgggaggctgaggcaggagaatcgcttgcacccgggaggcggaggttgcagtgagccgagatcgcgccactgcactccagcctgggcgacaagagcaaaaactccgtctcaaaaaaaaaaaaaaaaaaatgtgcattgacccacttgtgcaaaacaagtcgttcgaatcgtgccagcactacctccagcaaaaatgttccaaatgatagaaccaacttcatttttgttttgagtatctgggactgacccatgtcactttcacccaatgcagtgttgtgatgcgttgcgaatgcaatgtggccttgattgttttgtaagtccatttgtatttcttggttttccatctgtgtgtctcagtggcatttttttttcaagagcactttaggattatctttcacaggcccaaagacagatcaaatttcgctttttttttttttatttttcctgagacggagtctcaactgttttcgcccaggctggagtgcaatggcgtgatctcggctcactgcaacctccacctcccgggttcaagcgattctcctgcctcagcctcctgagtagctgggattacagacacccaccaccacgcccggttaattttgttttgttttgttttgtttttccttttgagacggagtctcgctctgtcgaccatgctggagtgcagtggcgcgatctcagctcactgcaagctcagccgcctgggatcatgctattctcctgcctcagcctcccgaatagctgggactacaggcacctgccaccacgcctggctaatttttttctatttttagtagagacgaggtttcaccgtgttagccagggtggtctcgatctcttgacctcgtgatacgcccgtccggggattcccaaagtgctgggattacaggcgtaagccactgcgcccggccaaatttcgctatgtttaaagcctgctttaaaaaaaaaaaaaaatccacaggcttgtcctagtgcagtagtgtttacaactcattgatcacaaccagttacagatttctttgttccttctccactcccactgcttcacttgggtagcctttaaaaaaaaatccacattcctgcttgttttacttccagtaaaatggagacaaaggttgcctgtgagctttgggaacattatgtgacctaatggatgtgagatcacattttaaactggaatacactgtacagatactagttaccactacaggcaatcctattta

SEQ ID NO: 1017 - DNA, 4001 bp, Homo sapiens
ctcagctgcaccagaatggtagaaaatgtccttagaactcgtagggatattagatattatcctgacctgtaactttcactgaggaataagaaagaaatgtatcagaatgaggaggaaagtgtttgaaaaacacatttaaggccgggcgcggtggctcatgcctgtaaatcccagcactttggaaggccgaggcggacggatcacctgaggtcaggagttggagaccagcctggccaacatggtgaaaccccgtctatactaaaaatacaaaaattagccgggcgtggtggcgggcgcctgtaattccagctactcgggaggctgaggcaggagaaccgtttgaactcgggaggcggaggttgcagtgagccgagatggcgccactgcactctagcctgggcaacagagcaacactctgtctccaaaaaaaaagagaaaaacacatttagtattatacttttttttttcagaggagaaaacccctaaagatttggtaagagaaggaaaagttcaacataattttcttggttgatgggggtgcactaaagatactgagactcaaccaaaggaatatcccattagggggctgtgaaatttttgtgtttatcaaaataaggtaaaagcttttttaagagcctgagaaactcttatttagactaacccactaaaaatattcacagtttaaaaaataaacagaaaaagagtcccaaaaaagttaatagacatgtccaactcagaaaactgggaagtggctcaaacccttctgagttctagtccagttctccaacattatatattggctacgattaatcaagatttaattgtataccagctgccgaaatgtttcccgtacaataaaaatcctcaatatgaaataaaggtttcatattactagtcgagttctttactaacaaatttccgaccttgcctcccatatccacatctaagaagggaggtatatctcttcagcatttactaaatgcttcttttgcataccattaagtcacttaatacaattctgccggctcaatggtactgtacccactttgcagacgacaagccgaggctagatgaagttaatcataaaatcagcggcattgaaacttaactcagtgtaaccccaaagctccctctacaccaagctgctccctgtacggcaacagaactcctggaacttgtccgcagagaatgagcagggcccttgcttttttatggtcttggccaggtttagcctgccttgtaacccgcaggtaacagagctatggaaatcaaatgaatcgctgtcaagtcggtgcaagattactattcagcacatttcatgaagacctggtctcaactgaacagactgaaaaccaatttcacaatttctttgcagtgtctcttagaaactagccactgtcactgcttagaaaatcgggggactgctccctcaagtggtcaaaacgggcctctcactagagctcgctacttgtttagccggtataaggccagtcacacaatcctgcaaatttcccgcaacctcccgaaggggtcaaagcccacgccccagcaaaagcacaggcgctccccgcccagcgaagacatgcgcatgcgcctatccgtcttctcccaaagcaaccaccacctggtggcgccacttccccccacgcctgtttcacccattcagccctctctttcgaatacctttgtccaattccataagggcagagttggcatccagttcctgttcgccatagccggcatctgccaggaaagacttagttgagtttgacgccatgacccgaatagttactcgactagcctagtcagaaagcttgcaaactctaccccaggaccgccatcttcccccgccgccttcttgctggtttttcttccgcgcgctgtcaagccctgttacgcatgcgccctggtcaccccgcggtttgtccgcgcctctgctaccccctgcgcaggcgctcaaggagctcttggactccaggttcccgcggctgggagaaaaggaggcggggatccgaagggggaaatgactctgaggcgcccggacgtcgctcggaagccaatcagagagcgtgacgtcagtttggcgcggagtttggcggccggggcttacagtggcgggagttggaggcgataacgatttgtgttgtgagaggcgcaagctgcgatttctgctgaacttggaggcatttctacgacttttctctcagctgaggcttttcctccgaccctgatgctcttcaattcggtgctccgccagccccagcttggcgtcctgagaaatggtgagtaacggtcccaaccgctgctcggagctggcggaattcatttcccccgaaacacacgccacctccgaccagggccgactccaattctgaactcagcttctgagttctcccatggcaagggtaaattagtgttagcagggactactaaagaaagctgtactttcatcccctcgggacacttgtaatcgtaatcgggcttttaaaatcgtaacgtaggcagggacgtcgaaataactgccttccaaggccccttacagcttacatctccattgcgcgttaacgggaaaatgcatgcatttgtgtgtatatgtttccttcaacggttatttgagatgctcaaaactcctaatcattgattaattcattcgtttgttgtagaatcttagtgagcccagctatgtgctataggtatataccagtgaatatgacccgctgttaaggaactcagtcaagcagagaagacaggatatctgcttctaacaggaacaaaatcttattttccccgtttactacacggtcataaaaatttaaattatagagtgaaagatgcctgtaaccacatccgccagagatgacccctgttaatagattgaagtatattattccagatgttttcgacgctagaggtaatacctattattttcagaaatcggatcaaaacgtccagttttttcactttaatggtataagttgaacgtattcccatgttaatacgtagaaatctaacttattttcttacgctaaaacattggcaataagagatttgaggttagatttggatgtcatcaacttaaactttttggtaagtttcagataagggagctaactacccagattaaccttggacagaaataaaatctcactcatgtgaaggtcgactatagccagaggttctttttccccttgaaactatgtggaaaacgaacctgagaagggaatttttatattcagcgatgagtctaggaaaataatattgagaaagagactgagaagtagtccctcaacttcctgctagcagtctgaaactttataccatccttatttatttccctcttagataatctttgtaattatacttaaatgctcctctttctgtctctcctgggaccttgtttgagtaacttctttgtcctctgtttaagagtgacagtacgcacagtggctaagaactctgtctttgaagttaaactgcctgggttttattatacttccacaccttactatatgtgtgttctgggggagctgttcagcctctattttgtgacagattttctcctaattctccatgtgtttacctttcccttccctctttcctattctcaagtactcattcgttgttacataatagtcactgaaattcattcgttattatatgaaatctatagaatcatctcctttcctcttcagtgttggtgttccatccttgaccccttttcttcttctacctactcctttggatgatcacagccacaaccagggcttcttccacttctacatacatacaaccttctgttacttatatagtaagtcctcacttaatgtctagataggctcttggaaactgtgactttagggaaaacagtgtataactaaactaactctaccataggctacttgatataaataagaattgtttcagtggcatattttggtcacacaaacaccaccgaacttctaaagaaagactcaaagtacttttaatattaaatgttgaaa

SEQ ID NO: 1018 - DNA, 4001 bp, Homo sapiens
atagctgcagccctggcaaacacctagcttagtgctctccactagcagaatccccggggtctcaattccaacgggactttatgaagtaagaaaacagtgagatttatctcccaatagcacatggaacagtgcgccaccatgccaacactgccctgctccaaggggcggaagagtatggccaggaccctgacccctaagcaggctccatccaagtaagcttagctctatttgtacccctgacagccagttatggccattggcccttgtttggcccctcagggacgccaaagcaggcagaagagatgcatcctcattgtttgttatggcaaacgggggttaaggataacaagtgaacatcattccctgctttcaagtaagggagccccatctccccattcatcccagggtgcatgcattcctgcatttcaagttgtagggagcagatacagaaaagaaccaaagaggcagttcagaaagatgggctgggcagtcggggagcctgggagggccatggcagggagctatgtgggcaggcgagtagggaggagccctgtaaggctcccagcagggccaggacccttggactcagcacaaaacaaagggagacagccccaggcctgcctgctcaggactggtctggcttccatccaataaaggaaggacccttctccaaagagtcaaaacaacccagattgttttagttccagattattttctgagcccttggctcaacaaaaccaggtccaggatggtttggcatcagtataattccaggagactgagctgcaggtctcctgggttcccagtttcctactgcactgctcatgcagttcccatggagctggaacatagccagtctggacggaaggctaagtcacagcaccctgaagggaccatcccaagaccctagagtatctatccacaggggacctgcctgtaaggaaagacaaaaatagcccattagggcactgcaatactgcctgcccagaaagagagcaaatgccaggtgctctgggggcaccataccagcgggcacccagcccaggcctgagctctgccatcagtgacagtccccagaacttctgctctgtcactggagtgcccaccccagagccctcataccttctccacgttctccacagtgaagtccaaggctggtgctgctccagcccctgcagcccccggctgctcctcccgccgctccatctttgctccctccctggcagggaggtgggccctgatctgtctcctgccccagccccttggctgctggccccctgctagaccccggcttgggtgcccagggagtggtggggtgagggggggcccagggcgggcatggctgccgaggcctccccacctcgtttgggggtgggaggcttgccagagaccaaaattggtgctcttaggagacccaatgaaggggactccgaggagggagccgtcagtgaggagctctcaggcggggatcctagtggcaggtaacagctctgtccccagaatctgtgtggagggagtcacaggggagggaggcctgcgggggaaaccgagtccctggctcttgaggggtcacagggtcgatggcctgtacccacaacacccccgcctgggtgagctctcggctgctatgaacaggtcatggggctggagggtcacgggagagagagagcccttcgtggttacggaggcgtccaacgaagcgcggagatgcagctccgctagtctagggcgaagagtccgtggagttgaggggctgtggcaggtcccttccgttcggcctggcccgcgctgtgctcaacgcccggctacagccccgctacagccgctgcctccgccccagtgactgacaagacaagccaggccggccgggacggggcagggacctcggcaaggcgcgggctgccccgagcgcctgtccccggcacctccaactcaggcccccactcctgccagttctggctcggcacggcccggtacaggccggcacggcccagcggaactgcgcggaaactcattccgggtccttagccctgtcctcgcgccagctcgcactcccctgagcaggcggtggagcggctcgccgccccaggccgcggccgagtctaggccccgccgctgttcaccctgggaaatgtagtccgtgttgcgcctagccggaaggcggcgccctgcggaggaggccgggagcacgtgggttggggacctgcagagccccgcctgtcctcggcctaccgcggcgagcaggcattccgggtcagaccggcgcggggcgctgcggcccaactccttagtaggacgacgtgactcgaggggccggaggacggaggtgggagcccgggctagagggtggaggctggggaggttgcctggtcactctggcgctccgctgccgggggcatcctccggcccagcaaaggtgcagcctgggaagaaggcgtcagcaccacccagagaagaggagaggggacttggcacgcctcaggaaggaaaaaaggaaggctctcgggaccacccaataagcaaccgggaaaccacataccatggacagtgctcggggaatttcgtaaggtttttggaagtaactttatgtgtaactagagtaagagtagcttacatttaagtgctaggagcaggactttgcttaccttaggttcagttttcttaatagctctgaggtggatatttttattcatcattttcagatgagatgaggaaatcgagcttggggaaagttaggcttatcttgcccctggcacacagacagggtggcagaccatgccatagatctggtctgccacaggccccggtagttcctgcctgtcacccctccagttgtattttattgtttattaactcctgccagctaccctagcagggaagaggaaaaaattaaaagtgcaaagagctccgtagttttgttcaaatggaggaagctggcattggaagctggcattggcagcagctgctgaggcctgagaaggtccatgaaggcttccctgagaagagaaacttgatctgagcttgaagaatagagagcctgggaaggagaggggcccatttagctggtaagcaaaatccagtaggactctaagtcattcagcaagtcttcatcaataaagaatagcaagtaggccgggcgcggtggctcacgcctgtaatcccagcactatgggaggctgaggcgggcggatcacgaggtcaggagatcgagaccatcctggctaacacggtgaaaccccgtctctactaaaaatacaaaaaattagccgggcatggtggcaggcacctgtagtcccagctattcgggaggctgaggcaggagaatggcttgaacacgggaggtggagcttgcagtgagctgagatcacgccactgcactccagcctgggcgacagagtgagactccgtctaaaaaaaaaaaagaaaagaaaagaaagaatagtaagtaatttatattcattttaagagaatatatgtggggtggggaaggggaagggtatgagtaacagagatgaggttggaaagacaagttggtggcaatagattcttgtaggagtttggacattatcctaagtgcaatatgaaaccatgatggggtttcaagtgagcaatgatgattacatttgcattttagaaaaatctgcaacatgaaagacaaattgaaggaagaaagagaggcaggagacatttggaaggaggaaatagaaagccaaaataaagtaactgattccaggcctgtgcctagggtgtgaaataccttgggcctggtgctggctggcggtttcactggtggaggtggtggtgggcaggggagatggtgttgggagtggggtttaaatgcacaaattctggacttagtcctgagttcaaaacctgtttatgcctctttctagcaatgagaccttagcttcttctgaaactcattttagttaaggggttttaggggtggggggctcagcccagagaccacaacttagtcagtatgtgttttcttcctgctt

SEQ ID NO: 1019 - DNA, 4001 bp, Homo sapiens
tgtggtggctgaggcctgtaatcccagcactttgggaggcctaggtgggaggatcgcttgagtccaaaagtttgaggctgcagtgagccatgatggcatcactgctccaaagtctacacgatagagcgagacccagtctcaagaaaaaaaagatgaataaagtgaggaatcagagtttcaaaaaagacctcgagaactttataattgactttgcccagatgagaccatggcatttggctaaagttgaaaagatcagagcaaaagtggagttgttgtaagacagtttaaatacaagtcaaggtccacctttcatacaaaggtgccagacatgcatttggagcaccaggagcactgggtaccactcagggaaggtttagttaagatgaatttgcaccagactctcaagttttattcaggtgacaacttgaatgtgatgaggttcctttgctttgtcactcttccttcctcatactcaagggggacagacattaatgtgcataaacgaattttatttagaagccgctaaaaattcctttagattagtttatacatggttctcaaacagctttctcctaaccagtggtttctcctgtatagatctgatattttataaaacaatgacaattacaagtgggccttcaaaatggtccttagcctgttagatcccaaatcttaacatatttccaacagaagaaaatttgttttcaacagctctttcatactgtgaaagaatgtaaactaaatttaagagagatttgttctaaattcttttcaatagaaatacgtccagtaggagagctaactgaaggttttgaatatgatgggtgtgtgatgggacaatttcccatatctctgatgaagtatttaagtggtggtggaaatattcctgagttgggagattctgaggatttggagttccagtgaagctctgaccagatatatttcttacacaaagaccaagaagatttctcctcctgtttctggattaaattgttctttgtggtagctacactggacccggtgaaaggctcacgcggcaggaaattgatagaaaatctcgaaccaatggtttattttcttctccatcactttaaagcacacaatagaggacggagacaaagaatcaaaaacaaaggatgatcagttcctccaaacagaaatgcacaaaggtatttaataagggcaaattatttttaaaataaacgttaagtatggtcaggacagtgaagcaatcgcatatgcatttaatttctgggaaaacacgaagagtacaaacaactagctaggtttataactcagaggcagaaacttgtttgatgacatctattaagctttgatagccgccttttcgaggccctacccttcaccactcctactaatagctccccctactcttatcccagtacaatccagctggtgaagagaacagcgaaagactttggtcctggactcaaaaaatatttccccgaccgcgctacttcctccaacagcaccaagtctagctccatctccgtcccctgcagattctaggctccatctatcttttcaagtctccaccctccctcccccactcccaggctccacctcccccgaccctatccttcaggcgcgcctctcctctctcggactttcacaaccaccagcgacatcaatctctcgcttcctgctccacttctcggcgcccacatctccaactggctcaggctccccatgtccccagccggtacggagctgcggtcagcggattgtgcggctgagccatcctcgtgacggtcccgcctcactcaccctccgtcacctccagcaccttaatctgttcttcagcagccgcccgcacctcctgtactggggataggatcccggtgagcgtatccactaacgcttcctttaatccttgtgccactggacccggcagcccggaggccgcaccagctgccgccgccgccgccatcttttctcccctcagcccgccagccccgcggccgggacccgccaccgaatgacggcccccgcgcgcggccaatccgcgaagccgcgcctgcgcaccagaggcgggcgggagcgggcggagggcggggaatgaatctaagcctccagagacagcgcctcctgctgcctgaacgagaactgcacctttctctgcaaggatctctggatttgtgtgaaaactgagccccagacaggttaaggggctttcctaaagttgcacagtaagttagcaatctcatttggaataaagttcatgatatatgactttatattcatgcatctttcaggtgttaggagagaggaggcgggatgggaatagatgtagagggctttaaggagagaggtctgggtcacaaatagcccctattttaaaccacattcttttccccccaaacactgaaaaaaagttggctcaagtgactctcttcatcttagcctcaggaatccaaagaggggggaaaataaactaaagcaaactgggaagtggaagtgggaaaaccacggcccagtcccttggttttccagcctagatgagcccaacctcaaagctgggaagtggctgggcaggggagacaccggcatgtgaaagggagtttcttccagagtgagtgttgtatgtgactatttgagaatgaatcctatttgttgaaaatgtataaatttttttccctgagaaattatggctggacatttaaggggtgcgagaacaagagcagtttgatgatatggttgtcagcagctggtcgtgggaaatggcctacggtgcagagccgctcctgaatagcggagcaggtggagaggatgagcgctccagtgaggtgttaaaaatgcagggtgtggcgaggcgcagtggctcacgcctctaatcctagcactttgggaggccgaggcaggaggatcgcttgagcccaggatttcgagaacagcctgggcaacatagcgagacttcgtctctacaaaaaaatacaaaaattgcccaggcgtggtggcgtacgccctgtagtcccggctgttcgggaggtggaggtgggaagatcacttgagcccaggaggaggaggctgcagtgagcagtgattgcgccattgcactccagcctgggcgacagagtgacatcttgtctcagaaaaagaagaaaaagcaagatgtaagccaaggcaggaggatcacttgagcccaggagttccaggctgtagtgtgctgtcatcacacctatgaatagctactgcattccagtctgggcaagatatacagactctgtctataaaaaaaaataaaaattaaaaaaaatgcagggcagagtggcaagcatgtagtggcagaaaggatagaatgttgttggaatgggaggttctagagcaaacagaaacaggtattttttagtgagctgttcaggttatgtgccttcaaaatggttcccaggaacccttatcaagtgagttcattctcacatggcaaaggaaacgagttaccaaatcctaggtcacttccaagactgtggatgctggactggtaacaatcagggattaagtcatctcatcagaagattacttcaaaagaaagctttctcaattatttatttttgagttgggggggtcttgctatgttgcccaggctggacaggtgatcctcccacctcagcatccagagtagctagaactacaggtacacccactgcaactggcttgaagagagttctcaacacacttgtcacctcccatgttaagagggcagagatgagttatgttactacaatttcatagggaaaagattgcttcttggacccttcaattttgcaatggggaatagtaagcctatttactttcttgaagtggccaaaagaagttgaacttgattacaacagcttctaataggtcagttcacttttaccccaagaagaaaatttagcaaagtcaagagggtggtatgttttcaaacactgcagcaacccagatggaggactccggagccttgatgtttgggctggatgttttgagatccggtgaaggattct

SEQ ID NO: 1020 - DNA, 4001 bp, Homo sapiens
tacaaaaaattacccagtcatggtggtgggcgcctgtaatcccagtgacgtgggcggctgaggcaggagaatcgcttgaacctgggaggcagaggttgcagtgagtggagatggagccactgcattccagcctgggcaacagagagactccgtctcaaaaaaaaaaaaggaaaaaaagggggtgggggcggagaaaccatgtatttggccctacacagaaatgtgacctggaactattatcaacatgacatgactgtcaggccttttctgttttacatttctgtcagcacattttgaaccctagtggtttaattacaaggtacctcctctgtcccctacttcaaggcatcaagcacagccactgagctaaaatgctgcctcctgctacaagaaagagttgactgaatatccattcgggtggcagacaacagaaatactagtctgttaccatgcttctcagtaactgctgataccatcccactgtcagtggagtaggaacgtcatcccaaaaggtggcatgtggagtgaccatatttccaaaggaaaagagcacaattctgtgacgttgcatgcctcacgtgccccaaacttgaaaagcagattgttgactgggcaaggtggctcacacctataaccccagcactttgggatgtcctgtcgggaggatcgcttgattttttgttttttttttttgttttgtttttgttttttgtttttttttttttgagacggagtctcgctctgtcgcccaggctggagtgcagtggcacgatctcggctcactgcaagctccgcctcccgggttcacgccattctcctgcctcagcctcccgagcagctgggactacaggcgcccgccaccacgcccggctaattttttgcatttttagtagagacggggtttcaccgtgttagccaggatggtctcgatctcctgacctcgtgatccgcccgcctcggcctcccaaagtgctgggattacaggcgtgagccaccgcgcccggccagggaggatcgcttgagtcctagagttcaagaccagcctgggcaatacagcgagccccccgccgcaaaaaaaattgttttaacattagctggctgtgatggggcaagcctgtacttccggctacttgggaggctgaggtgagaggatcgctagagcctgagaagtcgaggctgcagtgagttgtgatcgcaccactgcattccagcctaggagaaggggcgagactgtctcaaaaaaaaaagcagattattaggaaacggtagaaatgcccagaggaactaaagcggacctatgtttgctggctttgaattcactgctgggaacatgtggaaactgcttcagcaaaggggtgtcagaaagaatccccggaacaagtgtcaaaacacccgtggttctttgtgcttgagttgggggcccggcctagagagctagccctaaactgctgctacactaaaagctaataatcgttcctgcgctacctaaaggtcagggaagggatctcagacaaacgaggcgacaacagagggactggggacacagcctcaggattccccagttggggcgggggaggcaggagcggtccggacgagaaggtctggggagggcgacacttagactgtcggaggaaggcctgcggcggcagaaggaaagacaaggaaatacacagttctagaggcttctctcactccagtcctcaggggtccggaaagccggagggagtagaagaggaagttcccaaccccgtcacagacgcgcccgaacgcaggccctccttacccgccgcttccccttccctccggcgcccgctcaggccctgcgcgcgcagtcgcgaccagccccggccggagagggcgggggaaacctggcgggggtgacgaggcgggagtgactgggccgtacagttccccgagaactggaggcgaagccgggcggtgggaagggacttcggacgcttcgcgggccctgggttttcactgcgcgtgcgcgaggttcttccgctcgcgggagactgggccgctggcgcctctcagtgcccactgatggggcccagggcttgggcttgcttccccaaggatcaacagcttagctgcaagcctctgcttctgcctgctggggccggctggctcgccctttccattccgcttgcactctgattcttgtggtgtcccaagaaggccgcggatctcagttaagcagagacgagccgaacacctggcacggtccttctctactgttctctcgaatcgttttctgagtgcatgactgagcctggcactgaagggatacttattttggggaaggaagaactcaaaagtccagtttttttcactgttgaccctcatgtgtcacattagtggctttcaaactgttttgatcccagcctacggtgaacaaaaatattttacatcaaactcaataccacatacttgtgagtatatatatagaagtatatatctaacataaaatctcatttctttatttttatttttattttttattttttgagacggaatttcgctcttgttgcccaggctagaatgaatgcaatggccggatctcggctcaccgcaacctccgcctcctgggttcaagcgattctcctgcctcagcctctcaagtagctgggattgcaggcatgcgccaccatgcccggctaattttgtatttttagtacagactgagtttctccatgttggtcaggctggtctcaaactccccacctcaggtgatccgcccgactcggcctcccaaagtgtatttctttctctttttatgagacagggcctggctttgtcgcccaggctggagtgcagtggtgccatctcggctcactgcagcctcgacttcctgggctctggtagtcctcccacctcagcctcctgagtagctgggactacaggcctgtgccaccaccgccaggctaattttttgtatttttagtagagacaagatttcgccatgttgaccaggctggtctccaactcctgggctcgagtgatccgcccgcctcggcctcccaaagtgctgggaggtgtgagccactgtgcctggcctgaaacaaaatcttcacaaaactatgtttacacttacgacccgcagtgcactaaatttttatttcttcttttctacttcattaccaaaaactgctaacagggacctattgtcagcaaacattgtcaaagacttggaaatgaggaaaagagaattctgtgtgccctttcagtgtaaggctggacggatttgcatccatagggagctctgactttctattgactaaagtatttcaccagaaaactggtagtacttaaaataattcttgcccgtctgtagaaaagatacaccaaaacattgttttattgacctgtagcatattaagccatttttacccttctcagcaaattcatttaaacattcctgattcttagcaaattcatgctacattcctaaatatcttactggctcccttataagttaatgagataaataaaatatttgatactttttttttatatttgtaagagagtcatggttttactcttcagaaaattatacttcagcactactaaaatcaatttcatgacttactctggattacacttgtgaaagttaagcatacagattgggccattcttctcatacccaccgaaaatggtgggaggggaaacactgagggcacatttcattgctcaaagaatgtaattctctgcaaccctgtctgctgaaactgcctgttgtaacctgaaaccagttttacccaatagctattgaaacaaactgccatgactcaaagactagtttggttttttggtggtttttgttgttgttgttggttgttgttttgtttttgacagggtctctctccctgtcacccaggctgaagtgcagtggtgtgattggggcggggctcactgcagccttgacttcctgggctcaatcaatcctcccactttagcttcccaaatagttggaactacagctgcataccagcaagccc

SEQ ID NO: 1021 - DNA, 4001 bp, Homo sapiens
tttcatctgcagcaggcaggtccctccaaaggtctgtcttccatcgtctggccctttggtgagcctgtcccccaaggcctggctgtttgatggtatagacgacggtggtccagacttgctgtagcatggttctctgcacttagccccagcaatgtttttttgtgtagtggccaaacttcctggggatctgtggggtgatttgaccctgtgacaggagtcatcctcctgttctagctctccagtggtcctgtctctgtaggactggtcctccagtggtgcgcttggttgtgactggtccctctcacaggcctgttccccatgttctaggaacacgcggggttcctctctgatcgggcccgcctctggggatctcagtgtttgtttaagaagtaggtactgttgggggagagaacatacattgtaccaagcaggcctgcttgggcatggcaggtcgtctctccctaacccccacccttgaccctaaatgttcagaaagagttccaggttagtgttacctccttacggctattgatggcctgttgcagccacagcaattccatggccaagtggctgcggtggtactgaagctcttgaagctgaggttggctgtggggcagtctttgatctgtggcttctgtgaaggagggaagaaaggaaggagaaaaccttgagggaccagaccctgggaaatggcctagccttagactttggaaactccctcccctgcactgcccaaccatgtggtggccctatcccggcagagggaagacgggaaagggatgcagcttatctagcgcaagcctttcactcttcagatgggaggctgaggcacagtgagggtcaggggcttgccctgatctttgcagagaggtacctggattctccatccttgtcgtgtctctggtcttctcttggctgggtttcctgttctgcttcatctgaagccaggagctgtgatctctgcagaggcttccttgatttgctgagctctctcctgacttcttcagcaccatctcctcccaggtggcctctccctcagactcttcacatgggaagtggttccacagcccctgctctggatttgctaccctgtctcctgctttccaggtctgatgggattttgccttctgagaaacaagagagatgtgagagccccagggctaaacccttccaagtatctgggcaccatgatctagcagacaagttggtgagggttaaggagtggggtgtgaggaggtgagtctactgcctcttccagtgagaaaagcttatcactgggaagggtgggttccaccctgcccaagtccctccttcccttctctcctaggtgtgttctacctctgggaggaatcgcggcctgggaatgcggccctcggtccactgaagcgtgcccaggtcgccctcgacctctcgtacaatcgcctcatactcagctcgcaggctctggaactggcgtcggaccaagaagccccggacgcaggcctggtatggagaacgagaggaaagaagtcccttatcacggtaagagagggggcatctcggaggactgtcctgaagaggtcgtcccggcgaatgcaagaggggacctgacggcggggaaaggataggtgggctgtgcgctagggctccggggggctcgagggacgatgccagactggatgcccctcctcgccttaaggctcttcccgtttccctgatccggcgcgagcgtgtggtgggagtggggacgcgcagggcagggagtccgtgggtcccagctttcctcagcgcggttggggacagccggtatctccagaggttggcgcgcagttaggggactgaacgtggtagcatctcgctgggaggtccaggtacgagaccccatgatttccctaaaggaaaaatcctgtgaaccccgcgcccgcccccgcacctgcaatgcagacaccttccgaaccagcagctctggctccatgggcgccaactgccaggcccgcccgcgcgcctgcgaagtacgtcattggtcggcgtcgctcctgagcatgcgcgggcgtgggctttgccccagccgttcccacggcaacctcctaccgtccagggtagaggcgtcctggcgacaggcgtacctgcgtccccccagcccccgactgcccctcccacagccgcaaggggcactccaatcccgcaggcggtacctccataaccgagggctgtctccgcggagaccgggaggaaaggcgcaaggaggggaagcaggacacggagccgcttgctttctttctggtttaattccattcaacgcccccctcccccatagcacctggggggccgcagaacacccgcccgagtctgtaaaaagtcacagtttgaagagaatgagaggggcagtgtgggcctgcgtgggacgcctacgcagcggactgctcctcaggctcggcgttctcggccaggtgcagcttctggctgtgcccgtcaaggatcgtggcgctttggaccagtccttcctcccaccccggtctcccatcttgcacaggtttagttccctcacctgtgcaaagggccggggacgagggtctcgggccgtctgtggactgaggttgcagtccccgcctgccctctctcaccccctctctcttcatccagatcgtgcaggtcagacacactggggtgtgtgcgcgcgcactcgcgctgtttctgactgaggaccaggtgaggtggtagtgtaaattagtaaaaataattgttcaatgctgaaaggataggaggacatcggacaagctttgctatgattgatgtcagctaaagtactcacaaagattttgatcagtagtaaaacatcccctacaaccacttttcttctaattttggggaaattctaaattcctgtacctgggtttgggcagtctgtggctaaatctgacaggactgcaagaggtggggaagttggttgtgtgtgaatactcctggagggctggagaggaggaaactgacctctcaggaacacacacacatagacgggttccttggaaaggatacatagaattactgaggtcttccagctgccaacaaagagaaaaagggaggcttctgttaggaggggaaccaggccaaatccccaatgctctgggggctatcttctggggaggttgaggggcccagagctcttggatccatgcactcccaccttttcacccagggcccaggaatggctttgggagtatgtaccttctccacccctcatgcccccaggaaccaaagcacccagacatgaacccacattgctaagcagctggtccaggttacggtcagccattgtcttcttctgctcctctggcagcccctcagtgaccccatcctcttcctcttcatcgtcctcctcctccccacacacatccaggctgaagtgcagccgggctagcttctcctgcatctcccgaacgtgctccagctgctcaaaggagcattccttccctggaacgaagcccctgtctgaaccctgggaaagagtcctggaaccctggaaccctggaaccatggtcccagccatgccccatggactgggccctacagccctatccacacacccgctgaaaccagcccccaggactcaccgaaggcctgcagccggccagagtggaaatcattgagcaggttcaggagtcccccctccatctcatagacatcagtcacctcggtcaggaaggagtgctgcaggggcgtgcctgcagagccgcttccacctccagccaggactgggcggcacttctctttgcctactctgggtggggtggacatgaccatgatcacagggtagggggcagtcaggcacctcccgatcttttgtgccatctgcctatgcaccagtttatctgtctatctgcactaactcatctgcccatctacttactagcataaatgggtaactttatggttccccttgggcactgggaaggggtgaggaggcgtgaagaggtcaaaaagaagtcttttctgctaataacacagccagagcagtgcctgaa

SEQ ID NO: 1022 - DNA, 4001 bp, Homo sapiens
tgatcttcccacctcagcccccccaccaccaaatagctgggaccacaggtgcgcaccaccatgtctggctaattcttgcgttttttgttgagactggttctcaccatgttgcccaggctggtcttggactcctgggctcaagtgatcctcccgccttggcctcccaaagtgctgggattacaggcgtgaaccacagcgcccaaagattattatcagaagagaaaaacatctgaataaattaatctaacatgataagtatgattatagcccatgcataaaatctatgggagcagcagaggaagcaaaggattctagctatgaactagatcttaaggaataaataggcggaacacagggaaaggcagtccaacagagggaaacatgccactcacttgggattaagtggaaggacaaagaaaattttaaaagatcacaaaggtatcttcactatcctttttggtataggtcacccgaggaggaaaagaatcttcaagctaaataaaatacagagtactgattccaaaactcaagaatagagaatccctcaagtgagacagcaatcataatttgccttagttacagtctcccttaatccttctcccttctctcccctctctctattctccttagaaacacaatacaaaatcaaacagaaagagtaagagaaagctacacacacagtaagaaaataaactcagagagcttgaaaaaaggcagagcttagccaatctgtctttgactcagcacttaatgtcattcccggttgttatcctatttccttatattgcatattctgcaatgattcagggaagggcagagcttatatgaatgagcagttaagtaaattaaaacacatgcgtgcacacacacacacacccctccaaatacagatttgaaaacactggccaaccacaggaaagccatcagttcctccaagggggtgtacaaggaacaagtgttggttgttaagcatggaaaataaaccagtaagtgaatgacatcatctcagagttatgaactgaggactgtgggcgatgggagggattttgtacatacacatgctgtctcaaaaaaataaaaaaccgaaaaacagttttcctgtccttctcaggtctggaactagttttcctttaacagaagactggacatggactttgctctttgaatcctaatagaaaggaagggagtggtggaaggagcaggttttcctttcattcagaaaatcagatagaacctttctgccccacccatccttccagctccagtctctctctctaaaacagtgtctttgaaaatgtggcccagggactaccttcctcacaatcacctggggtgagggaagaagcacagcagtgcttgttataaatgcagattatgggccccaaaccagaccttctggaactgaagctctgggacaggtcccaggaatctgcatctcaaacaagcttcccgggtaatttcaccccctgtttgacaggcattgtctgaaagcggcatctcaaagcctaagagtcccccagatcccttgaggcgtcttgtccggtggcatcgctgggcaagtttggtagccagcagtaactgctgaatttcaaggagccattaggatcacctacattctcccgactccggaaccccagaacttggaaataggaagaaagttctttgtaagctttaaagcgcagcacattagtcaggggacaatgcgccgctcacagttccactcgggcccacggcgcccgggctgaggattcccgtcccactgagcagtcccaccgccctcgcccctcaggcttcacgcccgacacacgccccaatctctcccgggacagccaagcccccgaccagcggcaccactgcgagacccttctctgaccctctccgcactcacaggctgcccagcctgggcccgctgctctcctctccatgttcctccttcttccaggtttgaatctcccgccgttgggccaccgcccctcaccgtcggcaccgccagacaggacacttcccgtccacaccgctgagaatcctgggatttgtagttcccggccgcggagccgggccgcccaggtgctgggagaagaggcgccccaggccggggcagtaccgctccccttacagcagttcctcgtcttgttccttccaggctccttttctgcttaacagtcttattctagctgctgcccctgccattgcctctgtcatctccacctagtattcccattaacccctactctgcttcctatgtgttcccgagtccggctaacttgtgggcctacttggcgctatgcactaagctaggtgatgcgaatgcagagatgtatgagggcagtgaatgctctaaaagagtttgctgttctggcacaagtgatagacatatagtcaaataaattagaggtcggtgatgcacagagggagggggtcattgctgtgaataagagcagcgaatgacagggaagacgtcctggtggaagtgacagctgatttgggttgagaagtgaaagagaattcatcagattgaagaagagaggcagtgcagtcagtggagacagcatgtgcaagaacgaggaggtgagttcgggaacttaaacttggttcagttttagaggagaacaaagctcagccagggagaggccagaagggatcctggaggcacagggccaggtccagtagcaccttgggcaccatgctagggccctggcatggggtctggtgagcagtcaccagccaaggaacactttagacataggtcagagccagatttgtcctttaaaaagagccatcttatagcaggggattggaagggggtgaggctaggggcagagaccagttggaaggctactgcagtagcacagaagagagataataagagcctgaactaggccaggcacggtggttcacacctgtaatcccagcactttgggaggcggaggcgggcagattaactgaggtcaggagttcaagaccagacaggccaacatggtgaaaccccatctctagtaaaaatacaaatattagccaggcgtggtggggtatgcctgtaatcccaggtactccggaggctgaggcaggagaatcgcttgaacccaggaggcagaggttgcagtgagctgagactgtgccactgcactccagcctgggcgacagagtgagacgccgtctcaaaaaaaaaaaaaaaaaaaaaaaaaagagcctgaactaataaaaaataattatgacaccaacaactatgctgaaaaaatattatctgataggtttccccatcttgtatttctccttttaccctttccccacactccatccaaacaaccaagcagcctaggcttatagcttgggcaggtaggagaggagaatgtgaaagaacagaaaacagaaatccatacctagagccttcagaggaacagaggagactcaggggctgagacaaaactgggaaaagtgtaatttgaagagtggatgcccccctgaagatctgagggattccccttacctctcaccagctgggggagacagaatctagatgttggtggctcctggcaactggggtcccattctctgcttcctggaaaggaccctaggtgtacaggaccctgagaaagaacagttatataattagccaggcagacaatagacagctttgcagaaattcctgacctagacagaaaggaagtatccgaatgaattactcccctcttctgcttggaccctgggcttgaaagggccaggcagatgagaagaaagaaggtgtcagtggacacctttgtgaatagacggctgaggaccagatgagcctcatcttggcctcatatacctccccctacttagactccaccctggggaaaaggagggggcaaatccccagacttgttcacattgtttccatcatcccagtggaatcagggcttgaaacagaagttgagtagagattaatttcttccacaccagagttatggaccaacacacctatagtgtttactataggatgggtactatatttagcatga

SEQ ID NO: 1023 - DNA, 4001 bp, Homo sapiens
gcggactgttgctattcctcctggtagtggagtgaacctggttggcatcttttgaggcatgactgccccctgcattgtctgctactaagatcagggctgccatgggggactggccattctgggccgcttcaggcggtgtggtccggttggaatgaggtgaggcagtgggtggtggcggagacacaaaagaggatgtaggagtcatggggatcttgagcccctctgtggatgtggacagccacggctgggcctctccgttgatcttagggggcccgacttcaccttctggttctggagagggcttccttttccttgctgttcttgcaactggaaacacaaagaaataaaaggaaaaaggtaacataagtggcggtgcactgaaagagatcattctcttcctaacccgaaacaaaagtcgttacagaattcctcctctctaaaagcacagacagaaaatactcatatacgagtttcaggtgcacatgcaacttaaaaccttcaggcgtacgggattctgaggcagcagactgatttaaaatggagccactgaaaatgacacgcttgtaactgcctgtttgtacacatgcacaaaagtaccctcgtttgcactcaacatgtgactgctaatgtcccccaataggttaaaaggtgactggtgccctcatgctcccatccaagaatgtgctgggaaaggaaaaccccgtgtcagagcgtatcagcccagtctgactcatctctgttatgctgcttcagcacatgaacacgttgccaccaagcactggttccgcctcaggcagatcaggaagtggggtgtttgttgtttctgggctggggtaaaatggtgaatccaaagaaccacccttcctctgctctccgtccccttttctcccctagaccccctcacttcacagccgcccctacctgctttagacccgttggccccgttggcctcgaaacccaacaacctgcctgcagtcagggccggctccttcttaaacttgctctcgaagggccccgagtggccgtgctggtgcagcgccagcagcgtgtcgcgcacggtcttgggcctgttgacccagtcctgctctccagacccgcggctcttgcccgcaccttccgcgctcagctcggcggccccggccgcggtggacaggctgtcggccgggccccggtgcgcaggcggcggcggttgtttctccttggctgccgcctcacgctgctcgtgctccacggcagcgctgctcgacacggatgccggccgcttgtgggcgcccagatcggtgggctgcgcggagcccaggctggcggccgcggttccggacaccgcggctaaggaggcggcagcgcggccgccgaggccgagcgcggtgggcagcggcgtggccgagccgttcatgagcggcaccagggtgggcggcaccgcgtggccgcgccgcgggttcgggctctggcgattcagctcgggcggctcctctagcttggagaagccgttgggcaccaggatgccgttcacgggcggcggctgcggcgtcggcggctgggccaggctcgctgccgggcggctgctgccgaagtcagagccgaggcgcgggggcctctcggccgcggccgccaacgggtagcgctccaaggcctgcggcgcgcgcggggccgcctcggggccgccgtggccaagctgctgctgctgctgcaaaaggatgtccttggcggagagcggcggcggcttggcggcggccgaggccgcggcgccgggtggggagcgaccctccgggaagcagccgtgcgcccgcttgagctgccgcgccgtctcgatgacgaactcgacgcggtcggcgccctcgtagttgacgcagccgcggcagacgggttcggtgaagtcccagatcatggcccagggcatgcggggcaggtcacacaggtagcacgactgccgccgggacgcggccgccaccgccaccgccgcggccatgtccgaggagcccgcgacgccggaggaggaggcggaggaggaggagggggcgccgccgccgccccccaccggcaccacgcgcgccctcctccccccccaaccccgcgtctcccccaccagcggcggcggcggccgcaaaggcggcggcggcggcggcaaagcccgcgaaggctcggcgcccgcgcagcgcccccggtgcacgaggggcggcgggcgcgaggtgaggggctgcagccgcggcagcagttccccccggccggcccgggcacgggcgggcggcgcggcgcggcggggcggcgggcgcggcggtgggggctcggccggagccgcggcgggcctccagaccggggcgaagacgggccgcgcgggcgcgggggagcgcagcaggtcgcggcggcggccggcacggagtgcggggcggggggcggggaggccgggggggcagggggcggggggcggccgccggggcaggctcagcccgagcggcggggcatgccgcgccggggtggcggcggccgggcggcgtggagctcgggcgcggcgcgggccccgggtcgctccgccgctctctcacagctcctggcgtcgccgctctccagcgccagcgtcagcggccagcccgcctcagctccgccgccgccaccgtcgctgctgctgctgccgccgcgaccgctccacttctacagacttgattcttcgacagtctcgcacggcgcctgcgcgggccccctcccctcgtgcgcgtgcccgccctcccgcgcgcgcgctccccctccccccgcgcgccgaaggagcgctgccgggagagccggctacgcggcgcccgcccgcccgcggggcagcgcagcagcgcagcgccggtgttcccttcggaacaccgcgcaaagtgatcgagtgcttttcctccactttccctcacttcgcgccccacccggctgtcccgaccaccctcaggatgttttcctctggtgtgcctctgggccaaatcgtgctaaaaatcattttttttcttttatgcaaggacactttgtcacttggtttccgtcagtctcctgagaatggggaatttaggtctagcgtggttcacagttctggttttttaggagttatacttgaaagctcaatgtcggacacatagcatgaaatccgtcactggtgctttgcatttgtcttggaaaggacatacgccccgcctgtcccttttactaactagggagactgtgaatattcccaagcccagcaccacgtgcacacgccgccagctggctcgcgcgttttccacggagccctctggaggggagggagcgcggttcggactagcctctcccgaacaccaagtgccgctcttagccccgtccagcccgccctgttcatcgggggcctcgccgcgccagtcgccccggctgccttatgtaggtatgcgcggcgggcgcgtgacgtgggcgcggggccgtgggcggccgccgccgcgagtgcgcacgctccgcgcagacgtgcctcggcgccgctggcactagggcctcgtggaacgaatgcacattccagggatccggggtctacggccagcgcggccgcgtcacagcgcaggctccacccccttcggcgagtctgggcgtcgaggcgccgcccccgggcccgaacttggactcgaggtggcgggaggcgagggcgcgagtggggggggggggggtcctgctcgcctccgcgaggttcccgagggccgtgggggcgaccggctggctggctggcccgccgtcccgcagggcgggccgccgacggaggcggacttttgccctatatgccacccaggccgggatgagcccggcctgcaggtctgccaccgttggcagcctcagactcagcccagactgaattgaatgtttgagtttcgcacttttatcgggaggaggagctagtgtgtgttatggtaaatcactttgggctggtcgttagtctccctaatacacgtaggcttagtcgctcttcaattgggacttttacacttaagctctttaagggcggcctctggagc

SEQ ID NO: 1024 - DNA, 4001 bp, Homo sapiens
caacaatcctttgtatctgtgtaggctttacaatttttacatgaacctttacctaacatgtctgatttcatcctcataaacctgaatgtgatattactatccccattttacatctgggctgaggtgctttatttcctaagtcacagtgttctgtaccaaaccctgccactgcaccttgtcttccatgtccctctcatcttctgcgcaccaagaaagtaaactaaaaacatcaacaaagatcccagcagcatagagggccaataaagtgattgaggtggagactgcataacatccactctcaaacacacctaaatcagagttctctttctaaacactcttgccacccaaatcccaacgcctgaagaaccaccttagcctagttgaactcatcttggtatctctagctgccatcacagcaaaatgtaaggcctgtgtctctaacaggtacttaaacagccaaaggacaatgatgctaacctatctattcccctcacagtgagcatagaggagggacactttcagcctcctccgagcataactgtcctctcccatacccctattctagggagcaggtcctccataaacaccctcattgccacctccatagctcctccccagactagtttccaggggcactgccacacaaaagccgagatttggccgtcagtggttttgctcaggttaaaacacacgccatttctcgcagacaattcttagcagtcccagctcttccctttctcctgaaagaaatgaaatgccatcgtctaagttccgttcctcaggcttccctgtttagccctgcttaggggtaaactgcaggcctctagtcaaaatgcccacacccttcccttctgctggatggaagctgggggatggcgaatgggagttacaaggtattgagtgccactgtcatacatcatacacacgtctcatcctaaaccacactcctgggtcaacaccagctttcaccaatcccacccaagcgccttcctctctctatccatctcttttccctgacttccactcttgacatccaccaagagaacaggttggaacaggatgacccctttaccacaaagcaggctccctgtaaagagtgacacctcaggcctcctttccaagtcaggcctgggagactttccccattctccacaccaccctccagccccttcgggcaaagagggcccacccccagagcaaccacaccccagcgccaccctccccagcacctagctccgctccttggaaatccaaggttgtctcccaggcccagggcgaagggcctaactgtgccaaacagactcagggagggaagacaaaccgccaatgctccaaagctcctggccaccctcactccagtttcccaaaacgcccactaggatcaaggacctgcggacctgggaagtcccctctctgggacacaggggccagccgcaagttggtaagactgaagggggcgcggtgctttagctctaccggatagtggggttgttgacggccgagagcagtgccctccgcttcggcggtgggggtagggagagtagacacaagtgtagattcgagaggggcctagcgctacagaactgaggccgccccaaagctatctggaaaagggcgacaggcacccagccccagtgggtacccaccccaaacacacagatgcccccaagcaagttctctcaccccctacaaactccggggatgggtcctaccccacccacgggggagcctctcctccctcaagctggtccccagaagttggcgtacccacctttgctcaatctgtccaccagaagcggacgtccctccgaaccaagtccgcagcgaagatcacccgtcgctaccacgctcctcgacgtcttagccaaggggcgcctggctctacccaagtagggactgcaggttcctctccccgtcccgcaccagcccttacctgcccagcccaggtgcgccgagctcacgtcagcgcctcgccccaggacgccgcagccttcgcatccgcccggccacgcctcccaggtgtggccacgccccccggcgttcgggattggcgagttgcaagaaatatgacactccgcgtttctgggctgcccggcccagcggcgtccgtccagcgtcccaccctactcctccgcttctaactccggctaagaaagtcccagattcaggcctagccttacggctcagggctggtggtcctgggaactggaagcgactgggagttcagatctaagtcgagagggtgcctccctccttcacggcccataattaccctgcagtatgcagacagttaagcacaaataagggttttgagattctgggttggccctactactcgtgggcctgtgtaagtggagttgcacatgaagaagagaaccaggacacttggtcctgtctgggagaagccataggctttcaggactagaattctacctttactctgcctcttacccgtgtgaccctgggtaagttacttagcttcttggcttcttggtttcagtttcctcatctcttcaatgagaataataattccttccttcttttttgttgttgtttgcttttttctctttcttttttcttcctttttttttttttttttttttggagatggggtcttgctattaagttacacagtctggtctgcaacacctgggctcaagggatccgcctcagcctcgcaaagtgctgggattacaggcactggcacccagttcaattcctttttttttttttttttttttttttaggcagggtctggctctgtcatccaggctagaatgcagtggcacaatcatagctcaacctcctgggctcaagcaattatcccacctcaccctcccaagtaactggaaatataggcatgggtcaccatgcccggctaattttttttttttttttttagagacagggtctgactatgttgcccagactggagttcctgcttcctctgatcactatcgtgtaatgagtaaaagcatagcctctggagccaactattggggtttagaccccaactccatcagttactacagacttgggaaagtttcttaagctttttaggccctggtgtcttatctgtagaaagaggttagtaatagtacctacctcaggggtattgtgggaattcaataactacatgtaaactgcttgcaacaatatttagcacttatcaagtgctttatatgtacttgcaattattattggcataaagattaaaaataccatatagacagtgcgtcagagaacaagaaggcattccttgttattacctgaaattcaagtcctgcatgtaccctaacaggtgcttgatgagattgccctcaccttcctcatctatctagaggaccggtttgcaggaggctgtgcaacagtaaatgagacttttaaaaatcccccaccctcaaccactgagctgtcgtaggtgaaatggggcatgcgcaggtcacttaggttttggtgtttaaagtaatgagtgagaaactgtggaggagtggtacaatgagttgaactgtcacccacatacaaaaaaatttgtatttgtattttgaagtcctgaccacccccactgcaaccacagccagatgtcagaatatgaccttattgggagacaggatccttatggaggtaatcaagttaaaacgtggttattagggtgagcctgaatccaatatgaatggtgtccttataaaaggaggagatttggacacagaggcagatacccacagagggaaggtgatatgaagagacataaagagaagacagctagctgcaacccaaggagagatacctggaatagagctctttttttttttttttttttcacatccctcagacccttgattttagacttttaaactccagaactatgaaacaaaaaatttctgttgttcaagccacccactctgaggtacattgttatggtagccctagcatactcatacaagtgtgttgaagagccccagattgataataatgtaggcatgattccaagtcccaattta

SEQ ID NO: 1025 - DNA, 4001 bp, Homo sapiens
gtgtctccagccggatcctcccgagggctctgaaagctgaggcccaagtgcccagagtccggactctgcatgtccctctgtgccccgtcctcgctgcatcccagccgacatccgtgccccgtcctccctgcttcccggccaacagctggcttctaggagactcatttagcaaattggaataggagagacagagaagggtgcatgggtgggggaaggggtgtagcttgtagcttgtactgaattgggggccccccacctgggacaagctctgcttcctggacggtgtcagccccaactccaggtgccctccactgctggccacggcccctccttcacgcacagccttgagggggtgtacttagccacccaggctgtcttctgcagctggccccagtggtgatgtgagtgctcaggacctgtctctacccctccctagcccagcccaggcaggtggagcaggctgtgtaggctgggctagggacggctgaggtccccagcccccagttcctatggagagcctgcctcacagcccaccgggcaggccccaaggactcaccccttactgctcccaggggcccactgggagcctccccttttgatctgatcaggcgggtccctgcctaagccgtctgctgtcccagatggaggacaggcaggatgggctccagcaactgtgtctctttttcttttcctagaagttaatttcccaaagggtggggagagctgtcttacttcagtttcggggtggggggctccctattttgatccctcgaagctgtaactgcaaacccttatcccttcacttggcagcccaggcctggtcaccaggatggaccctgggttctccctcctgacttctcccgccccatcaccaggggtctgaggcggacgctggaggaggggcaagcacagacacagaggcggccatttctctttacaacagcctttatttccggcccttgatcctgctcggatgctggtggaggcccttagctccgcccgccaggctctgtgccgcctccccgcaggcgcagattcatgaacacggtgctcaggggcttgaggccgtactcccccagcgggagctggtcctccaggggcttcccctcgaaggtcagccagaacaggtcgtcctgcacaccctccagcccgctcacttgctgcttcaggtgggccacggtctgcgtcagccgtacctcgtaggtgctgctgcggcccttgttattcctcaccaggatgctcagaggttcgtcgcatttgtccaccaccagcaggaccgtgctgccggggcccaggccctggctggcaagggggaccctgtcctgcagcgccacaccgctcgggtggacagccagacgctgctggaaggcgtgcacgccgatcttctgggtgatctgcgccttcagctctgacaccgacatggagctgctcagggacacctggaattcgttgcccgccagcatcttcaccgtcaggtcccagccctgcaggcgtcacacaggttcagagactgcggcgccagccccaggcccaccacacacaaggcactggctgcagggcgagctcctgtacccagggacagtgctccctcctgtctgtcctctacatcccgccggcagggaccccaggcacagaaggcactgagggctcgttactagaaggccagctgcccaccgccatcccgtggcctccctttacctgctagggtgcccctctgtgccccaccctgaggatctcaggggtgacctgctttcaggagcacacttagaacctggccaagctctgagcagctccgctctccctgcacccctgggagaccttggctgggggagggagacgaaaattggctggcacagagcccacctccccccacctgtgacatctgccttaccatggctgtgggctgtgggctgtgggccacggcacaagctcctgtactggcaaagatgagttcgctgcctctcagccgccggcttcggcaggcagcaccggccctattataagcctgaggcacacacgtcagggggcgtgccgccgagcctgcgctggtggccaaatttggcttcagtttcggtttccctttcccgaggcatgccccagagtgagcggaagaaacaaaaccgaatgaccgaaagacagggaaaagcaaaagtggcggggactccggacagcggacggcatccccacccccacccaacaccctggaaacacctaaatatcgcgcattccagatccttcacaggatgcactaaagctgtcatcacatggactaatggtttcattttccatttaccaacttgcaaaattagtaaacttggaaaacatccccatggttaattgagaaacaagaactccaaactacccagagataacaacactcggtttagggcagtatttgctcagattggtgtttttttgttgttgtttttgtgtttttgagacagggtctctcactctgtcgcccaggctggagtgcagaggcacgatctcatctcattgcaacctccgcctgccaggctaaagcgatcctctcacctcagcctcccacgtagctgggaccacaggggtgcaccaccaggcccggctaattttttgtatttttagtagagatgggggtctcgccatgtcgcccaggctgatctcgaactcctgggctcaagtgatccacctgcctcggcctctgaaactgctgggattacaggcgtgagccactgcacccggagcctcagattgttttttaataaaagagacctatcttttattttctacaaaaatgaactctgggacactattgagaaagtgaaaagacaatccatagaatgggaagaaatatttgcaaattatctatctgatgagggcatagcatccaggacatatagagaactcttacaactcaataaaaaataaaaataaaaaaaaaaggcaactcaattttcaaatggccaaaagacttcaatagacatttctccaatgacatagaaacggctgtaaagtgatgttcaacatcattattaattggggaaatgcaaatcaaaaccccagtgagatgctatttcctgctggtatgactgtaataataaaaataaaggccaggccgggtgcggtggctcacgcctgcaatcccaacactttgggaggctgaggcgggcggatcacctaaggtcaggagtttgagaccagcctggccaacatttttagtagaaaccccatctctactaaaaatacaaaaattagctgggcgtggtggtgcacgcctgtaatcccagctacttgggaggctgaggcgggagaatcccttgaacccaggaggcagagattgtggtgagccaagattgcaccaatgcactccagcctgggcagcagagcaagacagtctcaaaaaataatataaaataaacataaaggcagtaacaagcactggggaatacatagaggaactggaatcctggtacatgcattgctgttgagaatgtaaaacagtgcggccgccgcgatgctcaaaacgttcaacagaattattgggaacccagcagttccacttctaggcatgtgtccaaaagaattgaaaataggtgttcaaatacttgcatacaaatgtccatggcagcacagtttacaataaacaagtagcaggaacggagcacatgtccatcagtgatggatggacacacaaagtgtggaatgtccacacaacggaatattatgcagccatgaaaaggactgaggcactgattcatgtgaaagaaccttgaaaacgttatgctaagtggaaagagccagacacgaaggccgcagagtgttggttccattcaccgcaggggaaacgaccggaactggtagagccgcagcacaggaagccgaccccgttaccgggggccagggagggggagtggggggtgattgcttcagagccacaagcccctttgggggtgacaatgtttcagaactccacagaggtgatggttggacaacgtggtaaataactaaacgccactggattt

SEQ ID NO: 1026 - DNA, 4001 bp, Homo sapiens
tccagagagggcagagtgtggacctgaaactgcaaagacgtggaccaagggcgccctctggcggcctcctgagaccagcaggtctcttgctctcccttcacttcctctttcacccctcccagctcactctcctttccgttcatgccttgcgctccatggccagcacagggctaggagtgagatgacaacccgaagtgccggccctgtgccgtttatgccgttcactggttacctgttccagttggacaatatataccccagctcctcctgtcaactttctgccctctcttaccaccaccactttccgcacttgccccaggctactttttgcttgggacgagctctccacctttcctctctcaagcttaggctccaactcgcaaggtttttccaaatcaagccctttctcctgacactggtgtctgcagctctgtctagtttcatcacttgctgttatttttctatgcagattcccagttccccagacccaatttagaacctaaaatagtttttttgtttgtttttttgagacaggatctcactctgtcgctcaggctggagtgcagtggcagtggtgtgatctcagctcactgcagcctcgacctcctgagtagctgggactacaggcatgtaccacacttggctaacttttttgtagatgagttccgctatgttgcccagacagggcttgagttcctgggcttgagcgattctcccgcctcagcctcccaaagtgctgggattataggcaagtgccactgcgcccggctaaaatagatcttgaccaatgaagtttgtgacaccagctaattgtaccttcctgactttcactgcttcttccaccgacagggggccttcttcaacaactgatagattctcctccctccctccacaaacgttggtgtcttcccatagtgatatcctttgctgaaaaatgatttagacctctctccatccacctccctgccaccatcaagccccatgcttcttacctggcctcgagcaatcttgaagggtgtggcattcaccatgtgctgcttccggataccactccacctggttcggtagtccacaatgtggcaggggggaagaatgtactcgtcataaagcacatctccgttgtagttgacaatgctacatcgagccaaggaactaacatgcccctttggtcctgtgcccaccatctcacagtcaattgccaccatcttccgtggcaacttctgggatgctccggagcatttattctctgaatgagcttgggtggagttctgtggggcattcttctgaggatggttctttttagaggatttcttctgggagctcttcttctgagagcgggttgggtggctattgatctttggaagggcactctggaactcccccagcaaatctactttagcagcaacagaatcagccttttttgaaggggcaggggtcaaccaagacactgcagctttcttgtccaggggctgtcctgacccattgctggaagcagctgtcttcttttttgggaaggaaggggtcttccaagtgccatcgaccgtaggagtttcccctttctttgaaggttcagagtgcaacttaggcgccttgctagggggttggttctttttactcagaaagcctctccgttctaagagcctccgcttcttgacaaaatttcggtgcttggcatttccttctaatgcctttttgggaggaggttccccaaaatccagattgagcagtaaagtagacatagggacaatggaaggcggaagagtagttgggaagagtggcttatggatgaaaagaggatgtgggactcattctctgctgaatcctactgtccaacatgtggaggtctgtagtacaccctggggaagaaagtgatcctggtaattgagctcctaggcctgggagaaaaatgaggtaagctcgatctccgtaggacttatggaaggaaagacatcagagcaatctctcagacagaggggaaatgaaaacataacatgaaatgatggagggagcattggtgttagccagcaagcctggattctagtgaagcccaattcaccagccatttggtcttagtaaggtcattaccgcgctctaggtttgagtctcatttgtaaaatgaagggagtggaggggcttatagagctcgaaccctctgagtctaagaggctagaacacgtgcgatctatactccgcctaggaaaggaacatctaggtatgctcaaaaacagtgagaagtatggcgtagataacctctgggctacccaggcatccgcagcgtggaccaccaatagagacacaaatccaggcatccctttcccttggctccaggccggaattgggggcaatctccgcatgcatctcacccaagtccttctcccacgcaaggaccttgacaccatctaccagcgcgggggtgggatcgaggcttgaggcagcccacctggataagcatacttcggatccccgcggtacagatcgatctctcacgctcacaaacctacctcccagacgggtccagctaagaccggaagcgtccggagccggatgcggaaatcggtgcgcgccgacgaagcccgggaaggcaggcgcgcgggttagaacgcgccagaggtcggcgcgcgcacacccgcaccgccccgaccccaggtagtgaggccagtgattccgagtgtgtgaggagcggcagtggcggcggaggagggggcggcgtgggtgggggcgggggcgggatgcgctccccggcccctctagccccgtggtggtacaacgcgaaggtgtgggaaggccgcgataaaccggaactgcagcccgccggacacctccggcttcacttccgtaagaggagaggagtgtacggcaaggggcgggaactggaacttggcccgcctcgttgtgagctgagctcagcggcacgcttttgtggcgtcactgcactgttaccccgccctacgtgtctctgacgctgacaccttctcactgtgaaacgtcgcgacctgtgacgtctggggggcgcctcaaatcttccactccagcatcggatcccggaaaggcagcgtcggagactggacccaaaactcttcctgttctgcctgcagagttgagccccgtccgggtcctggacccgcgtagtactgaccctggatccctgttcactgcgttctcgctccccgcgctccctgctggaccccgggatgccgggcatctccgcccgaggcctctctcatgaggggaggaagcagctagctgttaacctcacccgtgtcctggcactctaccgttccatcttggatgcctacatcatcgtgaggccacaggggcgtgggtgggatgtctctggtcgtgtggttggctaggtgcccacgtcagggagagaatctggagaattagcctctgatctctttccttctatgagtttcagtctttttctgtacaagaaggggttaaaactggagtgatccctccttttttttcagctgacataaataatatttctttttttttctttttctttttttttttctttttttttttgagacggagtctcgctctgtcccccaggctggagtgcagtggcacgatctcggctcactgcataaataatatttctagtacctacctagattgtttttgtaatcttcccagatccaaggtaataaaatgcgtggacattggaaccatgctgcaactatgttgaactcttcttggagcatgtcaggtgttccaagaacacacgttattcatccaagctttgaataaattcgtggttttgtggtatagtagacagtcctggctctggaatcaaaaaggcttagtctagaatcctgcctcccctatgatgttaaccttaggcctccctaacccccaacttgtcctagtccgggtttcctcagctatacaatggatcccagtctgaaggattattgtgaagaataaatgagagaatgtgtaaatggcaccaccatccactgaattgtttagaccacaaacccagaggccatcat

SEQ ID NO: 1027 - DNA, 4001 bp, Homo sapiens
tccacacactctcctcaacaaactgtgagggtcaaaagagggagagggcctttctgtatccccagaacaaccattgcttccaattctccccaaaatagggggaatgaaaggaagctaaggagcactgcatgtctggctctctccttctctatctcttcctgacttccagtgtcattgtcacactctcactgtctttttccaatgtctaggtccctggttgattccagccttggaaatctcagtggtaattaactgggtggggccactcgcctgcccacacacatagtttgccatccatcctttccaagggtcccatcatcctgaagtttcccacaacctgcttcctttttaactaatctactctcccaactggtcccctacctacctccatggtttcctcagccttcagcccattctaaaggtgcccgaccctagctaatcttcccttttgaccccaatgcctttaaaatcagagctggtattttaggaaacaatgattacagggcactgccaaggaaaaattccaggcctcttgtccttcccatggtcctttccccaactatgtcttgctctgtacttctaagcaaccccctctcaggctaccccctcaccattaccaatggctatagctttatcccaaaccatgctcattttcagaaaggtgtttagtatgtgagcagttttgcatccagaaaactggcagggctgtatgaccagaaactgcagctcattggttagataaacccagagttctgaccacatagttagtcagttatgcctcaggccccagggaccaccaagggtaagaagttagggaggggataataggaatcagactagccacgtggaaggtcacatcacatttcttttttgtctccttacccctatagggcttaggatgaagattttatatatttagatacaaatctcagccaagcatggtggctcatgcctataatcccggcactttgggtggctgtcgggggcggattgcttgagtccaggagttaaagaccagcctggccaacatagcaaaactctgtctctaaaaaaaaaaaaattagccaggcgtggtagcacacgcctatagtcccagctactcgggaggctaaggtggaaggatcacctcagcctgggaggttgaggctagagtgagccatgatcatgccactgcactccagcttgaatgacagagtgagaccctgtttcaaaaaaaaaaattagctgtgcgtggtggcgcgtacctagtagtcccaactactgagctgtggttgcaccactgcactccagcctagacaacaaagtgagaccctatctttaaaaaataataataattattatatacaatatataactatataatatataattatgttatatattatatgtatattatatataatatataattatgttatatattatatgtatattatatataatatataattatgttatatattatatgtatattatatataatatataattatgttacatattatatgtatattatatataatatataattatgttatatattatatgtatattatatataatatataattgttatatattatatgtatattatatataatatataattatacattatatattatataattattagatacaaatcttacacaaggtcctaggcagctttagcccctgccagtctcaatattcaaacagtcatatgtgagggcataaaaatgcacaaggacacagacacacatacaagaaatgtacaaccagtgttcgcttcctaacctaaatcccaaagaattttaactataatggtcccaattccaaacaatctatgtatcttccatccccaccagaaaccaagaagttaacttccctcacctgtcaggaacaccaggggcaagaacaggtgagtgacgaaggggagttccatgcctgatcggtttctgtccagtatgagaagtcctctggcctctgtccctctccttttctgttttcttcactttccctcccatcctgccccctcccaatggcagctaaaaataaagttggaaggaatgggaggagtgatggtggggaactgtggggagccccagaccaaggaaaacactgagcgatcttagtctatttctctgccttggtgctgccccctggaggcctcatctctatatccagagaacatatttttttgcccatttctgctatttctttttttctactgtttattgttgccaggtcaataatgctttcctcaaatttggaacaggagtgggagatggattcttttttataagaaaagaatcttaaacttttgtttaaaagttttagacaaattatttatattgagaatacagacagggtttcactatgttacccaggctggtcttgaactcctgaactcaaggaatcctcccacctcagcctcccaaagtgagccactgcacccagctgggagataggagatagattcagatttttttttttcttttttaaggcagagtctcactctgtcacccaggctggagtgcagtggcacaatcttggctcactgcaacctctgtctcccacgttcaagcatttctcatgcctcagcctcccaggtagctgggactacaggcacatgccaccatgcctggctaattttttatttttagtagaggcagggtttcaccatgttggccaggctggtcttgaactcctgaccttaagagatccacctgcctcggcctcccaaagtgctgggattaccggcgtgagccaccacgcctggccgatagattcacttcctaaccttatttatctcaacctggaatatggaaaatgaaagagctgatagcagtggtatcatttccctacccacccaggggagtctcaacttgtgaagacacagctccaaatccttaccagccccactccacttggttctgtccttggctcttagcctatgctgtcatatggcattctgcttcttagagggattatatctgaactggtatgagatgtgctttgtggagccaggacaataactttagtattagaccactcctctgccaccccaactcctcagctaggttataaacttcttaaagttgggagtgtggagcttcttagatttttggatgcccactaagtatgttgctttacatactgtaggtgctcaagaaaaataatgtgggtgatgttagtggctaatcccgagaaaaacccaaaccacagtgacaggaataggggcctcaaattaccaaaaaatgagggaccagaccaaatgtcgatgagcaaactgaactttaatttgcttacctgaaaggcttgctcttcattattggcataggccacagctatttacacagaatcattgtacaggatttacagcaagatgctacacatagcatcattctggataagcgacaaaggagtaagaacagactggggaataaagctctgaaatcaaagtgtaagcagaaatctgaaggtaggtgtacaaggaaggataagggccaaatgatgagcgaggttggtgaggtagacataagggaggaagaggaaacatccaacaacttgtggtgcagagatataagggaagagtccactggcacatagtcttaaaaattatgtttggagtttgaaggaggaaaaatctgccataagccacctctgtgagaaaaaagaaggcagttagaaccttacaggccaaaccttatacctcccctatcaaaaagtaattctgctgattaaatccctggataggagaatgagaaggttgaaaaaagaaagagagagatgcatagacacagaaccttaaacagagttaagagacacaaagtaaatatattcaagagagacacaaagaaagaggaaaagaacagaagctcaggcacatctagaaattagagacatcctattaacttcacgagtcatctttccttacctcatcttccccaaagctcttcctccacccctaaatctctgaatttctaactttaaccaaagagtagaattcgaatgaggct

SEQ ID NO: 1028 - DNA, 4001 bp, Homo sapiens
cacttaatttactaacaatgatggagattctctactaacatgccattacgttttatgcattacttaactgttgatttagtcttaaatcactttgctaaaacttagaaaattagcaaagtaattgctagtttcacatatatattagctatatatgtgagatgttaacctcaactttaaggttgtgtatttattaccagaatatacttatctaaaagcctaatataacatcttgtgtgcatatgttaggaagacagttgtcaaaaaggtccacttttaggcctgacacagtggctaactcctatagtcccagcacattgggaggctgaggtggaaggatcacttaagcccaggacttcaagaccaggctgggcaacacagggagacactgtctttacaaaataaaaaaattaggcatggtggcatgtgggagcccaggaggtagaggctgcagtgagctgtgatcacagcactgcactccagcctgggcaacagagccagactctgcctcaaaaaaagaaaaaaaaagttccacttttcatagttttttggttccccactcctatacacagatacacacagttcaggaggtattaccacttgtttggcaaatacacctctgttttcactgtattcttagggattttgtgtgtgtgattgtgtgacattatctttgcagctttgtttatttgagaactggatgatttttctaatgcaagagtagggaaacaagtctctttgcttaattctggggaaaggaaaacctcctcaataatccataacttttaagggcatcagtaaaacatgcatttattggcagctgtgttgaacaccctattaggtgatgggtttctttatctgtaaagataatagcagcccccatcccctaaagtattttaggattcaatgaaaaaacgtagataaattgattaatacagcacccacattgtaattcaagattcaataaatataggttatcatttctgtacagctttcccctttcatgtcaattcctatttgatacaaaaatttccccagctgtgttactttgcattttacttaatcctgaaataaactaaggaacaggttacactagagggggtacctaaatcaacctgaggacaaggacggccaaggagaaattacaggtgtttgatatccaccccactcccccaacctttaatggcttttttaagtttctatagggtagcaactattttatgcatctcaatataggatggatgaaggatatgaaaaacagatgaatcttatctagcacaatgcctattcccactatggtcattctcaataatcagattattggtcatagatgggaatttagagatcatgcagtacaaacttatttgtgtaagtaaaaaaaaacgaagctcagggtcgataagtgacttgcccaacagtgaaagagtcttatctggaatccaggtatctagacccactcagtccatgagttctcccacgggtttacacgaacgcgccacattaatgaaggcaagggactgacaaactacgaaggcgtgttttcatctactctgtcccatcctgtgtgtcaaccttatttatgttatttcaagttagacatcacctaaatacagcccacagtttacgaaatctgtcaaaagcatcgtagaaacagaaagcgaaggaggactatcgtatgagtaccgctggaggagacgtagagttgagggtaccaagcgaagggaattgcctgtggacagaggagacaagttcatactccgaaaaaataggaaaacgagaaaggctactgggccacataatatcttctcttcttgcagagggcccccaaaacagcaatacctggggaggagatacctacggcattctgagattcgggaaagcaccactgccgctgaataaaacgaacccagcaacttccgaaaacagaaaatccgccaaaggaaacgccaaggcatgaaaagcgcgcgctggacgttgcgtcaagcccaccgcggccgggcggaaacatcctccccgcgacgaaggatccgggtgtgcgcgagcaaaggagcgagcggggagttctaggcccaggacagcacctatttcctgctggtgtaacagagcaccttctctcactactctggccataccacccccgcgatagaggagcaacacagctgtctctgtgcgctccggatcagcgcttcctagatttctagccggatcgtttggagaagggctctgcatcttatttccggtggcggtgaggtgcagttgccatggtgattagagaaaggccgagatctgtccagctgcggtgagaggaacgctgaatcgccgaagagaattggctgcgcttccttgtttgtgagctagaattaggtagcaaacagctcgctgtctctgtctcttcgctccctctgtccctctctgtgcagctgcttctccttcctctgctttgtctacttctctgtcataaacatttggtccatgtatgtacctaaaatgtacatgtaaatgcggttttatttccagaggaatacaaaaatagagagatggtgcccgagattacctgtgacggtatttcactgtgtagggacggtgactggacggctttctgttttcacttggccctgtagaagccttaggcgcttgttaacagtttatttttcttgctattgtgtggctggttatttatggagccgtttgctgcaatgtactctctaggcccctgtctcagtctcgggccggagttttaagtaagggaggtttccaagcctgcggggggtgcaattatatgtttatttaagctttagtttggtttctcgtcacagaaaggaaaagaataaaattctggcacatttctgccttgggatttccatgtgagggagttgccttgtttggaaagaatatttgaggacgatcctaaaatatacttatattttaaaattgcttattgcaaagtgaaattcattctcccttacttcttgaaacagttttctttcacatttgtgaggagatgcatgcacacatatgtgtttagaactctgatgcttaattatagtattaccaatttgcagtaaccagactgtgacaccacatccctgtggggtccttctaaatctggtgtaatatgaaagtgtcaggcaggcggcctgcgtattataaatagggtacttcatccatgataagcaattattatctttctttcccaagtgtaaatgatctatataattcgaaaaggtgcaagtgatttaggcctcctgagtaggaatgcaatgagtcctgaaggggaccctacctgtgttatcttattattgaacttgaaatattcaatttattaggttggagatctatttttagaagtcaaagctgggtagagtaatattggaagctgttagaccaccagtagaatctaataccccatagtaaccattgttcagtactatatccacattaacaaagaagaaactgttcgtgaaatttacggctttttgccacttactgctagctgggtgacattgctacccctcaatttcctcatctgtaaaacggacaaaaaaatacctgaccgctgtaatagggataagacaagatgtatgacagttctttaagctcttatgtacagaggtgctatacaaaccccaaatattgttattaataaaggaacacagtaaaactatgataatgctataaataagacttttaaaatatagctatttgaaatgtggggctgcattattgagatgttaatgaaatgatcttgttgatcctgctgtggaagatgggtgtcaactaccactcatatcccgattctcattattctggagtttctcattatctgcagtttatttagcacttactacgtgtcaagcaatattgtatatgcttcacatgtattaactgatttgctcctcttaaaaacctgatgaagactgtcatctgactttcgtattttgagagaatagatgtgtgctcttcctttgttcagtgattcttctcttgtgtatatctttgttctt

SEQ ID NO: 1029 - DNA, 4001 bp, Homo sapiens
ccatgttattaagtacagagtttctgtttggggcactgaaaaagttctgcatatggatagctgtgatggttgcacaaccttgaaggtaattaatgccactgaattgcacacttaatgttgcttaaaatggcaaatcttatgtaaattataatatacatatactttaccataattttttaactaaaagacaaaaagactcccagaagacacaatcctgataccctgactgagctctgtttgaatgtttcatcactcaccaaatgcactaggacattcgtctttgatttccttgcagcttctgggcagagatggagacgaagaacaggtccattccttgaagtaagtattagcctcatctagggaatacacagggtttattctcattcccggtttgacacaaaacctaccctctcctatcactagtcccacgctcattccaccactgtagcagaacctcgctgcccgggtggtaaggcctgagacagccagtgtcatatccactcagcccatcagtgtcacatccactcagcccatcggcatcatatccactcagcccatccgacctgacagccagcacaggcttaaagtctgcctcccgccacaagacctgtccttgtgctgggtcctgccctaagcactgagtaatcaaagacattaaagttccccagcaagagcttgcctctagagggaattgctaacaagtcaacagaaaattgtattgacaagaataaatggtagaagaaaggcaaactcaagagaacaaaagaaagactctgaggtaacagtggagaatggaaacgccagacagtaagcggggcagttgcctgggagaagaaggcaagacgggttgtctcatgtcttagtcacagaagaccttccagtccaggtgacatcttagcttattctgagagaataaacatgatttatcagtaggaagccaatccaaggcagggaaaacagcatatccaaaggcctagagaaaaaaaaaaaaatacagcgtagtccagctgtagaactacaagctgcttaatatggctgaaacatggggtgtgaagtagggagtggtgagactaatctctactccaaaaagtctgcaaactattcgaacagtctaggggaaagctgtgaggtcagaggtgactgacctcagtttcctcatacctaaaacacagttaataaacagtgcttttgcaaagatgaagtaagaagatatttcgaaacagccttttctttaaaaaaaaaatttttagacgtgaagaaaaatataaattttaaaatgtcattgttattcttgttgtagagaggaaaactgtggagagaacattctccaggcacaaagcagaccatgtagttcccatggaaatcccacagccaaggccacaggagtgggcagtggctggaaggtgacacagttcttgccacagccccctcagggccacacaaaagcacagagcctggacccaggacatgcctcaagcaataccttcactgccacaggccagattccgccagagaccagaaatcggcactcagtctacatgcaagccagccgctgtgcatctcaaggacatgctctgtgtcctgggagagaccaggatcccggaagtcatccagctgaaggaactgctgtccctagcagcgtgactcacctgtactccatcctctggtggtcgctatgagaaacagcaggaagctgagttggttcattgtaatctaaagaaagcaagatgaaggtcaccatcttggccatcatttttctctacatccctgccccacccctgtccagtcttacaaagactccaaaaccccttgccttttgtttaaacttcacacatctctgagaccaaaagcagacctaagctgaaaacaggattcccccaactcacagaccttgtctgagtctcagctgcactttccttgggtacagagagctccttcactccctccctccactgcgccctggagctcaacagagtgcagctttctccaaaaacgctcctgatgtggaatgaggtgcagaaagctttatggaggaagcccagtggggccaaccaaggtttccagcctcaccctcccctggcacaatgcccagtgcaggggaggcttctggttatctcggggaggttatttatacagtggaattaacaggttctaaagaaaaaaccaatcctaagaatcacctgctagcgttgttcctggatctgggggtttcatggacctgtgtcaagtaggaagtagacgaagagattaacaagagttggtgttggttttgggtttttgtgcctttctttcttgcaaaataaaaactttctctaaattaagcatctgttggcttggcacattggctcaaatcccaatactttgggaggccaaggcagaaggatcacttgaactcaggagtttgagaccagcctgggcaacatagggcaacctcttctctactaaaaataaaagtaaaaaaattagcatggcatggtggtacttgcctatagtttcaggtggggctgaggcaaggcaaaagggtaacttaagtcccagagatagaggattcagtgaaatatgaccgtgccactgtacttcagcttaggtatctcaaaataaataaataaatgaaattaatcattggccataattatcaattcatagaaatagaaaaaggaaattttaacaaaatgggaaagtgatcatttctgaataaattggtaaaaaggaatggaggggaaagagatacaaaacacacaaaaaaatacgaatagaaaagttttaaaaaatatataaatctttagtttgaataatttagtttcacacaaagactcactactttgtctttaattttgtcattttgccacaaacgagggaaaatttactacaggattcatttgaaactgaatcaatacgaaacctctctgctgcttcgaacctcctgtcttattcctgctcctatgtcatgaagttctcaaatgctaccctgcagctgtaatagaattactcagttcttccccagtgatatcatacatttaatacataatgtcattatagcattaataatactgcaaccttttcttacaaagattgtgaatatcttttttgttaagctaatatttcctatttgttggttcaaagtactgatttgcaaaaaatactcacatattgatagaagaaaataaaatagcacccaagaagaaaaactgcaaaaaaaagttatacttttgtaaatttaaaatctattagaagctatttgctctgtgtatctggaaaataattaattaaataaaattaaatgtattagaaactaaattaactcatcagtataggtaacaaaatgaacatacccagctttcatatttacaaacaacaacctcttagaaatagaggtctcagccaggcgctgcggcttacacctgtaatcccagcactttgaggggacgagggtggccaatcacttgaggtcaggagttcaagaccagcctgatcaacacggtgaaaccgtgtctctactaaaaatataaaattagctgggcacggtgtcaggcgcctgtaatccaagctactcgggaggctgaggcaggagaattgcttgaacccgggaggcagaggttgcagtgagctgagatcgcaccattgcactccagcctgggcaacaagagtgaaattccatctcaaaaaaaaaaaaaaaaaatagaggtctctaagtttacagttcacaatagtaaatacatgtatataaagttaacaccaagggcccaagatctagagaaaaaaattaaacatcccctcagttgttcattactgtgtgtaactaaccacctgaaaactttatggcttaataaaacagtaacatatttgcaaaaataaaaaaagaaaatatacacttatactactttctttagttgattctaagacactttttttgtattttgacatctttaatatcattatgcatctcatccttaatggtacatgatgccatctaatagactgggaaaacagtacatccattt

SEQ ID NO: 1030 - DNA, 4001 bp, Homo sapiens
ctgcccctgtatcaactcatcactctgctctgaagtcccaggaggtcagggattccctatgctaagacggtctgatccaacagctggtataggttaaacacctggaatcttccactcgactaattttaattaaatacctactgtgtgaactacctagacaccggacaaagacaatttgacacatttcttcaagagactacattctacaaggaaggagcacatggaaagggacccaactgagatgggagggcaaacccactaacgggggtgaggcctgggaactgctggggaagggaccagctgtaactcagagcaggctgattttgatgggagaatgggagctggctacaggacaggaaggaaaggggagagtacaccccaggaagagaagaaagcacatgagatggcctgaagcaataacagagcccagcccagcccagcctgccaaaaactacaggtcagtcgcttattgtggctggaacatatgttgtaatacaaagaagtctggaaaccaaagctgaaaaattaacagaggccagtggatgaagggccatgtatataagtctaaaagcctagaaatcattccaaaagcctggcagagcgggaaaaagtgtaaaattacaggactcaggccaggcacagtggctcatgccggtaatcccagcactttcggaggccgaggagggtggatcacaagatcaggagttcaagaacagcctggtcaatatggtgaaaccccatctctactaaaaatacaaaaattagctggggtgtggtggtgcacacctgtaatcccagctactggggaggctgaggcaggagaagctctttaacccaggagacggaggttgcagtgagccgacatcacgccaccgcactccaacctgggcaacagagcaagactccgtctaaaaaaaaaaaaattacaggactcaaggtaaaatccagacaaaccctgatgacagtgcctccttgagcagacacttaacatctctgatcctttttcttcatctttaagatgtcattaataacttctttatacgcatggagatcaaatgagatgacatatgtaaatgtgctttttttaactgatggattgaaataaacaataaacccagtatcaatgaaaaaatatcactattgtgcctactggaagaatagaattgtgaggattctattctcacaatatcctcctctgcgactagaggagggtgtaccctggacacagcactgatcacccagctgcctctggagatcccaaggccaaggccacaagagcagctgagcagggacacagttcttactctctcaccccatgaacccctcacagccacagaagcagagaatcaagccctaggaaatacctgagctaacaccctgactgcttcagaccagaccccaggagaggccagaaatcagcacccagtccacacctcaagttggctgcctagcctgggttccctgcctctccagaacttcccctttgacccttgacttcagagccctgcccagctctactccctccaggccctgcacagcagaggggagcccaggaaactgcagctcctactctcagaagccatttacctgcactgcacccactggtggccacagagaagaataacaggaagcagagtctggtcattgtcctctaaggaaaaacaagatgcacaaggtcactggctggcccttcctttgtcatcctctcgttcttacttcctaacctttctgagtcaggaatcctcaaatggaaagtgatgggctcatgagcattctaaaacctcctggaatatgccccacggctgtccaacactacaaatacccaaggggccatgggctcatttccctgaaactctaaatctctaaaactgagacctgagctggcatcattgctcccacacacatggatcaaaaacatttttctcaccagcatggacagcatccttacagatgccaggagctgatagttcccttcctgtggacactcggagctcccctgcagaggatcctgatgaagggtgaagtgctggtccctttatgtggagagctgtggagagccaaaccacctgagccctgcccagcccaaccctgagcagcctaggctgctagcccctccctctgaagcccttccctctgagggtacctgagcctgggaccgtggaaatgagaaaggacgtgcgactggctggaggagcagggagctgtgttcctggccacacaggtgactgtcgccatctgaggaggggcatcctgctttgccaaggcaggccatacaatgtagcagtatctaatcagattcgtggataggtcacaatcctcccctgcgttctccctctcccacctcccccagatgccctggccccctagacacaactctgtcaagaaatcatccttttagactgaggtgacacctcatgaaaaataaattaattaattaagaataataattggccaggcacagtggctcacacctataatcatagcgctttgggaggccgaggtgggcggattacctgaggtcaggagttcaagaccagccaacatggtgcaaccctgtctctactaaaaatacaaaaatttagctgggtgcagtggcgtgcacccgtaatcccagctactctggaggctgagacaggagaactgcttgaacccaggaggtggaggttgcagtgagccaagactgctccactgcactccagcctgggcaacagagcaagacttcacctcaaaataataataataataataataataaataaatgggaaaagaagacatcatccttccaatctttcctccaatttctctatgaggccttccctgacacccccatcaccagacaaagctgatggatccttcctttgtcccactatacactgtccaaacactaattattgcatgtatcctgctgtaattttattgttttattaactctgtttagaaacaatttgaaatttattaaatgttgcaaaaataacaataatataaagccacatatatgccctttacctagattcaactattgttaatatttcaccccatttgctttatctttcgtgttctctctctctctctctatatatatatagatatatgtatataaaatacacccacacacacaaaatttttttctgaaccatttgaaggtaaggtacatacatcatgggcttttacctttaaataaatgcgtatgggttttttttattttgttttgttttttgacacagagcctcactctgtcacccaggttggagtgcaatggcatggtctcagcttactgcaacccccgcctcccaggttcaagtgattctcctgtctcagcctcccgagtaactgggattacaggcacccaccaccacgcccagctaatttttgtatttttagtagatacggggttttgccatcttggccaggctggtcttgaactcgtgacctcgtgatccacctgcctcggcctcccaagtgctgggattataggtgtaagccaccatgcctggccaactgtgtgttttctaataataggaatatgtcatgtataaccacagtacaattatcaacatcatattattaaaaactctttttttgggctgggcgcggtggctcacgcctgtaatcccagcactttgggaggccgaggtgggtggatcatctgaggtcaaaagatcgagaccagcctgaccaacatggagaaacccggtctctactaaaaatacaaaattagccggtcgtggtggtgcatgcctgtaatcccagctactcaggaggctgaggcaggagaatcacctgaatccaggaggcggaggttgcagtgagccgagatcacaccattgcactccagcctgggcaacaagagtgaaactccatctcaaaaaaaacaaaaaacaaaaaaaactcttttcttttctgtagaaacggggtctccccatgttacccaggctactccagaactcctgaccttgatcctcctgcctcagcttgcccaagtgctaggattacgggcgtg

SEQ ID NO: 1031 - DNA, 4001 bp, Homo sapiens
tgccgctgctgccgctgccactgccgctgctactattcagcctgcgccggccgctccgccagcccccggggctccggggctcctcgggggacagcgactcggctggggggaagaggaaagaggcgcctctcccggggctgaaaacgctgccggggctcagcactgccctcctcgggggcgggggcgtctcgctgccactgggccccgggccgccgccgctcttcatctcgttggcgctattcatgatcaccaggctattgagcgcatagcagtacacagccatagtactgggtcccgcgctgcccgccgccgcggctcccgctcctgctccgccgccggcgcctcctcctcccggcgctcccggctcagccccggaggcccggcagccgcggctccgcgcgcagatggggcggcatggcctgggcagcgggctgggggcacgaccgcgggctcagcccccgcccaaagctccataaacaaccgtgcggctgtggagatacaaggagaaaagtcaggaccctggagggcgcgcggggggagttgggggtcgcctgcagaacccagagagagccccgggaacacaatctatccgggacccagcgccaccggacatctcacctatggggacggcgaggctcggcgagggcatgccccggctgcctcggtcgccagcgcggtttcgggtgtgcttccccgccccccacctcgccccaggctgcgatgcgctttatgaggtcccttcaaatcccaatcctaatactcgtctcgcggaccggcgagaagcgaggtccaagtccttggctcctaagtatgctgtgtgcggggcgcggctgactcagctctcccgggctgaggacaccccagccaccgtctccgggtctccccagcctgagcaaacattggctatccagggcaacccggcagccctcgccctgggcttcagggtctccctgctccaccctctcggggcatcagagaccgaccggctcggagggaacctaagcgggacctgccttgcccgagccgctgccagcgcccggatctgggagggcgcccgcgtgcccgccgtttaccttcctgaccctagccttggggctgtgtctctcggcctacgaaggcctgggcgggcagcggggccgcagccgaagcatttttcagggctagccttgtcgcctatccctagacaagtgttttgtgagtgtgggcgcaccgaggttctacacgttctctttaccggaaccagtacttgctgcccccctgccgtcgtcccctatgggggggtgtctgtgagtgtgtgtgtatacacgcgtgtgtgtatacgccgcacgcgcgcggagcgagtccgctctcagcgcgccctgttgccgaggacgcgactgcccctgcgggctcccggacccgcgcccactcggaggaacttaggggcgtgcatggctgcagccgggcagcagccctaggtgcacagagcctctagctctgcaaacctcccaggagccggcgctctaacaccccagggcagcgccgcggagcgcagggcttctccgcatcccgggcagcctcgcccggcgccagcagagccgccccgagaccccagcctggggactcctggagcgcgctgagggaggcggcgcggagtgagcggcccggaaggcgggtaggagaaatgcggagacctcgtctctccctattttctccccaccgccactccatgtcaccctccaaaatcaaacccccttccctgcctccccagcccacccctttgccctgtttcggaaccaggaacgccgagattcgctccagagcagaaagtgagggaaaagagggttgttcagaggcgagagccattaaaaggccgccaaacttacctgcagtttctcagattctcaggtcctgtgtagactacatgcccagaggcgcaaacctcgtagggacgagatggctttaaaagtaaaaatgctcagaaattattttctcacaagctatggaagacaaaaaagaggagtgcgaaagaggggggaaagctcttcggttcaggggcccggcgatcccggcagtggcgacgccaagccggccctgcacgcccttttcgaccgtggagatactgcccctgtcagtgtctgctccgggctacttcagtgtttgttcaatgcacgattaaaaaaaaaaaaaagaaagaaagaaaagttgttgggggggggggtagtggaggagggaggagggagaaaggcggaggcttgggggaggaaagcaggaaggaagttgtgagcctgtctggggttgaactcagcggaacaagtttttcttttcttcttttttttttttttctattgcttggcaagacgagggagggaaacacttaaaaaaaagtttccattgttagctaacaacaacaaaaaaggcttttaacttctgcggtttaaagatatacaattcattttccacccctcaatcgaggcttgctgatgtgtctagctttatgaaactatttttgaaaaatgtttttaataaagttttgagtgtatgtcttaaacaaagcaaatcatggggacctttttagcatttaaaaaaggctacaatcctgtataaacagtttgtgttcttgtacacagttctgcaaattcaaagaaggtacattgaggtcaccttcctgcagagttgcaggttttaagtgcatcacagtagtattttggaagactggttggtctatgagctggggatggttttgcagtgcaattggtagatatataaatacacctttacatgtcacatttatttataaatgcacacggcacatgtgacattcgcatatttttgcacttaattctcagaattattttaagaaaaagcatagtcctgaaactaagaaggcttgggtaacgtctgaaacccctcttgctcctgtagacccttgtagactgtctcctgtagactggatcattttcaagaaactttctcccctactatcagcaaaaaagggagaaagaacatcagccaacattactgggcaggggatcctaccccttctaagccctggcactgccagtgtgttttacataattctctaaatcttaaactacagcatttagtgaaaggagggaaaacacagctgcacggctcaggagactgaaacatccaaagcctgaattggtccttatatcatgattagctgaaattcagatggaaattttgactttacttgtagcacacagatctcttgcttgtttatgtaacaatactgttaagtgagcaaagcaacctgctgctccatcaggaagaggctcatgctaaatctgaaatcaagagatcttctagccaagaatacctgagaatcacacactgttgaaaactttataatttttaaaaattagaaatggaagaattgaacctaattaccctcctaccctcaatggggcttttttaaaaaaaagcccaatcccagaactttgggaggccaaggcaggcagatcacaaggtcaggagttcgagaccagcctaaccaacatggtgaaaccctgtctttactaaaaatacaaaaattagtaggtcgtggtggtgcgctcctgtaatcccagctacttgggtggctgctgaggcaggagaatcgcttgaacccaggaggtggaggttgcaatgagccaagatctcaccactgcactccagcctgagcgacagagtgagactccatctaaaaaaaaaaaaaaaaaaaaaaaaaaagagcccagagttattcaggtctctgagcagttattcaggatctgagcagttcctaagaaagagaagccagccctctccttgaccctaatttggttccctaggggcaaaaaagaggagttgccagttttcaggagacccagtcattggagttcatgtctgaggggcctttgttctagtagaggccaatacccatgtcaggtgtcatggtggaagaaactgaaggacctagcaatgcatacattaagcacagacacttagcttcccaatccctgggaaacctcactgcc

SEQ ID NO: 1032 - DNA, 4001 bp, Homo sapiens
agagctccagctgcccctcctgctgctcagagagctccagctgcccctcctgctgctgtgggagctccagctgcccctcctgctgctctgggagctccagctgcccctcctgctgctctgggagctccagctgcccctcctgctgctctgggagctccagctgcccctcctgctgctctgggagctccagctgcccctcctgctgctctgggagctccagctgcccctcctgctgctccgggtgcttcagctgtccctcctgctgctctaggtgcttcaggtgcccctcctgctgctctgggagctccaacagttgctctttcttcattcccagttgctcatctctcttgactagctcttgatccagttgctggtctaagagcttcttctcttcttccagctgtttgtttagctgctgatccctttgtgttttctcctgcttaagctgctgctctgggttttctgctttctgatattcctcatgctgttcccagtgctgttgctgcagctcctgctcctgtggctccttctgctgttgctcacattcttgctcaggcagtccctttacagcagtcatgtgcttttcctcttgctttgatgggacctccactgggagctcgacaggcaccttctggcatgggggaggcagtggagttggctgtttcatttgctcctgatgggtattgactggaggaggaacagtcttgaggagctcctgactgagggcaggggagagggtcactggcagtgtgtgttgctgggacatcttagaagctactgtcaacctgaaagacagaagaggtctgatgcacaggctgaaggcaaaggaaatagatgaaaccttgggaatctgcagaagtatctggttttttagcatcccctcttcccttgggcagggtactgttctaccacctctggactatcatttcccaaaagcagcagagagagaagggtggaaatgtggaggggcagagaaaggtcctcctaggagcctccttgttcccaggtgagagccaacaaggagatctgtctgcagggctgttctgcaagggtgggtcaggtgccagctcactgtctgctcttgtctagtccttgtgtccaccctcatcgcttcactgaccaaggagcagagatgcgttctgggattatgtcacagtgaggagtaaggccttagggaatgaaatgtctcttggagaacaccaagtcctagaaaaccaataggccgtgccagagaggacctaagaggtcatggtgtgacctccagactggagccacaggacatgctctaggcctgaatctcccattggaatgctgtgtgtttctgggcatgtcacttagtctcctgggatttggttttcccccctgtaaagccagcaggttggcctattcaaccccagggctgctttctctcctgaccttctgaggtttagctgcagtccttgtgtctggggtggggctgcgggagctggaaggttgctgagagttggaggttgttcttccaagtcttatacttctaagttgagttttcctgtcccagctctgcctaggtttctccaaatagaaaggtttccccattctgccatccctctgtgcagcatagccaaaaggtagaagctcttccctgaacctctccctccataaagaaggcaaaatgatggtctgtcaaaacccaagaggtttaggaaagaagttgaatgctattcccctcctcccttccataattctctctcacacacaaatccaaaaatatggtcacaagaaaagatgggacataggatgattactctctgttctgcacttctgtgccaaggcacttttctctcagtactctgactcgagtccccctagaatgaaagtccagctgaatccagccccagagtaatgcccacccccacccaggctgcccacccccaccacatcgtatgctgttggaggtcccgagtcccaaccctggttctaccatccgacacttaccagactcacagtaaggctgaggcagaggctttggtggagtgctgagctgagcaggagtcagggcactctttatatcattctgcagcctggcctccctccaggttgaaggtgatggacaggtttcaccactctagttggtcaacttcctctaaccccttcctgactcaccacaggcatcttaagcagcaaaccctttagggccccatttcccagggacacacagctcctgcctggccagaggattctggtagctcaactattcctgtgatgcttttctgacctaggcacagggagctgagtgaggcatcctactgttttgtgaccttagtcaaacttctgctctgaatctcaatttttccactttcaaaatgagtttgttctcattattaggccaaaagattcactttcaagggcatgaaatggaaagttatgtgtctttcggggatgtccaggctgggttatatgtttgaagatagagtcacttcccatgaaggggtggtatttctggggtgttctcttgggccacaagcccttcctctctcagaatatattttttaactccatcctatgtggaaataaactctgtctttggtggagggagtttgactttaggccaagtagagtcaagtagaaggcttctaggagtcctctgctgctgccacttgctgcccagcctctatgcccgaggctgcagttagagaagttctcaggaatgccatgctcataagaactccaaagcacggcccactctaggcaaggaaacaagattgaatctacacaatataaaaataagtattgctttttataatgacaaaccaaactactttcttaagtacttttttaaatgcatgaaggtataaagatcagaatcaaatcatccatttcctgttgtaaatcatactctagaaatagcttaagaaatctttcagagtggggatttgagcacatctctcccccgtgccaacagtgcaccagcacacttgaaataacattcaaactcactgccgtggtttaaaagaccctgggtacctggcttctgccttcttctggggccccaattcatgtcaatctctccctgagaggtatattcttacctcactgagggccttcggttcctgagatgagcccagagctctccacctgggggcttggcacctgctctccttctgcccaccggcccctccccaggtctctggttcttttatgcctttcagcttcagtgtcaatgttggggtctgtcagagatccttctctgtgtaccatatctaaaggattggtacttaatttcacttataacaatctagagtaatttatttgcatttgttcacttgcttattgtctatctttcccactggaaaataagctaagagcagcgtatacctggtatgttttccactatacccctagaacctatcaaaactactgcatataatatgtgctctacaagtattcattgaagaacagtgaattttacgacccgaaaataatgactattaaacatttcagtgttgatcaatgtttatatgtgtgtgtctgtatgtgtgtgtaaaaaccaaactgatttatttcttccctttctttttaatggttggctaataacttattatatggacatcattcatttacactctcttttttacaatctaatccaaaaagaaggaattataaagacaatactcagtggggctaattttgagaagtgtcctgattccccatagttttcctgacaggcacatttctcttagccccaagtaaatctatttaaagcactaattttgtcatgttcctggatcatgcctaaaaagacagagggaggactcacaaggcacccttggtttctgcagtgctatcccctcctcatgacctctctgttccctgagcccacccagggacctcacattctttttcccatagaacagggactgtgccattttctggggcagaggaagcacagcccactctgccctgaagaactaatcaagcatccttactttggcgctgatgcccttgtgctctgctgctgactt

SEQ ID NO: 1033 - DNA, 4001 bp, Homo sapiens
caaaaagacactaatttaaaactaagactaaaacctgaaatgttttgtcttggggggaaagttagaaaatcaactacaaattaagacaatggctatagaaattagtatctattagttaaccagagatatcatctattaggaaaacacagaggaaaaccattccagggctctctttggtcagtggctcaagttccgtttacctctggctaccaaattataagcttgataagcagcctgccagctggcgttaaatgatactagtctcaattcaattctaaagtccatgtttacctcacgtccagacttaacaaatacaactactctttcagtatctttaagacagaagtgtcagcaggctttagcctaaaagtaatcatcagtattttgtttttcctaaatcaatcactggtgctagaattattaaaagaaagcatggcctgtggcagtctagtccatgctgtacttattcatctgttaagagtggtactaggcttccagagttgtcatctattagtagacagaagaccacgacacactcaacgaacagcttgatgccaaggtgttctaacgctccatcactgcacgctccatcacaaaaatgcgcccttttggacatctgatttctccttgaaatgtcagctgtctcaaaccaatagatatgtccactacctattgggggaaaaagtaaatgtagttctcaagtagtggttcaagttaccctaggttcaaccctcagcctgataccttcctatcatcaagagcttataatcagagacacttaaccaaaagcgtggagggacggaaaaagagcaaatcttgccactgatttctttcataaaaaagaaagagcgtcccaggccttcctcctcgcgcagccaggccggcgcccactccgcaggctgcgaggcgaggcccccagcacccgcacacccccgccccggattggccagccccgcagtcactcagtaccgacacgtcagggcagccgctccctccctcctcccgcccccttctccccgcgcttggcaagaaaagcgggcaacgtggagcgggaacaaaggaccccgcggcccacggcgatcggggactccgtgccaccctactccaggcccggggctggctgcccgcccacacgagccgagtctcgagagctcttccagaagagaatcccaaaccccaggcaaacccgaggcgaggcgtccgttcctgacagcaagaacggggagtcccgcgccctccttccggcgggtcatccccgcccgcggcgccctaacccaggccccccaaaacccttcgaacaaaaaactcttgttcctcccagcctgcctcacccgcgccagtgtagcaaaggggctccagcctccgcgctctccgaggcgaccggcgcccgctctcggccgccaacgcaacttggcaaccatggcagcgctggagcgcgggcccagcgcggcgcgggcttcacgtcccagagggcggcggcggccgcttggggctgcctcccctgatgaggacaccgcttccgcgcctcccaccctcttcccatccgccggcgccatcccttcttctcggattctagccgcgccgtctccctcatctgtcgttcgtagaaccagcgcgtattacctggttcatctctgaagagatggaaacattcatttctagagcttcgatgggaagcaggaggaagcgggcgggaatcggcccaacggaaagcgccagaaggcggcggaagacgggagcggtcaagtagaaggacgaggggccagtccgtggagactgaaaggaagggggagcgccaccgagaactcgcgggaactcgctcgctcgccgatacagccgcgccgaagcagcaggcggagaaactgcgcccagcagctctgagcgaccgacctccacgcgcgaccgggagacactgcctccgccgccgccgaccgctcgcgccgcaccccctcgcacgtcaccacgtgcgctgccgccgccgacgcctcccagcccgcttccgtctcgaatccatctgcaaatcacaggcgagctccataaagatcccactctaagccccgccccacccgcggccccgcccacatcccgccccgccttcctccctggtctactggggttccttccttctcggtgtaactaggtcagcgcaaggtgatcctgaggagataggcggcgctcggggggcgccctcgttcctcttatcgcgcctttgtccctccctccgttccttgccccgcaccctcactttcgccgccctgtgcgttgcctgtcccggaactggttccctcaagccgccctcacctgttctgacttcccctcgaggcacaatagcctgagagatcagacgtgggagattagattgctcggcgtcagacctacttctaggcaaccccccctagactggagctgctcgtcgtggacattaggatctagttgggcatgagcccttaacttaagggtcgggggggaagtggcgggtgcggagaggaggcgtggagagtgtgaggaagaagagaggcactctgagaagaagtcgaacaactaacccctcatttggcctggtttgggtgagaagattgagtcacttggggaaaaaaatattggagaagtcagagaaggtgtaaatcagtggtgccacaaacaccagtttacttccacttttcaccccccgggtctgttttgtctgcgtgcagctctcctcgtgtcggagacgctgagtcagttctctactggtcttgccctcttccggaaaaagaaaacacacctgagaagtggtagttcctatcctaacctactggggccctttataccaggtgccaaacttcattatccaccccaccaccttgcccgggagggagatctgtgaaagcgaaacgtgatttaagctgggatctggcagcaacttcgtggactctgaagggcacgtgggaaaggagttttgattgaaggtgagggatttagtgaggtaaaattatatccaaattagagtttggtaaaggcttccaggttaatgtcctgttaacgcttatcctgatttgtggaggacacttaagctgtctaggcctaaccttgtgtttgatcactcaccttaatttgtagacattctaggagctctttgtcaatgcctcttaccatttttatcattaactatttatgcttatagaagcaggaaaaataaattgtgggagccttcatctgcaataggtttacaactttttttctaaaatcttgaggcaaggagacttattcccccgcccctttttttctcacagatttcttgtatgtctccctcgccccgcccgcaccccgtccccccgcccccggacaattaattgtaggaggaaacaagaactaagatgtctattcgagtgattttttatatctttcttaaggagaaaaagactgacatttgacactgtgctcttgttttgtcttgctgataataactgacagcaatgtttacttttcttacaaatgaaactatcagggtacgtacttttaagctctttaatacaatgggtttcatccttccagtgggagagtatgaattgcccactctgcgtagacacatgactgctggcctgttggacacatggtcacacttgctatactctaaatagtgtctttgtgacctgaaacagtcaacacttttcttaaagctacagtgtgcccacactcattgtatttttgctttgtatggaatttcaaatttacttattaccttctctatgaataatagcataacttatgcattccatttatgcctttcagggaacctgatggttaatttctacctcttaaagtaacacattatgttgtaagattttgctcttaatatagcagtcccccttatccttggtttcactttccaagattttgtcaaccatggcccaaaaatgttacatcactactcttgcatttggggggtattattacataaaatgatagttatatgaacacaagcactgtcacactgcaacagtctgacaacccagacagca

SEQ ID NO: 1034 - DNA, 4001 bp, Homo sapiens
ttaggaaatgtttgaattattttacctatatctaatttatgcattctctacaatcatttcccaatggtagtaaataattagtatagtatgaaatggaggaaaccatttaaactggctgtattcagtgtggagtatcacactgcaatcctagcagtaaaaaaacatagttttgtatctatttgcagaaactaagactcagtcaaagcacttagttaatatgatatacagaattaagaagaggttatgattattcctatttataatgtccaaagtcattccagtatgatgtcttcacatctttaaatgtgatctggatctatacaggggagacattttctccacattacaaagcatattgtaccagaaatgtctggaaccctggtggtctccattaatcttcaccacaaagtacaaaagaacacattgatccttcaatgaaaataatcccctggtcttggaaaacatcagagtcaccaaaagcaaaatcaagaaacaacacataatggggttttggaaagggaagaacaaagattcaatcaatacgaattgctcatcttaaacaaaatctactgtgcctatacccatatttaactcaaatcttttcttcaaaaaataaaaaaatagccaaaaccaaacacgccctgatttacatctctctctgcattattctcatcacttaactacccatgttttactccctgaaagaagtaatgacaattttataccactgtaaattcctgccagtgagagaaaaaccctatgacttggggggaaaagtgtcaatgacatgtatagcgatgtactcaaccaggggcagaaggcagctcacagccacgtagtaagaagagtggcaggaaggacggggtccccttccccaggaacacacaggaaatcatggagtgcaaaccctccaaaaaacgtgtgcacaaacacctggcaaacatcgcatcttttatctagaagttccgtggtaaacacacatccaaggagcccacatcccagggaccctggggagtgactttggaggagtgtctattagtcctccgatgctcccggtcgccgacgatgcgcggatggagttggagtgagggagccagagaccagccccagtttcggttaatcagtccctttccagtgggattcgcaattccccgggtagttctctcccactgttccccttccctggtcctctcgcccagggtctcctttcccacttctcgctggctacctgaggcctggttcctaacagaacctaagaggggagggggcgtttcccgagttcgcggacgcccaacacccagctccaaatcccagaaactttccctcgctgagaccgcaaggaaggaaaaaagctaagaccctcagcctccttcctggggccgaagaagaaaacctttctgcgctgccaccccggccgggagctggcggtcaagttcgcggtacaaggagctagggacgtcagccctccagcccgcgcctgtatctcggggtggtataaacaggatgtcagacagcgcgctccgggcttgtttatgaaaacttgccgtgcgcgctgggggagggggcggcctggcttaaccgctcttctcccggccgggggcccccgcccggcgacctcctcgccgcccgccggctccgcggggctggaaatccccgccttccccgcccgagccgcggggtcctgagctgcgctcaggagcagcccgggccgcgcagcctaaggaccgaccaagagcggtggccgcgcctccggccagtccgggctgcgcgcccctcgcctgccgaccgcggccgccccggctcctccacctcccccggtgacactcaccacttccgtgtgcgcctgggccaggcagcgccccgtcgctgcgctggctggggtcgaccggcaggctcgctaggcggccagccccgcggggccccagcgtgcgcgcgcccagggctgaggaggggtcgcggcgaggacagccgggactgggcgcaggcccgcactgtctgcagctccaggatactccgcggccgccgcggcctgcgctcagcgacgcaccgcctcccgtcccgccccgccccgccccgcggccggccccacccccgtggccgccgggcccaccccctcgcgacgtcaccagcggcagccccggaaagcggggcggggtcgcggtcccggcggagactctgcgcctccggcctacccgccccgcccccatccggcttcgctcgcgaagctgcccccactcgtctctgttcaccgcgtcctctagattctagaatctagaaactcatctaggacgcgaggtcatctatcgcggggagtaaaattgccaggattcgcccgtagattgacccctcccagctctggagccccctccgccacacctttgtgcgctcgatgcagaaatgcatcccgcctcctccgtatacgctccgcttcttaccccagctcagtaggagaggagctagtggagcactagactaaaaagaatttaacaatacagcccccagcttggacaagctactgcagatccaacccattccgtattttaaaagctctttacgaaaaaaaaaaaagcatatgcataataggaattagaactacattcactgatacctaatgcatgtacagcgcttttcattttttactaataacctctcaaagtagtagcatcatcttatccatgaggaacaaattaagtctttagtgtcttaatcaaggtcacactgtagccaagattcatacttcgtaggcagtccacggacaaatcctaacaattttatttccttaggtatctctccaatcagttcacttgtctatgttccggcaacacggtccgagctgccaccatctctcacctgaagggaccacgaacatctcttaaatcgtcactccattcactccagcccccaattaattctctacaatgaacttttaaaaattcaaatctgttccacacactcccatgcttaaaacactccagcgacttccccctgacaatccctggatgaaaatcctccgaggccgtgcacggtcagaattctgcagcttcagggctgtggacagaggctgccccacctgtgctgacttcactaaccctgctggacagttcctgatcacttgagttactgcaactgaaactgagcaagatattctgggtgtggaataaagtcaagcatccgaattagactactgaatttgaggtttggcctccaccagtaaccacctgtgttgccctaaacaattcttagttgactcaattctcagtggagcagcagacaaaaggatctccaaagtgccttccagaagtacagaaaagaggaccaaagaagaccggagatcagagcagacagggaggcaacccgggttgcctgcattgtgggtgtttgtgtgcaagtcttgtctcatctgccacactctgaacaacacctcagggctgtttgcatcattttcttcacctgttaaatagggataatgccttccttaaaggggttttgctgaaggtgaactatgataatatagcccacatggcatgggctcaggaagtggtaggggtttttattgagctggaccataaagaacaggtgagactgacatgaagggagacagagacgtgaaagaacagcatttcaggtgaggatgtaaagaaaaaggaaagtcaggaaggcagcagtgaacccattgtgcccacgaacgaatctggctgttcacagggtggaatcagggggagagggcctggattcagtttagatctgttcgtctataacagacattgtgctaggtgatgaagattcagagaaaaaaaaaatagactaggttcctgacctctgaatgctcaatgcagtcagagagacaggcaagtaacaattcagtgattcccggtcctgtaatggtgatcacagaagacagtcacccagccgagtctgaggaagtcagaataagcttcaagtagccgacaggaggcaggagtcaggaggtagcggcatattcaggcagtaatagtatatgc

SEQ ID NO: 1035 - DNA, 4001 bp, Homo sapiens
accaggttgtgcacctggtggtgccagccactgggcacaaacaccatctcgcccgcttcctgcgtgatctccaagggtgggccagcaagctggttccgtgggtgcaggtgtgtgtcgcagagtgctggggaggtcacgtcgtagggcaggttgccgtggcggtcccgcagggcctcttcctgccctggggggaagaggagccacttcttcctcccacagacattgacagaccagctgaaggagcggaagatgtcagcatggaacggggacctgcggcagcaagagcgcctggttcatgcctgtaggggctggtatgggctttgcttggcaccccagaggcctggtccaactgaaggaggggtggccccttggtctcaagggatggcacccactgtgaggcctgtgccaagcagcccccctcctgccaccctgggcctcccagtccgttctgtcaccaggccccttcgggttccactcccacatccgtggcctcaccagctgcccgcaggccccgcgtagacaaagcggtagtcatccacatccagtgcatcccagaactcattcagccagtcggacgagaagtacacaggcagggtgaaaacgtcctccaccggaaagtccctgtgaggagggcgcaagggcaccaccgacagcacgtgaggcacgaggagactagggcagcacgagtggggcaactgagaccaatcggctccagtggagcttccagatggctgcagcccccaaagagccccagaccctcctctgagccagacgctgctggcgggggagggggcggggcagtctgactacaatggttctgcttattagaaagtactgatcatgcctataatcccagtgctttgagatgctgaggtggatgcatcacctgagctcaggagttcaagaccagcctgggcaacatggtgaaacctagtctctttaaaaaaaaaaaaaaaaaaaaaaaaagccgggagtggagacgccttcctgtaatcccaggtactagggaggctgaggagatctctctcaaaaaaaaaggaaaaaaaaccatattgacctcccaaagaacaacacttgcagccatgcggaagacaatccagtttcttttaaactgattaaagtgcctcacggggaaaaatagctccgttgtgcacccaggggccaccttcatcagaaaggcctctgggttcacgcagcgctagggaaggcagcgcctcggtgcgtcccaagccccattacctgcacaagtgccagtctttgaggtagagacagcccctgggagaggagtagcccgcctgtatgtactctttccagtaggtgatgtagtctctgagagtcatgtgctctttggggttcgagttgtattcctggaccccacagtttgcaactggtacaaccacgtctcctgaaatgaaaggcacggtccatgccatctccctgggccccgtcctcactccaaaccgtctgcagaggaactctccaggggccacgcgcctggcctccctcaccctccctggtgcccctctctaggcgggggcctcccgggcctgggtcccgccggcctttcctccccgcccggggtctgcggccgccgccccaccgtaggtccgtagcaggtggtcgaagtcgggcctccccgcgggcgtcacccagcgccgccggctgccccagccctgcgtgaaggcgctggaaaacacgcagggcaggttgggcagcaagaagccccgcacaaagtcggcgtaggagaaggcgcccggctccgagacgaaggctacccggcccggagcctggccgacgccggggacatcgacccccaggcctcggaagtggctgtcggcgagggcgcgcgtctcgcggtccatccagctcagcacgggtcgaaggaccctcctcctcacttccgccggagcggaaacggtgaggaccagcctcggaaccagaagacgcagggcgccgcgtttctgccccgccagcgcctggggctccgggcctgcacgcatgcgcgcggctcgccgcggtcttcactgcgcaggcgccgagcggccgaggcgccgcggtcggctctgggactcgtctggcgtccctcaggtgagcgacggtgttggtctgttgggcgcccggcccaagccaagccgtagcgtccgccctcggctcagtccgcgcgctgtggctgacacagcccgagccctccttcccgcatccccggggggtggggggtatgcgggctgcgctgggagaggggcggggacagaggcggttctgggggcgggagtgcggcggtgcgggggcgcccagggatgatgggacccggagagaacggtgggacccagagggagagctggggggccctgggatggtgggatctagcggagatggtagggtcctggaggagatggtggggacctggagaggacggtggcacttggaggggatggagacgggatctggaggggacggtgggacctggaggggatggggacagtggggacctggagaggacggtgggatctggaggggatgggtacagtggggacctggagaggacggtggggacctggagaggacggtggcacttggaggagatggggacattgaggacctggaggggacagtggggatttggaggggacggtagcacttggaagggatggggacagtgggttcctggagggatcagtggcacctggaggggacatgggatctagagaggatggtggggacctggaggaaaatggtgggagggctggagggggcagggtaacctagatgggcgaatggggcccacaggggacctggagggcatggcaaggggccccaggggatgacgggtgtctggagaagatggtggggaatgagggagggtgtgaaatgaaggtgtggtgggagtgtgggtagggatttggggctgtgtacacatgagcagggctgaagtgggaggacatcggagtagtgacatgaggagtgttttgccaaacttgcaactggagttaccccaaaagtggcggcaagggagttccccacactatcctcaggtgggaccagttgggataccaaagaaagaagtgctaaatgcatggtaagcccagagcagtttttttttttttttttttttttttttttttttttgagacagtatgcagtggcaccatcacagcttactgcagcttccacctcctgggcttgatgaattctttaattctgcttcagcctcccaagtagctgggactacaggcatgagccactatgcccagcttagttttgtttttttgtttttgttttttttttttttttttgtagagacagggtctctgtgttgcccaagccggtgttgaacgtttgggctcaagcaatccttctgccttggcctccctaagtgctgggattacaggtgtgagccactgcgccaggccctgcctagaggttttgttaggggaactttcatatagagtgggctgcggtagtcctcgagacgggcagtaagggaaaagggatgtcctccctaggtatgtctcttggaaggggtgtgggttatggagtttataggaaggtttcaggaatttggctcagggccaaggccgttttctttgtagtaaacctagatactttcttccatgcctggaaatgttaaaggccctggattgggttgaagcctggtggggaaaacctgtggttggggcacagagggatcagggtactctgtgattttcggccaggacacgaaagtggggccatgggggaccctatgtgatgtatgtcttggtgtgctggagaaatcagctcaaagctacccacatggatgcagaaggaaagatagcagatttattgcccccgaagcctggcaggctgtgtgcacataggtgctctgcgagagagtgcagagtctgggcagcatttcccaggcgtcttgacagggaggtggaaggaggaacagttagaaccgctcatctctcccagagaaatgagaggcagcttgtgctggtttgcacacagtgcgaggcctt

SEQ ID NO: 1036 - DNA, 4001 bp, Homo sapiens
gaaggtgcaggtgcccaactgctatggtttggagtggtaggcaacagagagctaatgaaagagttctgatgcggatggtggaggtggtggttgcatgattacgaatgtatgttagaacacttcaggggcaacagtctaggagtggcaaagatacattccattccagagcctactatactaaaagtgaataaaacatagttatttgaggccgggtgtggcggctcacgcctataatcccagcactttgggaggccgaggcgggcagatcacgaggtaaggagttagagactagcctggccaacacagtgaaacccgagtctactaaaaatacaaaaattagccaggcatggtgcaacgcgcctttagtcacagctactcaggaggctgaggcaggagaatcgcttgaacccgggaggcggaggttgtggtgagccgagatctcgccactgcactccagcctgggcaacagagtgagactccgtctcaaaaacaaacaaaaaaaccatagttatcagttgaatactgccattagcttggaaagaaaggggcacattttcaggggaaagacaagtacagatttggacatacactgagactgcaagaagaaagaaaaaaagatgatgcaaaggcagcttaataagacttggatgttaagatgttgcttaagtgtttgcttagatgtttaaaaaaaaaaagggtagagaaatagatactcacagcccggaaattagagcatggagagcactcttctgctaccacaaactcttccaccagccagcatggcaaatttgaggtgcttgctgaaaggaaagataaatgccagccccaggccattcagaaaacatttctcccaggctctgcccatccaacttcccggcacagcgcttgccctcattccatgtggtgccggccttttccacctgtgctcttggtatatggggaagatactaaaaccaaaaacaaacgacgggacgtgtcgggttcccagacaatcacccacctgacagcttctcttcctgcacgggagcctctgcttggctgtagcggagttgggggaagggacaaaagtcaaaacccagaaaatagggcaccccctcctgcgctgtccatggataagatctcccccagccccgaggccgggaacgatcctgtcctccagtgacctccttttccctccccttacctcctccttaccagagctttaaggtgaaagcacagagcaaccagcagaggtggcggccctgggggaggccaggcctcccggcacccgcaagcatggagcgccaagtgtcgcacctgtcggaacagagggacctactccacaggcctcgtgcctccgtcggagcgcagaggcggcacttactctgcagccctcccagaggttccaggtcagggcagggaaggccggagttgcctattggagcagaggatctatcaggacgtccccgttgccacagcgagaaaaatcgatatgtttttgcgggctagggaggcgagcgccttctgcggggtccgcagggcgctggaggaagggccggcgggggctcgcggccctagcgcccgctcacctccgctcccgcccccgacgcagccatctagccccgtggaggatcctcgggcgcgggaccgagctcggggcccggtgttcccgggggcgttcggtcgtcgcccgctggggcttatagtcttccgcgtcggtggcgcctcgcctgctgctcactgggaattagctcggcgccccgttgcattgtggtcttggtagtctttgcgagaacggcaaatggcggttgcagaggctcgtccgaattctcggctcgctgctccctggctggcgcgtgtttgttcattctgggctaggtgagcagggacaatacgtcgccctctcaggactttgctctctccttaaaacccgaggattcaccgtcaagcttctggtttctctgacatccttccccagccgccccttcatcgccaccgatgatccagtggagaagctgtgttggaggtcaagggatggaggcgaaactgcgcgttctcgtccctgcagaaaccggaatatccgagacacatgacgaacatgaaactttctccttgtctcttggctcccactccgctacacagatgaacggtgttaccttccctcatgttactttgctaagcctactcctcagagctggtcctttgcataacctcttcaaatgctctcaactctcccttgctcctacataatggagtaatcataagtgcaatgagaaaagcatgagatttgaagttccataagtattgagtctaggttctggtggttattaactccatgatcttaggaaagtatctgtcagtgttctgtgtaaaacggaaatgctaatgtgtatttaccaggactttttcttgcgagaggcagatgaaatgtatctccgtttcatgagtaagttcagagaatataagtgacttgtccaaggtcagcaagctaatgagtgggaaagctgaggcttgagcctagactgtcaacacccaggccaaagattcattgcctgcttttcatcttatggagttaaaccttgatacacactcagatctgcagtgacttgaccagcactgtgggttcatgctttactgtctgataacgaattttcatttaattttattttttttcttagacagggtctagctctgtcacctaaacctgatgagggctgagccttcatttcgccgttttttgtttgtttgtttttgtttttgaacgagatggactctggctatgttgccagactggagtgcagtggcaagtcacaggagccatcatagcgcattacagcctggaacttctcgtcttcagggatcctcccaagtagctgggatttcaggcatgtgccaccatacctggctctaattttgaatttgtttctttaaattattatttgtgtttgctgaaattgtgtgtgtattatttttgtgtatgtgtgtgagtagttatatgttacataaagtaggttgtggggttttttccagtaatgtttagctataattgaagtttgggccgaaatctgctagtatttgttactcctcaccaaatcctaccttatctcacaacaaactgtaagatcttgtgatatttcacttccaataaccttaccaggcatcagagtggggtctctactctgaaattaaatatctgccataaggtatgttgaagacgttagtctctttcccaggaggcacaaagtgcaagtcttttcctcatcgcttgagcaaattaaacctaccggacagtttactacagaactcaaacacagctgggcgcagtggctcacgcctgtaatcccagcaatttgggaggccgaggtgggcggatcacctgaggtcgggagttcaagaccagcctgaccaacatggagaaaccccgtctccactaaaaatacagaattagctgggcatggtgccatatgcctgtaatcccaggtactcgtgaggctgaggcaggagaatcacttgaacccgggaggtagaggttgcggtgagccgagatcacaccattgtactccagcctgggcaacaagagcaagaattcatctcaaaagaaaaaaaaaagaacttaagcataagccacaaataaggtttatcattacctcatcaatgcttggatacttacatttatcaagttattacattttgctgtgtaaaaaatattatgtatggtgaaagggggatatatatatattatgtattaaaatatgtattatatattatatattaaacataatataattatatataattatatattaaacataatatattatatattaaatatataattataatatatatttaatatatatgtataatatataattatatattatatataatatgttatatgtttataaacatatacatgttatatatattatatatttcctatatatttaatatataatatatataattatacattgtaatatataatataatataatatatatatacttaaggatgctgtg

SEQ ID NO: 1037 - DNA, 4001 bp, Homo sapiens
cccactgttaacgtggttcatgactttctgtttaagctgtgccacctgttccctgagcatgttggccgtggacgccagctccgagttctgagctttcaaggttttcactttttcctccagccgggcgattctctccagcttcctttttcggcacttggaggcagcgatgcggttcctcatgcgcttcctctccgccttgatccgctcctgggactccatgtcgatgggggacaggggcggtgtctcgccgggcatctcgggcactgtctgaggctcctccttcagggcctgcagccgcgggtgctgcacgggcatctgctggggcaggtggtgcggcggctgctgctgctgctggggttgcgcgggaaaggccaggccggccgcgccgtaggagggcgccccgccgccgctgctcagcgcgcctgggttgaagttgctgaggtttgcgtagaccggcggctcgctgtgcaggctggcgctgaagccgccgctgccgctgccccctgccaccgaggctaccgcgggagccaccatgcctgccccgttgaccggctgcgccgccgacgtgacgctgggcagcgtgttctggctgtgcagttcggccagggcgcgcacgaagccctcggcgaagccctcctgctcatctgtcacgttcttggggcacaggaactgggtgggggtcggcgtggtggtgatgtgcccgttgctggactggattatcaggcgctccagctcgggcgacgccagcttgagcagccccacgtcgggcgaggtgaggaggtccgagttcttggcgcggaggtgcggcttcaggctccccactgggtcggccaggttcagggtcatgctctgtttcaggatcttggggttactgtagccataaggtccgctctcggacgggaggaacgaggcgttgagggcatcgtcatagaaggtcgtttccatctttgcagtcatagaacagtccgtcacttcacgtgaggttagtttgggctgcgcgcacaagtttcggggccgcaacagggctgtggcaagcgggggacacccgcgccccccggagcctttgacagggaaagtttctctaagagcgcacgcacccgctggctgtcgtccccgctgcgccctcctcaccagctcgctccagggagcgcagggttaattaagatgcctcccgcactcttacttgtcgactcgcgcgcgctacccggctttgaaaagtcgcggtcactcactgagcgctcttcgtgcgcagcggttcctcggagtccgcaggcgaactcacttcccagagcagcggctctccccgcggagcggatcagtgcggaccctgcagtggccggccggcggcgggtcttggccgcccggactccgacgacttgtcccctcctccgctgctagggggagggggcgcccggcagccgcggctcgcgctcgcccaagttcaacaaccggtgcgagcgaagctgagcgcacgtccttcttctcttgcgtggctctccgccgccttctggtctttaccgccgtggagaagcctaagacgcaggaaaggcttgcaaaagttggctccgggactctgccacttgtctccggtcctcccagccgggaaagttctttgctgctgcagccgctcgccgacttcccccggcgggcgcgtgggtaccgctgctttccgccgctgtcaacagcgcctgggcagcagggctctcctcccgggggcggctggagaccaggctctctggacactcccgaaacaccagcccgggagccacaggcgctagctctgggcagttagagagaaggtgaaaagaaaataagatttgcagttcggactatactgccgacctggctggctggctgtgtctgtctgtctgcctgactccgcgcacctccactcccgcctcgctgcttcagccacactcagtgcaactctgagcccttatccagcccgagctcaacacttatctgctaccagtcaacccctaaaaatagcccatgatgtcaccccaaggccttcccattggctcgcgtcgctctcaggggggcgggcccgcccgtcaccatggagactccaccctagaagattcttctctgggcccgcggaggctcacgggatgaggtaatgctccgctgccctcctacagtcgggcccttctttctcctaccctcccccctgccgcacgcctctcggccctctcttccccggtcccctccccgggccgtttttcccggcccgcccggtgcattgtgggctgacgtcttggggtttgactgtctagtgacggtggctgccgcgagcgggcggacgctcgcaacctctgatggaggggggctcaagttcacggctgcggacggggatgcgggggatgcagggacccgggaggccagggaacctggccagttgttttgggccaggggtgcgggcgaggggtggttgttgtttccccacttgtggggcccgaagtcatccaccggcggccgccaccgcgcggggctggaggctgagaatccaagtacgctgccacccccccgcacttccgggggggcgggaataccgcccttaaggtggctctgtgaagtcccaggtgggggcgagcctaaggggacttaagtttaggggcggtctcccgagagtcggccccccacgttgagaacactccgaagtttgcatctcggtcaagttcaggagcgacggtccgcggggtcgtctggctgctcgtagaagccgagagatttgtattgcccgaaactggacgctcagctgagtctccgttgcaccccacttcatcctccgggaccgtgggggaaagggcgcgggggttcacagctttgcctcggaggggcagtttttatagtgggcgcaattggtgggtaacagggtccagatgggaacaagcgtgtaggcgatccgaaactcggggaaccccggtgttagtctactccccctcccgcccccggacaacacgcacacgcttaacacaacacgcacaacataacgcgcgcgcgcgcgcacacacacactccatccgcgccgagttgcttccgggaaaacaagcccagaaggcggcggacactcgcataaagtcacgcagtagtactcggagcccggggtagaacctggacttcaaatctctgcactcccggccgggtggtgggcgcatatcctgggtagcctctaggaagcgctagacacatgtaagtggttccttttccgcggttattttattctccccccgccccccaccccttagggacgaaagtgtgtggtggaaagaatcccgaagtcgggaatcctggttctttcgtggccaggctaccacagtgtgaagcaagcaaatcacggaactcctccgagcttcatttccctcatctgcaggtggggccggtgccgtccacctcactgggctgccaggagttagtgtgacagggtcgcctgcagcactagggaggtggtggccaaacagcccgcttccctcccctgcctcgcagtttccatcctcgcagagcctggataggatgccaggatataagagtgcgatttggcaggaccaggtgtactttcctgtgagaagcatcgaggggaggaggggagggggaaccgggttagaagtcagatctttcccaagcctctgtctaaaactggggcttgaagttggacctgcagcagtttaagttcctaggttctaaattcagacttcgctgcttctgaacttggaattcagccttgggttcattgcccccagccctaaggtatttgcggctttgagtgttcagaaaccaacagcagctggtatcagtgggaaacctgccaacttttcttcactccgggcactcacctagctttcactgatctgcagagggtaactgaaagcctactgtgagccaggcactgagctggggagggggtggggtaggtaggtatacagtgatgacaagatccagttgcttcctcaaggagagaacattctcctctgtctgttgccctgaatcattttctgttgtat

SEQ ID NO: 1038 - DNA, 4001 bp, Homo sapiens
aggtgctattggtctatctctctccttctccccacactatgatctagccaggggacttccaactgctcattattacagttcagaaaggaaggcactgactggaccagtcaatgggatgcacaactaaaggactgcccatttgggcccctggtagtaactcagccaacagaggctttcagttcctctaacccactctgctactcaccttaggccctctcacacgcggctacttctgcctagaaggctcattccactctctcctgtcattctgcagactgaccgactactggacctatcaggttttcagggtatctagtcctttcaaagaactcagcactggagaattctctatttatgtgagtgatttaattcctgttggtgttggccactggaatgcaagctccatgaggccagaaggtgccagttttgttcacttctgtacctcactacgttgaccagtgcctggcacagagcatttgttgattgaatcagtctggtctgatccccgagccattccccaaaactcactttccccaggtcacattatggtccagtgaagtgggaaggctgggcttgaaaaggcagtattagaacggactctgcctccattcccagtgtagctttcctgtgtcacattttgagaggctctaagcaacctgggcttgatttacccaagcaggtccttgggaatcgtgtttaactcaagatgctttctccccatgcctcagccgggtcactggctgcatctgatcctcctctggccctatttggtagataggactttgcccaggcctcagggggtcctcctccctctcctggaaaatactccctctttgccctaaaggcttgcactccagggcgcttaggaactaagacttgagtttggcagccccgaaggatgcccagggcaagagttaggttcagacccagcgtagcggccatgggctcgactttccaactcccatttctggccagtctgcggggtcaaagtacccagtcacagatttgaccttaccggagaggcagaagggaaaggagcccacaggaggcatgcgggctgggcaaagcgccctcggcggcgtctagagcactcggagctgccccattgcctccgcccaaggtcgcggcccaaagggagccctggaaagttcagccaggggccgaggagtgccagggttggcactacggggagacttttgcgacaggagagagactaagagctcgattccaggtagcagtgggagcccgcggcaaagaacgcccagtcccgcaggctgcatcccagaccgcagcgcctagctcggaaaagctgggcgggggctgcaccacctgagtcgcaaggacagcacggcctccccctcctcaccagtgttctccacccccagaattggggcgcggagagccaatctgggctggaaagggagcggcgcccacctttgggcagcccgagcagccccgctccttttctgtcgcagaccccaggctgggaggcgggggcgccaggtcggcccaagctgccgcagccactgctttaaagggagccggggacgcggcgctggggactgggcgaggcgggtggcagaggcaagaggagagtggtcgagcgccggggccaacactcgggtcgcgcagggcgggtgttgaacaccccagcagacgcactgcgggggactggggtcgcagagtcccttaccttggcgagctgcggaagtcctgcgcgaggcggcccgcggtgcacggggccggggcagctaggcgcacaccccggcttcggagcgcacgcaacctccgggtgcactgtccgcgtcccaggcgcgcaccccggggctggcgcaccctggtcgtccgcggcgcgcacaccctccaggcgccctctggccgacggtctcggccctggccccggcgcacccctgcgggcacacccaccgcggcggatgcgggactggccaggcgccgccagccgcggcttcgccccgcgtcgccagctgccaacagcgcccgagtccccgccttcgctaggggagaaaaaaaagactcctgacgcggcgcggactttggtgtgtaggaaggggcagaattgcgaaaccgaggggagggtcttagcctcgataaactcaaaagcccttgataaacatgagcttagaagaaaaactttttgaaaagagaccaaaaactcctaacctgttcatagcgcttttcagattcccaaagtgctttcgtatgcgtttatctcggttcatctagacatttccatcctcatttgataggtgcagaaacagcaccagacaaggtaatgacttgccccagccaggactggaacctaggtctggccactgggaagctgggtgcagtaagttaggtcctcgccagcggatgtgggccagtgagggctggggtcctagtaacagaacttttacctctcctaaatcgtctttttccatctcctttttttcttcccaatccttgctgtagtcccactcaggaaccctaagtctttcatttcacactccgacctcccaccaaaggtttgttgttgttgttgctgtttgagacggaatctcgctctatggccaagctggagagcagtggcgcgatcccgactcactggaacttccgcctccctggttcaagcgattctcctgcctcagcctcccgagtagctgggactacaggcgcacaccaccacgcccagctaacttttgtatttttagtagagacggggtttcaccatgttggccaggcgggtctcgaacgtcaggtgatccgcccacctcggcctcccaaagtgctgggattacatgcatgagccacggcgcccggcccaccagagttttttatcagttcaaaatgtttgcgtttcaaccgctaaccttgaatgaacagttcactaagtgcctggtgggcgttgtgcaccctaaccctaggaaaaaggagctgctgctactcctcctttacagatgaagacaacagagataggcaagtagagggccgtggaccccgtaagactccggatgccagctctgacccccacaatgggcatccttcatgggcccattggcaagggctaacacttaggcaaaggggtttcgtttttgacattgtgacccagatgggggagtactttctaggactttcattttacgtttttatagaaatatggttatttgaacgatttcacttccactagagctccactggagcaaatcaatatcccagagcaataataaatggcagcagagacttggtcccagtgttgggacatagtagggagtggtggggactgtggtgagcttgatagcagctccaggttcttgcccaagggaaggggctgctgctactcagctcagtctattttgtcatctagggaaagggattcatgtggccagatcctcccattttgaaaaagaagccatcagccggacacggtggctcacgccagtaatcccagcactgtgggaggccaaggtgggtggatcagctgaggtcaggagtttgagacaagcctggccaacatgtgaaaccatctgtactaaaaatacaaaattagcaaggtgtggtggtgcgtgcctgtaatcccagctactcaggaggctgaggcaggagaatcacttgaacccaggaggcagagattgcagtgcaccgagatcgcaccactgccctccagcctaagtgacagagcaagactccgtctcaaaaaaaaaaaaaaagccataagtcagatatttaagtgaaggccccaaatttgttaggagctcatttgtataatgctaaacactttctacataggtcaacactgttcaagccaaaggaaatggctttatggatcagatccagcctacaggccaggggtttgtgctctcctgtttgggggcacttcacactattttcatttgggcttcccaacatccctgtgggatagacccagtgtggatcatatttccattttagggaagaggaagcccagttcaggtgggctccagaactggcccaaagtcacacaa

SEQ ID NO: 1039 - DNA, 4001 bp, Homo sapiens
aaaagtgaagcattaccttgcagtctgtcttttttttttttttttttttttgcacaggttccagtggagaatgttctttcgcacacaatgacattgcaaggatgacaagaataaccacatgtcaagcttgcagcaagcactaggaccacaacaccttctcaccattacgtcatggctacttccttaccaaagtactccccccaattcctaagacttccaacaggctccgggagtaccaagttaagatctgacttggaattcgacataaaactgcacgtgggcaggcttcacatctcacctcaaagaaagcacaccttcccaggaagataaggtggaaacagagactgatggagagaaccagattcttaggaaaacagactctctcaaccctcaagagaagctcttgaaatgacaacagaaccagaaaatcattttgagccactgagcaattggtaccttgcacttcaagtgacatatttagacaagtggacctcatggactggagatttgtttctgtcctgttctggatttcagcagtttaatttgcaattcaaatgatattaataaccagtgatactgtttcttaaagggcaattaggcaaaaagaaaaaaaaaatcccccaaagcctgcttacccttttactttctaagtcacagaaaccaaacagtacattttagggaatgccccatccgcctttatgtcttgcagggggtttcagagcttaatctctgtcaatgtgaacacaaaccaactgtctttttcttcctcttctctaaaccgcagagtcccttcaaacgggctccctgcagcccaccaccctaagccttcatttctctaccgctcaacctttgaggtctacagtatccccctggaaagtgctctcggtgtttatatttgcggaaatttaaactccctgctgagctgagcatctactgttgcatctatagattccaatgcctgagagacctcaaatgagaagaaaataaagtccagatgcaactgagccaagggatttggcatccgcggagaaaagtgcacagcagtgcaatcctctatcccaaccacggcggcagagcccggagctctctctgggaaggagcctaaggaagtggggggaactgtgccattcacccctgcggggggtggggaaaaggccccggcatgaaaagtttgcacggagctagggggctggtgccacggaaagggcactttctgatgccggaagggacccgccggctgcgcctcgctcaggctggccggggccggtgtgaccgtgtgaccccgtgcacactgcgctcgggttttcgtgaatgacagcagcctgcaactcccagccggagagcagcggtggccaccgccgggcggaaagggttacaagccagaatgcaaagcgatttcgccccgggtgtgggggaccccgggtccccggccacctccgaggccgggcgtgctctgctcgccttcctccgccctgggcgccggggcgatcctaccttgcgctccaagctgggggttctccatgttcgtcgccgccgagtcccccgccgccgaggcgctggccgcggctcccgggcccgggccggggccgccgccgccgctcagttccgccagtctccggttggtggccgtgagttcggctcgcaggttggtcacctcctggctggccgactggaccgccccatcgatgcggagcgcgagctgcttattgtcttccatcatgctcaggattttggcctgggggcgagagaggtgacaaagagctgcatgatgcgcggggggcgcgcggccgggcacccccggctctacctgttgtgtcctccgcggcccggcttcgcccgcgccccgacccccaggcaccggcagcgccggttcctccggcacaggaatgacagcggcgcctccagccctagccgcggcggtggcgaggcggcggggggaggaggcggaggagaaaaaagaggaggagaaggaggaggaggagcagcgatcgccgagaccccggcgggcgggcgccgagagctgctccaagaaggacaccgcgcgccaccaggcactctttaaatggagcctaccattcgccgccggctcgggagggggtctcggtcggaggctgggggcacccttggcctcccgcgcccccgtacttcggagacacaccccccgggggggcggaggcggcggacggcagtcgggagggggccaaggtggcgcccctggcgaggggcaggggtcgcctggaccgaggccggccctctgtcccctcccttgagcggtggggcagcccccgccctggagaactggtgccccgagccgtgctaaggttggggaggtgctgggtgctcggaagagagggtgcttggaaagggggcctcagaggggagccggggtggatctccatggaagggagacgcttgcgccagctcaggagtggagttcgtgctccaccggttccttaaactgcgagtacgaaatccccagaggggagctgagctggtgccccgcgtgcctctcactctccaccccccacccgcaggccagacctgcgctgcccaccccaggagggagcgcctatcttcctcggcgtgggccgctggtgctcccgcctctccacagccctagccctgtgtgtgcatccaggtggaggagcagccttagccagctcctaagcttcttagccgggctgaatattggcggggacagagatgaggttgagagataagaaggaaggcgtcgatggggcttcttccctttcttctactgggagcagaagagttgagccctgctgcctcagtttacccatcccctcttcacagaagaactgaggtaacctgacgttgatatgccctctccagctcctctttctctcccagaccacaggctttgcatttttcactggggccctggattccagccaccagaccttgttaccatagcaaacttcattccatgcaaataggacaatttaaaacagccagcaaccctctggtcaacagggcgccatcattccagctcagtcaacctccggagagcagcaaagagcagattgcagaagccagtggggtgctgcgaggaaaaatgaggctgcccacccttcaggttcttacaggaagcccataagaaccaagcaaaaactgcgtgtagagtgcttttatatgcattcttatctcttgtgagtgaggattattattcccattttagggataaggaaactgaggctctgcatagggttaagcaatttacttaaggggcccgcagaaaccaggtgacagcgggactggaagaaagtaatcatctgattgcaagttcctcctgctgcgccttcaggaggccttggatgatagatttctccccccttttctgtggaaccataaaaacagtcttgctccattcccctgtgaccactaacaagcttttgcaagagggcaggatttgatggtggagcatgtggcaggaagacacaattcttcactctgtccgctctgctcagctaatgggtcagttcggggatcgaaccctgaccttaacctcattaacacaagttcttaccaactggaccaaccaaggcacttagaactgcttagtgtatctgcaaaccaggattcagttctttgcagtctttcagttacgttatggggagagcatcaaaactacagagctgtgtgggtcttgaaaagggggatgccgtggtgcagccattgtggaaaacatattagcagttccttgaacagttaaacataggattaccatacgacccagcaaatccactcctaggtatatgtccaaaacaaatatccaaacaaaaatttgtacatgaatgttcatagcagcactgttcattagtagccagaaggcagaaataacccaaatgtccatcaacagatgattggatgaacaaattgcagtatgcaatggaatattactcagccgtgaagagtactgatacatgctactactacgtggatgaagctccaaaacattatgttagttgaaagaagcccga

SEQ ID NO: 1040 - DNA, 4001 bp, Homo sapiens
aagccatttccaggcttttcctgcccatatcagtctttctccttttcccccatctggaggggtctttgcaccaacccacagccactggggttcacctgagggttccagctcccatttgggtgttcactatgtgcctggcactgagcctcagcccatcagattctctcaccaaccccatgggagaagtgctagcattctctccattttgcagaggcagtaatggaggcttcaacaggtttgttcaaggtcacagagctggtccaggtggcacagctggatcccaaccccggctggtctgattccaaagctcatgttcctaaccactggataggctcccagccctaagtctcatgctgtgcctgcttcgcaaactaaatgtcaggacaaatagtctcacaggtggacacagagttgaaattgggcacagcgttgaaactgggtctttgagcttcagatgaaaaaaatggccaggtcccccagtcttggctcttgcaacaatctcctcccctccccaaggccaggctcctgaagggaggtacccaggggagggacagcaagccccgggtggcactgcctgcttccctccacatcctcactgtgcaggactttccatccatcctcatccatcctccctcttccccacccttgaggaaaaaaaaattaccaacaccccaagaggaaaaagaaggaaggccgcgcattagttacatccaccacctcatgacaccatccacacagggagcccaaagctcactgcagatcgggaggaagcaacttgagcacggccttacaacggccgggagagcccagccctgctttctttcccaccctgagtgtgactcagcagcataacacccagtgtctcagtttccttctccacccattcccagaacccacggaaagatggaagctgcttgccccacacctcacagagcaggttctcccgtgtctagctccgggcgggagagctaactttctgagaagactaggggaaagaacaggcatttctatttccatattatagacaatcaaaccaaagcctagaggaaagtctggaatccacaacctcaaccgcgcggccactggctataccatgagctggagaacaaactggaaacacactacatgctaagccagtatcagatttcaactcgggttaaatgcagcaaaatgagtaaggcatgctgacagtccctgcagatgtaaataattctgctaagaggagaagtaggtgaacgggggctcagctgaaggctctcctagacgtcgccatcacacaagggtggtgagcctgcagttcacacatcttcagatctccatagtgaacagacgcgtgctttctaaagaatttaaaccagattgagaccatcctggctaacacggtgaaaccctgtctctactataaatacaaaaaattagccaagcgtggtggcaggcgcctgtagccccagtgactcgggaggctgaggcaggagaatggcgtgaacccgggaggcagaggttgtagtgagctgagattgtgccactgcactccagcctgggcaacagagcgagactccatctcaaaaaaaaaaaaagagagaattaaaaaaaaaaaagagagagagaatttaaaagaagtccagactggggtctgagcaaatggcaaacctggggactcactgtctcccatgcagcttctgaaggtacacacctagtgggcgtttccggcaatcacatcacctctacgtccctccacttcctcacctgtaaaatggccacaatgacagtgaagagcagtggttctggaactggatggcctggttcaaatcctggctctgtccttgggtagttgtttgaccctggcacgtcacttccctgtccttgtgtggagaatgaagatcacaatagtattcatctcccagggctgctgtgccaatgcctgaggacagataaaaagccccagcaagcggcctggcacccatgagccctccgtcaacactggcagacagctgctgatgccatcacagggcatgcctgactccatggaggcgacaggaaaggagagcaagtcttgggctcaggctgcccaagtcttccgggccggagcggacacttgccctttggtgggaggctctcgaggccgtggagcttgaaagtgctgcggggcagctcacaaatccatataactcactcccgattactctccagcctgcctgagcagctgctccaggaagaaataaaatatgctttgcatactttaaatgtttcacttatgaaaactggcagggctgcctttctaaattgtttagcaataaagtcactaacgagcagtgtttgaggctctccccaccggagctggagccgggccggggagccagccggggtggggggagggggcagggagggaggacagactggccgccagtgcggagactgctagggcttccagaaggcgccatctgggatttttcagaggggcacggggatcacatcctggtgtcccgatgtgaaactggatcctccctctggaagccaagccccaaatgagtgggggcagaggggagggcccttccggcctgggacgttttcccacactccagggcgccccggtttccagccaattgagttaattgaaaaattaccttgggctgagaaagaccaggactgggccacgggggactgcctcacaggagacccaactcagcctccagcactggacttccaccatctatagctgcgaggcctgcaggggtgctcctgatgctgggcacacatcccctgcaacctcccagagacctcaggggtagtttcagtcctacttgacagatggggaaactaaggcaaaagggataaggagcctgcccaagaacagaaagctagggagctgtgggccatgagcctccgtgcagcctggtgctgtcccctgcggtactttgtcccaggatgctgttctgaatgtgtggcagggccactgcgaccccaaaacccaacgaatgtaactcggaaggaagcccagaatgcagatcagctggcaggcgggcaagaggcctcctgccctgcccagaacaggatggtgccgccatccgcagaaggccttgctgcgggctgatattgctgatattgacaaagtgctgaataaagcacttttccctccttccaagtgctcacttctctgtttatcatcccagctgcctgggaagattacaatggtgggttttattgtcctaaataaaggccagccaaccccaaggccccgggaacagcaccatgactcagctgggtcacataggagtctggggtatggggaggcccaagcccagttccccacctgccccttgcccctggcccatctcccatgcacagacaccaggcagtccacactggagaccgcctctctggggcagttcattcgtgtccccctaggacccctgcctattcgaaggcgagagagacctgcaattccagaatggtccatcccatctccaggggccgtggcaggcatggcttctgaaaccaagtaggacaccaacgggggcccccacagctgtgtctccccggcatcaggccacaacctttcaggactagaaatgaacacagctgattagaaaaacacccttacttcacttacagagtttcagcagtttagtctgtgaaccaaacatataattaaggcacagaaaaatgtgagttgcttttttttttttttttttaggagggggagctgggagcgggaagaggcagacaaactcaagtccccgagttacctttatgtctgaagacagaatttcttcccccacaagaaaactcgaccctgacatagaagctgcatatccagtgtgtgtttttttgtttttgtttttttttgagacagagtctctttctgtcacccaggctggagtgcagtagtgagatctcagctcagtacaacctccgcctcccgggttcaagcgattctcctgcctcagtctcccaagtagctgggattacaggcatgcgccaccacgcccggctaattagtt

SEQ ID NO: 1041 - DNA, 4001 bp, Homo sapiens
gggagcactgacaggtcatctggcaagcatgtaatgccagaaggagctgaggactaacatgcattaagcatttatggtgaatgaggcaaggtgttttacagacaccatctttggaatgacagatctttagttggtactattattatttccactgtacagatgggtaaattgagtctcaaaaagatgaagcaacttgaccaaactctcccatctgcttccttttcgcatcgatgctgttttacctcaacccgtcttggactctgccgtgtgtaactggggagaaggtgggaaaaggaaaactccaacacaggagagaggactactctgccctgacacccagaggcggcattccatctcctggggaggctaccataggcaaaaacaagaatagggggccttgtggttggcttttttcttacaggaaagaaatgattattaggaaaataagcccgtgtgctccccagctagtgagcttgctgcctgggagaggtattatggtgctaagactttggatttccacggacaaaactgggaattccaacaccatgatttaggactctgggaacttgggcaagtcgcttaacctccgggcttttctgtcctcatctgcatggagataacacagcctcactcccagggttgtgataagattttaaggatgtgttgcatgtgaattactagaacacaataggtgttcgatgaataaggaataattatgttgtgcctccccctcccgtttttcccggaaaaagtattcagaacttggacctggtgatggcagccccttctcagaaaagcccttcgtcttctaaggtttcttcctactccagtcaagatgacgcaggggttcctgtctcccatccccatgccctaacttggggggaaggggcagggggaagggagatagcgcaggcctgagtgggatggaacgggcacacccgctgggaacactttaacagtaaaacgctgttctccacttggggcggattcgccaaccaaacgcaattagatcactgcgtttgtgtctccacctctgcaatttctctttctgcattactcggagttcaagtgtatgagaaacgcagcaatctctccgctcctagcaaatgcgaggcatcaatttcgcctcggaggggcggcggtgaagggggctcccctcggcactccgcgggggccgccacatggctcacaggtgcggtcccagggggccgaaccaacttcgcgcagggctggcccctttcccacgcttcccccagcagacgcggggtccagcccggagctgggtctccaggcgccgcgggatcgcctggctccggcaagcgcggtcctggccccccggtgcagcccccgagccccggtccccacgccgaggaactcactctgcgtcccgcacgcctcccgctgcacccgcccggggctcggggctccgcgcgctgcgagaactttgccaccagcggcttcccgatcccggctccgagcgccctcgcgcgcccggccccggcggctcctgggcctgtgtccgcgccgcccgccccgccccgccccgcgcgcacctaccgggctggctgcagtcgccatccgctcggacccggggaaccccggcgcggggccgatcgccgggccccgccgcgtccacgcactgctcgcaggctgcgggtcccgggggccgcgcgggcccggcccccgccccgcaggaaggcgccggctcgccctgcgccgcgagctggcggacgcgctcccacgagcccgagtcggccgcccgcatgccgggtgcccggggggacgctaccagcggctgcgcgaggggctccgacggcgcgcgccgggctcacagacccggaggtcgccgccgcatcggggcgcagccgagcccgcccccgcctcccgcccggccggcggcgcgcgccggaccagggctctcagtccggccggacgccgggcggtccgcgcctgctgcacgcgaggaattcggccgcggagcctctcacgtgggaacggctctcagtcccgcggctcctcctcccgctccttccgggctggcgactgccgaggctcgccccgcccccgccccgcccccgccccgccgcggcgcccagactggccccagtgcccggggagcgccgccgcgtcgccccgttgtgcgcccggcccccgccactcggtgcatccccgacgcggtcattcccggggacacggagggtcagaaagacggccgatgtcacaggggtggctgtgacggaactcgagccccggtctttgaaagcccctggcctctgcctggcaccccactttgctgtgtctctctcctctcctgacaccctgtgacagccttgccgagagccgaggtccccacagctgaccgggagaggtcagaaggagtgggcgggcaggggagcagccccgggacctttccttcgctcatctttgcgtgtgaccggccatcctctaagtgaggggaatgctgagtgcacccaccgtctggtgggggagatcgcgagggggctgagatctggtgggaggccctgtgacttcacctcacttccccagcctcagtttccccatctatgagttaggcattagtaattccccactgtccattatcagtgctgcccatgaactctccaactatggcagccattggcaggggaggccagagcctggaccctgggagtgggtgggggaacagtgacaaggccaggcaaaccctgtaggaagtggcaccttggagggtctgcacaacagaacccacccgctggagtgggtgttcaggctggcagtgctcctgtgaagtaagtgtgcagctctgagccccctttgatctggggattacgatgctgtttagaaagactaattatctccttacagccccaggaggcaggtccagttcccccctgttgtagacacgcgggagccgaggccacacagccaggtgaggagtcagtcacacactcatggagcccccagcctccccttgtaggcagcatgctagcaaccttaccctgcccaggcttggctctataatctgaggctcccactggcccaggcctgagatgtgcaaatttctaggtcactggcctatggctgtccaacaagctgtgagaacctaattactttcccttaagtctacaaaaccttttaggagcagtttcctgcccatgggtcagaagccctggctctcagcaaccacagtggcctggccaccaactatcatggccttcccagcttccccccgcccccgcatcctcaccttcccaatgatggaaactggcccagctgcggaggctgccttagaacccctgccctgtctagctggcacttttttttttttttttttttttgagacagagtctcgctttgtcacccagcctggagtgcggtggtgtgatcttggctcactgcaacttccgcctcccgggttcaagcgattctcctgcctcagcctcctgagtagctgggattacaggtgcccgccaccatgcccggctaatttttgtatttttagtagagacagggtttcgccatgttggtcaggctggtctcgaactcctgatctggtgatgcgccagcctcggcctcccaaagtgcacttttaactgcgccagaggacggcagagtggcatgggaagtgctgggtgctcccagctgtggaagaaaagtacccacaccacttttccaggaggaaggaaactgacaccacaccaagtgaccagagatgctgggaatcccctaattcctctcctttactgagataacagacagagcagaacaaaagaatgatcactctgagcacccgagagcggagaagctaggaatgcccttgccagcccctgcatcctggagaatctggtccaggactgtctgagttaccttcagggacctgcctgggaacataaatgagtgagctgggttgagcaggggctactgtggtttatttcataagggcatttatgttatattattttgacttaaacactcttggcatattaaacacttaggaagac

SEQ ID NO: 1042 - DNA, 4001 bp, Homo sapiens
tgaatcgtccctgtgctccagcctgggcaacacagtgtaaaccagagtatgtgccctcctgggtttcttactctaaaaaaattaacccaatcccaggaaagcaaagggcagaggttctcaatgtctgatctgtggaatgccaaaattacgcagggtacttgatacaaatccagattcctggcgggggaggaggggagcctgagaatctataccttagcaagcaccccagaccgctgcaatccctgaagtctgagaccctccttgaatgggtcagagagggctgggaagatggtaaagggtgaaaatttccagtgctgccaagacattcccatgacttctctctttttttttaaagacagagtcttgctctgttgcccaggatggagtgcagtggcatgatcttagctcactataacctctgcctcttctcctggattcaatcaattttccttcctcagccttccgagtagctgggactacaggcatgcgccaccatgctgggctcatttttgtattttttttttttagtagagatggggtttcaccatgttgcccaggctggtcctgaactcctgacctcaagtgctccgcctgcttcggccacccaaagtgctgggactacaggtgtgagccatcgagcccagcctcccataccttttctaaggtttcatatctggccctggaagcctccctgtgtgacaccctggagtatggtcccttcccagcctcgggcctcagtttcctcacctagtagaggaaacgggttcaccccatccctgcagaggtttccctctcagggctctgcattctagatttccaaatggttgtggcgggggagtctcccgtcaggagccagcttgcctctggcttcgggctggggtgaaggggcaggggcagagtctcctgttgacagagatcgggggccactctgggcccccagggttcccccctcccaactggctctggctgattggcaagccagtgagccgaaggtgccaggaagaaaagtcctgtgactctcggcagctcagcctccgctctgtggcctggtagcccggggaatcgtcagctgacaaggaaactgcaggaggaagggtcccaggagggcagcatggcagcctggaacagctactttccacagccggtgtaacctctcccaagcttcagtggtctcacccgtaagatggggagaatggcagctgcctgacaggaagagggggatcaaaaggaacacatgtaacaaggtgcttggttcctgctcggccctcagtcaatgatccttccacactaatgggacccgactgagcgaaaatccacattcttcccagcctgggcacatagaacttcaaagtcaggaacatgctgctgaggctgtgctgtgaggggagggaataaagcatccgggaaatagcagctgttgtttttacttctctccaattccccaggagagcttttctgaaacttctgtacaattaaaaggtagtgaacacagtgaatgcctgtgataaagttacagcccaaactagctgggagcctgagccagcctccgaatccaagaagcaacaaaagacgagaccacgggcaccggcagattacccacctggtgccaggtggagggtgtttcccaaaacagtccccagtgtccagcacgtagactgaggacgggccccacccagagcccaccagctccccgctgcttaggccagactcagtgtcagccagttcagggctgggacagcggccagcactcacgtacctgtcacactcttctggttccgaatttcctccaaactgggtgccactgcagcacatgacgggctaatgccatctgatgagggctctggggaattgccacaattgatatcctctaactggcctctcttgaaggcatccaaaaagcagacgagagaaagcctggagtccccaccttcatagaagccgccacaagggagacagaggttgtccttgtgaacaggaggcaagcctgaccttccctctcccttgaaaggcactcatctggcacccgcaacataagacgcactcacggagagtaaatccattaaaataactccacgcccgcacaccccttataaccatgcctgtctctctggagtgtttacagcccttagtgactcacagcaaacacgggatccccagggcgatggcttcggccgggtttaatgacatgttgggtgtgcttatctgctgggactaaaatctgtctacatgcaaatgtgctgacgttccatttttgtcagcttgctgtgttacagatgagggaggctaaccccagagccaggggtgctattttcctcttgagatgatttaaaaaatgaacaaactcttcttcctccagaatggctggagggtcctggcaaattgtccagttcactcaactggagtattacaaagaacataaatggtgcttggtgcccattatggagatttcgtgatgactcagaaagccaaataagcagctagcagccctttggagtcacctgtttgagtaaatcccaatatttcaaacttcaaaaataaaagaaaatgtattatatatattttaaacacatatacatcaagtcctttggagtctagaggaataggaattccccctccttccttatggcatgggtagcatcaggccccacagggggaaaggatgctaatcacacagattcctgtccaatttccaacaactctgaggtgggtaatacaatttccattttacagaagggtaaactgaggcttgggacattaaataacttgcttaggggcatatagctagtaaggagcagagctgacaaattcaaatcagtgtgtgtttgattccaaaactggtgccctgtacccactatggcgtgccaccagccttggcagaaggataaagttcagtccatcacactggaccacaacacagggtggagggcagagggtgccggaccacaggttgagactcctcagggaaatggatctcagcagtggctttcaccctgattgtccagaagaaccaagccctccattgcctccatcctgccctcgccctgctagcagaagtatgctcacacgaaacccaccaatgggtcctagtgggcagcttcgtaaaaccattcttaattccaagcagtggagattgcatctcatccagtcccagcacaagttcttctcagaacggctcacagagagcagacctcccactgaaattgctaacagcaggaagataagcaaatgcttgcgttgcttaaaacaaggaatgtcaaggagaggacaaactttttttttaaggataaaaatttaaaggaaaaagagaccagaaacaatgtgggtctactttctttttttttgttttttttttgagactgagtctcgctctgtcgcccaggctggagtgcagtggcacgatctcggttcactgcaagctccgcctcccaggttcatgacactctcctgcctcagcctcccaagtagctgggactacaggcgcccgccaacacgcccggctaatttttgtatttttagtagagacggggtttcaccgtgttagccaggatggtctcgatctcctgacctcgtgatccgcccgcctcggcctcccaaagtgctgggattacaggtgtgagccactgcgccccgccataatgtgggtctactttcttaagagcaacgtgaagtctttccatactgctgaggtctacggtctgggataaattcccggttgggacatccactggctgtgtggctttgggcagttactgaactgttctaaggaccagtttccccatctgtggatgggattagcaactgcacttccccattgggttgctgggaggacccatgaagacaaggcatcctgtttcgttcacgacacaactggtccccagaagggtacagtgctgggagccggtacacaaagacaaagacacacaagcgccccagtcccctcaaccgcgggtttcatgtaaaggggaggggcaagaagtgataagaacccaaatgatcatcgt

SEQ ID NO: 1043 - DNA, 4001 bp, Homo sapiens
aggaggggagaaagcgagagagagagagagagaagagagaagagagacaggatggacccaagaagccctggactgatcatttcctagacttctctgtggaacagccaccattggtcttattaagagagtctgtgctgcccattcttgagcctacactgttgaggattctttcaatttctcctgggatgttctgcttttcttcattctcagtctcccggtggtagaagtaattgaagttggagacaatgacaggcacagggagggcaatggtgaggacccctgcaatggcacacagagtgcccacaatcttcccccctggggtggtcgggcacatgtccccatagcctacagttgtcatggtgaccactgcccaccagaagccatcaggaatgctagagaaatgggactctggctcatccacctcagcaaagtagactgcactggagaagaggatgactccaatgaagagaaagaagatgagcaaccccaactcccgcatggacgccttcagtgtttgcccgaggatctgcagccccttggagtggcgcgagagcttgaagatgcggaagaccctcaccaggcggatgatcctcaggatggccagggacatgttctgttgggcactcggctctgtctcctggactagctctgtgatgagagttgcaaagtaggggataatggagatgatgtcaatgatgttcatgatgttcctgaagaagtcagtcttgctggggcagaccacgaaccggagcaccagctcgaaggtgaaccacacgatgcaggtagactccaccatgaagaaagggtcggtgaacatggtctgggagaggactgtcttgctcatgttgagattggggtctctgaccacctttagctccctatcctcccggaactctggcagtgtctccaggcagaagatggtgatggagatgaccacaaccaacaccgagaccacggccacagcacgggcagcgctggaactttcagggtactcaaagaggagccagaactgacggtggatgtcattggtgggtagcagtgtttcagggtctttgatgaagccttcatcctcccggaactggtccatggcctcactacccagctcatagaaggagatttcatcagcaaagatatcaatgggaacattggctgggcgccgaattttcccaccagattggtaataatataggattccatcaaaactgggccggttccgatcaaagaaatactcatttctcatggagtcaaagaactgcatccttttttcccggtctcccaggagagtctctgggaactgactaagggttctgagctgggtctcaaatctcagcccagcaatgttgatgatcacccgctggtttccttcatttaggaccactggctcaggccctggggggtcagcatagtctcccggaagcttggagaaggccgtctcatggttggtgctttcgctgatgaggatcttcccgttggagaaggagctgcccccaggccggccttttgggctggttgagtcgaagtctgtggcatagcctggctcttcttggatttcatctgaattatcaaaattgaccagcgcaacctccatttctttccagccacacacatccattctaggggagccagggaagaagcatgaagatcctcagccttcactgcctgctgtgagctatggagaagaagaagttcattatacaagatccagggcagaatacaactggcccttgtttattgaggtaaggtacaccaatgggctaatcaatgacttatttgtagcttgggaaggaacgtcatggttattttggcagcatgcttcccttaaaatcattttgtacccctgagtttgcataaactaataactaggagaaattgcaaaaaaaggatcctggcaaagaaggggagattctccccagcaaaggatggtctccatatgtgatggcagaggggccatactaaaagaggaagttaacattccttaataataaaaagcatgatcttgtatttgcatgaagccttctgtctcaccaaacacgtctccatgcccaatctcattcgtaatgcctctctttcacaccaacagccagtccctcacacatccttttggtcatgtcttcaaaatatatctagaattcaaccattttgcatcacttccacccctgcttctggaccaagtggtgaagggtggaaccagatctatgaacccaatggggattctttagggaaggaaaaacaagacgctgggttggccaatcgacaatgtcctctaaatgacccctcacctggaaataactcctagagttgttttgaaggtacctcaaatgagataacacgtatggaatgcttggtggaaagaaagatcactatattatagctattgttttttgtcaactttcccacataacaagcactttagaaactaccagcaattggaattttttttggcctgagtccaaggtgtccataggaagtaatttcattttgagaaatcattttaggtgggaaggaagtaaataattgtgtgtgtctgtgtgtgtgtgtgtatatgtgtgtgtgtgtgtgtgtgtgtgcgcgcgcacgctggaggtggggttaggaaatcatgcccagtgggcttggacatctatacacatagactaatatttctttcctcaggttcattctagcttcagtttcaatttaagaacactgaacccaggcaggctgggggtgggagtgggagagaagtaagggacttaacctcaggcaaaatctgtagtggtcacagccttggagaggtttcctttacaggcgacaaggctatcctgcagtgtagtgttgtagtcttttcaaagtgattccacattcacttatctcactagatgacaataatcacgtgaggttagatgttatctctgttttgcagatgcggaaaccaagtcacagggacaaagtgacttcctaaggtcacataactagtgctacagagtcctgacctaaacctggccatggccttctggcccagggcctttcccactagaccatggagtccctatataggagctgagccttgtggggagctgtaggctagggccacagaattgtcaggggtccagagctctttccatcccatgaccccttttctcagttcaggtgccatgtgttgaatgatgagctcaagtctggttggtcagcactggtagagtacccattctacctctcaggagtatgtggccattgcaaacggcctaatttcacggagctgctgcttcctcagttgtggaatgaggaaggatgtacccactgccaagcatgccaggtgccagcctgctctgcaaggctcggtgagcagtaggatggctgggaggcaggatggaatctgagaatagaatcagtccacccgagttcaaatcctggctctgtacatggtaaagccctggagaaatgtagcttcacagtaattcgcatgatgatttgggggccttgtcctgaactgcttggcagctggatggctgtgggtgggggactccagctctgtgttgatctcatgtcttcggagcaccattttctcctttggggtcttggaccgcagatggtgctccctgatgattatcttccaggtgtgaatcagtcccgctttctgagaggaatgagtaccatcagtgagctttgggcaaggtttgggaaccacttccatggttctagccaaggctagagtgacccttatcaggaacttctctggaggccagcagcagaaagcatttggggattagggagagcttctttggccaaataattaacttccttttttgggagccaggccatttcccttctccctgcctcctaggttcctctttgtcacttccacccccaggtcaagtgacaggtaggagggtgtttgatgagggtctgatggtgaggaggtggcagacagtgccaaggtcaaacagcatattccgtggtctacagaagtgtgctgtgcaggcggctccacctgccccattagtagcaaatgttaatcatta

SEQ ID NO: 1044 - DNA, 4001 bp, Homo sapiens
attttcaggcagaggacgctcttcctccttgatgtagccttcatcttcccgaaacatctccatcgcttcttctcccagctcataaaaccgaatttcttcagagaatatatctaagggcacattcacaggtcgcctcaatcggccccctgactggtagtagtacaaaatggcatcaaagctagggcggttccgatcgaaaaagtactcatttcggagggggtcaaagtacctcattcgtttctttgggtcccctaagagggtctctggaaactgggctaaggtctttagctgggtctcaaaccgcagccctgagatgttgatcaccaccctctcacagcactcgtggtctgcctctgggtcataggtgtcctgtgggtgcccagggagggcagcagcctcgtctgctgggtctccggtggccactgtcataattgggactgagagaagcacctcacgctatgcctttcagctgcctggtggcagggagctcagggtgctgctactggccccaggaagcacaggagcattggcctggtctcctgcaggagagccccgagagctctctgagagctggagagacagcctcgcttggctgaaagacagaggcagttattgacatgaggctactcagcattggcagcctgacctgggttgccactttttgtctcccatctctcagccaagagttcagacacatgatcaccaccaccacaacgacaaagcaaaatttactttcaccttgtaacttgtctggggatcagggggagcaggtagcaatctctccaggaacctctggaatgccctgcattgggggaaggtggctggtacaggcccgcttgtagcacacaggcttcatggagcataaccccatgctaataggttaaaagtggaccctctcccaggtgctgcactaatgtctcagatactcatacccagggaggtattcatggttggggagcttgggcctgggtctttctcattggcctccaccccagtgattctacacaaggctgttattaaatgatagattgatttacctgaccagagacgtgaagctctcttccttgcagagctgatcagatgctgcaggaatctgagatgcaccaacaggcagcccaactcctcatcacgtcttctcactcgagctagaaataatggtgagtcattctgggcagaagggcagactctgggtcctggaggtgagctctaggattgggctgggctggaggggcggtgaggtgcctggccaggggcatgcgggacttgaagacagccgagcatgggcctggagccttttgaaggaaggaggcaagatgcaaagctcagcaaaagctggagtcctggctgtcctcaggaggtgtgacgttgcctggaaaaaaacagcagcaaggtggaaccagggcatttgaaccagctggtgccaagatttaggagggtctggcagcttccctcatgggaggtaacaggcccccatgcccatcctctattctgatgccaggcctgaggactatccctcagcctccttgcctcttctgggcaggcttcccatcagcttgaagcattttctcccagggagcaagactcaggcttggctgggcctgccttctccaggggcctccctgggttgatccaggttgctagtccccagctgctctcaggaaggactctggaagaagcactcctacccccacatgtcaggacacagcagctcccaagaggagggcttagctcactgcagcctgtctacaagctctgacctcagccagtcctggaaaagaagcaccccaccccccagcacacacactccttcagagcgcatctagggagaccccacacaacaaagtctgcactgtacgaaaactggatgaacttactctccctccgggatccctgggccgcaggcctccctctgagccgggtggcatttgagctgggcaggcgctcgaccactgatttctcccccaagagaaaatccctcacatctcctcggcagggagcacagaataaacgctccgcctgcctagctgcgaggcggcttggcagcagcgagagggggagcctggaggaagccggcttccggactggccccctgccgacccaatcccgccggccccagggcggggaggggtctgggccctctccccatcgccccgggctccggccgggattccgttcggcgcactcagcgctcgcctccgcgcagaggaccagaccctcccgctggccgcggccgctagcgccaccttaaccccctcctgcccgcgcggtcggctcctgctgcgggcccaagcgcagttcagctcttaagcccccggcgtccagccgagggaccgccgaggctcagtgtccaacccaaaatcccggaacctgatctctgggggtggggagtagcctgcgccaggctgccgccccagatctcagcttccttttaagcgcgggggctcggcggcagcccacggccccagcgaaggggaaagccctctctgcagcaaagccgtttgttattctgtgccgaagaggcgaatgcagcccggccgtcccaagtggttcaggtcctaccaacccgcgctatttaccagacatggttatgctgccagctgcacttcccaccacccaccagctcctctccgtgccctccgccccgcgccacgcaaaccccagagggtcccgagcccattctgtgcactcttcttgagcagggtgcaagttccccttgatctccccggtctgggacctgccgagcagacggcagtggtcggcaagggcttgccgccgcggactcagcccaagcctgctgcgctgcaggctgcgccgccgggtgccccgcagcccctctgggcgccgcagccgggcagggaaggcagcacgcgccgcgcaacgccccgacacggatttacccttccggatgggcaccggggcctccatgttcctaggttacggccagcgccggcagaaccccggcagcgggcggcggcggggtgcgggcggccagccgggagccggctctgcagtcccgcgggcggcgcgtacggagctcccggccgccgcccgcagccgcaccgcgccacgcagcgccgcacctggctcgacggcgaactcgaattaaaggggccggcgggggccggggccggggccggggcgacaagctgccctccgccgccaccgagctcgtcacctcgttgggcccccgggcctcagcccccgccccgcgaggaaaacattctttggcagagcccgacttactaaccagaacctccaggagagctcagctgggtgctgccgggccggggagatgggggagggcagaagttgaggggcactggtgagaggctcctgccaacgtaatgaagtaggcaaggaggagataatcaatagcagctaccccaggcccacagcgggatccagccccgggagagacgtgttgctattattgtggtgcctccagacaggatctgcagacccctttcttgccctttctcccgccagcgcgaccccttctccagatcggcttcccacctccctgttacccagcaaagatttggcttcgcagggaaatgcagcaggtgcggtccgcagtgtggcagaaactcttctgctgtgttcgcccccaccgagaggagccgcaggaacaggcagcactgcagggctggccctctccactccccgactccctcccccagggcccgggcagggaaggctgggggacacgccgctgcccttgggaatggtcagctactcacaaaacgggccctctggcagaacttgcaaagccaggtggcccacagggctctgaacttaggagtgcagcttacagcaccctaggtgggcagacgaggatgccctttgctttcgggaaatgtgtgtgggaggcacagcctactttctgcctagatagggcatccgagaaggtccagggtgcttttgggaggcagacgacagcctcaagcccctgctagttctgttctccaggtccctgtcagggtcacctagacaggtgtgcc

SEQ ID NO: 1045 - DNA, 4001 bp, Homo sapiens
gaatttgtccagatgctgttaacgtttgtagactaccctgagaagcagctcagtgaggcacctcttcctcagcacagttactctctccttcccctgtgtgtattcagcactttaaattatttgttgctatgtttttctcctcactagttgtgagcaacttgagggcaggaactgtgtatctataagcacactgagcatctggtgtctgaccctcggtggatgacagacacctgtttgtggcataaatgtgtcagtgaattcactcattaatttatatactcattcaacaaatgatgatagtaacagacagaaatgtatggtattggcagaaaacaggagttaattaagacgagagaaaaacgaggagaccgaattaaacacagggaagtaaaagctgaagaataaaagaaagaaaagggtattcatttatcatttgaattcatgtaatgcagtggtgggtaggtttgactggaagaagcgtttttttaaatcaaatggactcaaaagtgagttaacatctctaagtgctctgtactttttttttttttttttttttttgagacggagttttgctcttgttgtccaggctggagtgcaatggtgccatcttggctcaccgcaacctctgtctcctgggttcaagcgattctcctgcctcagcctcccaagtagctgggattacaggcatgcgccaccatgcccgactaatttttgtaatttttttttagtagagacagggtttctccatgttggtcaggctggtctcaaactcctgacctcaggtgatccgcccacctcggcctcccaaagtgctgggattacaggtgtgagccaccacacccggccagtgctctgtactttttctcctttttaggatatttagttacaattaaaataaatgagttactatgtattatttgcatagcatcccttttctcttccaagttctagaaagtcagaacctacttgtggcactcacctccgtgtccccagtgcccagcacagcatgacacagaatgggtgctcagtaaatatttaccaagctgttcaatggattcatggtttcagttctttctcctattacccaaaatcatcatgtcatcttcatctcaaagttgttatgaagaataacttagataaaatacataagcactgggcgcatggtaggcattcagtaattgttaagtcattattataattgagaaaaacaacagacactaagcacctactttgaaacagaccttatgctaagtgctgtgcaaaaagggacaatcaaaagtgccaagaaattgcatctttcaaaagctgtatggatttgaggaccccattgtcactgcctccccctgctcactccccaaagagcctcagcaaactccagtattcactcacaatcatctgtccccctggccacaccccaggcagccagccccggaaccactaagcctggtcttcctttccaccaccaccagatggcagcacaaagcccacggatggacaacgccccgtgcaggagggctgctgtctcaagcacaggtctggccttggtcggctgtttgggagttacacttaatgctttgggattggtcccttcctttccacttccaagcctcagaccccatcccctcaccctagagtcacttcacacctgcaaggtcctcattcacaatccttcgcagagtacctggagtgccttcctttagcctccattccattactgatccccgggttgcttttcatgaaggtgtcaaatcccttgtctggcccttgaggtgtctccccatcgcagctcgcctcactctttgctgcaccccagcaatggcctaccagtcacctcctgttctctgtctttgctcacatcattccctgcctgttatgtccacacatgcatgctcacccttgctgcccctcctcttctctcaccaacttgaaagcccagcggaggctctcctgcagaagtcttggcgctggaaaccagatgatggctcactcttctatgtgccccatcaccacttcctttcttggtcagcgctcaaagggtttcaggttctaggtgacctggttgcatgatgcttcatcaacaatcttcaggtgtttcctgtcaccccagccagggagtgcaagaacgggtttttctcttaaaacagaaactgagcactgcagactagcaggggtgggttagccatgcagagttagaaagagcaatcagcacttggaaaacatggcaggagacaacagggaaggcgaagggagttgcgtacaagtaattcattatgactggagctcagtgtgcaagcaataaaagagaagtgtatggagagggtagcagggaccagatcttacaaggtctagaaggctctgccaacgttatttggactttactttggaggtaggggaaacttaaaggattttaagccagagaggtgacatgactggatttttctattaaggaagatcactctggctgctgtgggggatggactgctgagggggcaatgactgcaggggtagggagaccacctgccgggaagctgttgcagtggtccagacagagaagatgtgggtatgaactgaaaagagatactgcagggatggagtcagtaggctaaacaagccctgtagacctgttgagtctgaggggtccatgggatacctgagtggggagtgcagtgggatttggatgttcctgcctggagcttgggagataggcctgggctggatctagaagtctgtacggatgaggcctctgagatgtatgagattatgcagggggtaggggtgcatgtagaagagaagagagaaaagtgggaacatttaaaagcctaaagacaaggaggagccagaaaaggaaatggagaaggtacagccatagatagaggaggaatcaggggagagtgatgtcttggaagccacagatgaaggctggctcaaaggcagctgagaggtcaggcaagaagagactgaatgtgtcatttggaggaagcaacacggaggtcacagtctcagtggagccatgttgggcagaggcggagctccatgggttgagtgagtgggcaatgaggaggcaggaacgggcttataggtactctttgaagacatttgattgtaaataaaatgatgaaattaggtggtaggtgaagggaatgtaggattaaacaaggttttatttgtttaaggtttttcatttgttttaacatggaagaaacttatggagagaaatagatacaaaatgagtagttgaagatgcaggaaaataaggagagagaattcctggagggcagaagtaagaagggattcagagcacaggtggaggggccatgctcagataagacctgggacacttctttatttttattttattttttgagatggagttttgctctcgttgcccaggctggagcgcaatggtgcaatcttggctcactgcaacctccaccttccaggctcaagcgattctcctatctcagcctcccaagcagctgggattacaggagcccaccatcatgccagactaatttttgtatttttagtagagatggggtttcaccatgttggccgggctggtcttggactcctgacctcaggtgagccacctgcctcggcctcccaaagtgctgggattacaggtgtcagccacctcgcctggcccagacctgggacacttctttgatggtaggaggtgagaatggattgggattggctttggctgagagtacagaggctggctgaggttagggtcctcaggcacctggaactgaaaggtcttcactaagacagaccgaactctgcccagatcctggtgaaaaggaaggacgtggcagtacttcctctccttgtggctatgggattttccctattgggacccctagactgggtaaaggagtgaaaaggccaccatgttattgatgcagggtgggactgtgctggtgagggagcaggaagggggttgctggagttggaaatcttgcaagaaagtacttaaagcaatgcctaagggttctggg

SEQ ID NO: 1046 - DNA, 4001 bp, Homo sapiens
ggcacgttccacacaatactgagcacagcatgtcacttgtatcacatattaaacatcggtgaatatctttttgatgttgacacaagagttgggattattgttcgtggtgcaggtggcagtggaattgcccgttttgaaaggggtctgggggaaagcgctatggttcatacccccctcttcgatcaccatatactccgacttactcagagtcgagttactccttgcttttcggagctcctcggctgaagaggagaggtgctggcaacttcccacgtgcatgtactgggattgctcttccccttctgtctcccggtggtagaagtaattgaagttggaaacaatcacgggaactggcaatgcgatggtcaagacaccggcgatggcacagagagatcccacaatcttgccccctatggtcactgggtgcatatcgccgtaacccactgttgtcatggttaccactgcccaccagaaggcatccgggatgctgctgaaacctgaagtggggtcgtctgcctcggcaaagtagaccgcgctggagaaaaggatgaccccaataaagaggaagaagatgagcaatcccagctcccgcatggacgccttcagcgtttgcccgaggatctgcagccccttggagtggcgcgacagcttgaagatgcggaagacccttaccaggcggatgaccctcaggatggccagagacatggcctgctgtccattgccctgtcgttcggccagctcggtacccagagtgataaaataaggaatgatggccacaatgtcgatcaggttcatgatgtttcgcgagaaggtggctttgctaggacaagcgaagaaccgcaccagcagttcgaaggagaaccagatgatgcacagcgtctccaccacgaagaagggatcggagaagctggaggctcctgcgcgggaccccgacgtgctgttgccggctgcttcgaatgagtcctgcgacgtcgaggcggggtagtccttctcgtcgcggaactccggcagcgtctccaggcagaagatgacaatggagatgaggatgaccagcacggacacgatggcgatgccccgggccggcccggagctctcggggtactcgaagagcagccacacctggcgctggaagtcgcggcggggcaagggccgctcctcctcccgcaggaagccctcgtcctcgcggaacttctccatggcctcctcgcccagctggtagaagcggatctcctcggagaaaatgtcgatgggcacgttgaccggccggcggatgcggcccccggactgatagtagtagaggatggcgtcgaagctgggccggttgcggtcgaagaagtactcgttgcggagcgggtcgaagtacctcatgcgccgcttggggtcgcccagcagcgtctcggggaactggcaaagggtcttcagctgcgtctcgaagcgcagcccggagatgttgatgaccacgcgctccccgcagcagtcctgctcgcccgcggccggcagtgagggcggcagcggctcgtagcggtcgcagccgccgccgccacagccgccttgaggcggggcccctccaccatcggccacctccggctccagcaggtggtccccgggcaccacggtcatgtcgggcggcagctcgcggcctgcggcgggctccgcgtagccgtggttcaccagcgtgtgggcaccgccgctgctcgctgggcgctgaggagggtgggcgcggtggcgggctgagggcggcggcggcgagcgcagaaggctgaggcgctcgtccatgcggcggggaagaggcggcagcggtgaggccaggtcgctcctcctcgcgctccccgccctttcgccgcctccgcccccgagccgagcccaccgcctgttgcagccaaagccgcgatgctctgtctgggtctggcgcggtcagccgggctcccgcacggggacgcctcctccctccttctcgcgctctccgccccctcccctgcggggcgcgcgcccgcctccgcgtccccttaggattcccgcccaccgcgcgggcgcgcgtcccgctctcgggggcagccgccgggcctgcatttcttgcagccctcaaggcccctcggtgtcagcgaaagagccctcatgttgtacctcggcgccccgcgggaatgcccacccagcagagccggcccacggggagtcaggctgccggcccgggcccctaggctccgcccgcttctggtcagcgcccctcgcccccggcccgcctggccgcgtcccagtcgccagggttttcggcccgtgggccgggagagctcccgccgcggccccgcgggcgccggccccctggcctccacacccctaggtacagcccggggagggcaggcgggcccagtgtccagggagggagtgcaggccaggcgggcgccctgggccagaggcaagcctggcgccggcatcccaggttcccttgagggtcgaggaccgccaaaccctggggaggagcgggggtttaaacaatttagcttctgctaggatgcgaagccaaagggagtaatgggtgctgatgggcttcgcaaacggagtccgaaggaaatggattgttaaaggcgttcgggccctgctgctttagtgaatagttcacacccgttttcgcagcggagatgtcggccactgggaagaatcaaggaccaagtttctgattgggattagcagtgacagcctggtctttatccactacacaggtttcctgttggcggggaaataagaggaaaaatgggaaaggaaattcacgaagtcgaagttgtgtggttagaaagtccagctttatgactcaagcctgtcgtggaagggatgagagcaggacctgtacctagactttttacttaatattttggcactgcccttgtggtagggaatttgcagcgctctagttgttaaactggaaggacattcattctgcaacttgtacctcttgcttgatctgggcccagagataacttacatgtatcttctttaaacttatttttccaaattattgtggttactttgaacacaatttgtttccagaaattttagcaatctaatataactcaaccctaggctttaaaaagtctgttttttattgtatcattcaaatcatttacagaagaggaactattgtctagacagctcctcacccacccaaagttagctgacaattcaattttaagtaagtgatttgtggtcaatacttcccaccaccactcccaaccatggggttctctagggcacagagtaggtcctagccaacttatatttctagcaactaccaaagtgccttgtaaatggtggagacttggtacatacttgtcagattgaattccccaaggagtgtctctttgcgttgctatctgctctggagtttcaacatttcttctttttgagcccaagatgctgctgtgattcctaggatgaggagtgaggaaaaactgagctcaccatagaaaacactgctcatttattccataggatttccacctccggctctcctgggcacaacaggcacccatgtccttttattgtcccttcatcttccgtttcacctcctggtcagtgccagacaatgcaggcagtcacttatgttgtggaatggcaaaactgggcaaccacgtaaaactctttctcttacaaaactccagaacactggaatgtgacagccacctcattattttgcgtatatattttgagctggtgattagagtagcagtataatcaatcattcatatatttaaatcttagaatgagacagactgcttgctgcaatgatagctcatggaaaggcaaagaccctatttttaaagaccagatgtttcatgtacttctatgtctgacttagaaaatgatttattccttcttttgcaggaattagtactgaaattaatattaatcaatggcaaggaagaccagagcagaggatagtcctgtgacaaatggtcacaagcttctcccagctgtgaaatgtctttccttcataagtgactatttcc

SEQ ID NO: 1047 - DNA, 4001 bp, Homo sapiens
actctccacacgtaggtccccaaaccctgcaacctgcaacgcggggcctgaatgcggcttccttagcagagcaggagcttactcttggcactgggggaaaggggaggggtgaggctggggtttttgtcggggaggagaagttgcagagaaagaaaaaatcctgaaacgacagacagtgggacagctgtggcctgaacttggtgttcttgctcctcggatgtggatgtattaatttccataaatgctaatagcccacttccccaagagctattacttatgtcatctccccttggacacagttcaacacagggcagacaaatgaaagggaggaaaagacaacccccagtggcggtccccagctcctcagccccctcccaaccaggcagctcaggtctggttcctaaggtggccctgctaaccgcagggtcaagacccctgccttcagctccgtagccaggtccctatcacgacaggaagcaagaaagttaccaaccccaaaaatgctgaatcacaaagtgaggctgagcaggaaagtgggggtggggagggaaggagacggtggccagggaggaaaggtgctaaggggctttccacctggagcaccccgggatgctgcgggcaaagcacagtccctgtaagagcccccaggacaaatgccaggaggagggacaccaggatgcggctggttggcggggtgggaaggtgggcaggtaccccggctgctgctaatgccgcaggacgcggtgcagcagtggggtctttgcatcctgggagcagcagcaggtagggaggtgcggaagtgctttgtgccaaggcctggcaggagggagaagcttaagataggagtaggggctcagggtcagaagtggcggtgtgtgtgctgtaaacagcccgaggaactggtgcaggaagcagggtcacagtcttggggagcagggtaaggtggtgagagcgtgcccgcggggagaggtcggaggggctgggggcagaatgggagggtggggaaagggaccggagcgacacagggacaggcagcgagaacgacggatgagccttgagaagcgatcaggaggagagatggggaggaccgggaacagcagcgccccggtggggctgcgcagaggccgggagaggggatgagaggaggatggaggaaaggggagggcgaggctgctaggaccggagcgggcagagatggggaagaggtgcaccgggaagagggacggcggcaggggcaggggtcagggatgcgagctgaagggtcgggcgggcgggaggacagggaaggaaagacagaaagggatgggggaagggagacgatggagaaggaggtgaggaggctggagaggaggtgagacagcggcggaggcagggacgcagggccggggaagaagagatggagacgggaccgcggcgcctgccgcagcgcgggcctcgcggatacccgccgccgccgtcccggagcagcttggtggaaagcgcgccccgccggggtctccccggtactcacctgggggctccagctccggatcctgtgccccgcgccggatcttccttcccgccctgcccctgcgactttagcgcccccgaatcccgctagctcctgcaggttccgccagcagcatcttcacctcgtgggacgcccggggccacgcctcttccagcttctgattggctattgttcacgccagtcacattaccattggttgaggggtcgtcggacatgcaaatcaggatgggcccgccgccgcaccgattggctggcgctcgcaaagcgcagccctcgacttgggctctgattggctccgcggccctgacggcgacagtgacgcgaggcgggttcttggactgagtgtgcggcgcggtgcgccgccttccgaggctcctcccgcgggtggcagcggacggggcgcgcccctcggccagtcctcggtcctcaggcttgtggctccgttgagcaccggccgccgggcctctgggtccgtcgagtggagactctctgaaaagcgtgggctccgtggcctccggcgcggccgcggcgggtcggtctcctaggtaacgcggcccgcggcgggcggaaccatgtgggccggcgccgcgggggaggttggacgcggcctcgaggcacagggggcctcagtgttggccagagcctcggggttcgggggtagggtggtccacgccgtccctgcgtgggggcccggtgcctggggtgcggcggtggcgcgcggcgggggctgtccccgcgttagtcgcaggcgtcccccctcgtcgggacacttggggtcggggccgctgggtgccgtttggctacgtgggttcctttctgcccttgccctttgccccctgccccctgccccctgccccctgccccctggcctctctgcagcccctcggctgaagggagcgcggtaccgatgttctgggccttggctccccgcgccctagtccgcgcgcatccttcccaggccggagtccgcggaccccgcctggccgcgcccctccgcccctcctccccgccccccggctccagctccggctccggctgtcagttccccgcggtggctctgcggccttcgggcgtccctgcgaggctttgtacccggcgccgtcccggccttctgcgcccctttcctgccttggaacctcccggccgacccggcccggaaggcgccacccgctcccgcgtgcccttccccacgcgtgcaggctgctcccgcccgcccccgggcttgcaggcacctcgctgcccgagattcctcgtgtctaacttcttaggagaccgctgctttctgcctccgtgtgtcgcgatgtgtggctttggtggacgtctgtgaaggaaatccagcctctcgcgtgtgtagttggcaaaaggaggagtatttctgttgatggtgggcagcgcctcccggtcctaacccagggctccgttcgttgcacctcctctgtgcagtttccgtaggtcacacttgtgtctttttgtatgctaatttgtgccccgtttctttacattctatgggggtagcgagcttgtctgctgtgttcaagaccgtttctcccgggcgcagggtaggtgctgaaagaatgctcatgaatgagggaattccaggcagtgcttaatcagacctctgcttccccaaaagctccccaaggcatctgggtctcaggcattacacattttccattccgggaaggaggcttcccggaccctgacagcgcctcccaccccctgcatcttccttcagccctgctcacctctgcaccctcccgggggcctgttgctgctcacagtcactttcttgtctttctcccccactggctttctagatgcttgaagacagcacatttgacagccttcttatgcactggaacacaagtgctcgggaaatagttgctgaatagatcagcagaagcagagatctcaaggagatttcacagctctcattttggaggttggaaacaggtggggaggctgcgaatctgtcctgaagttaaagaggagacagcattagccctgggttcctttggtgctcttactttttccctctgggcctctcttctcccttggcctctcctggcctccttgattgaggtagtgggaggtagttataatagcttacagtattatatctataatactattataatagctagttataatagctagctgtgtgaccttggattggctgtttatcctttctgagtctcagtgttctcatctgtaagatggcgataatgatgattctcatttggcagagttgttggaatagtaaccatagaatgtgagttcctgtcttgcatcaggggctcattaaaagtgggtgtattttcttcttcttctttttttttttcccctggagagcccactgtacccttttcttgggttcaagacctggagccttctcgattttctcttttattgttgatttggccccaaaggcccctctgcacttcctccagggcatttgtatttcatccttaaaagacttttgctgaagacc

SEQ ID NO: 1048 - DNA, 4001 bp, Homo sapiens
cttgctacgagcttgtccccatggtgccagggcagggcttgggccagggaacttgcgggcacagaaatggcagcctttggcatggggtggtggggtgaggagcagggctggtgccatgaggagcccatggccgctggactcccctgaaggttgggtccaggagggcaaggactcttctgcctgctgccactgccccctgaccagtgcccacgggagtgtcccgtgcacagaggaggggctcagatatttgtagaacagtaaccaaggcccaggctccaaaaggccaaccagggctatacctgggcatttcctggcagtgccaggcagctgttggtgggggcggggctggcttcctacctcagacccagcagctctttgcaggtcaccctctcttgtgtgggggggactcccatgccaggactctgtacagcgggggctccctgtggtcctgaaggctcatgactctgggagggctgccccaggggaagaaggataggtacaggcagaaggcaaagaggctctgcccgttaccagcggtgcctggggacagaggacacctctggactccctcacactggggctctattctgggcttttgccgagactctagcagcgtcaggtccttggacgaagggccccccggtaagacactgcagggaggagagagtggccccactgccgggctcctgcctcagggtccccacttctcctgtgctcaagagcacagtgacccctgacttccaattcaaaatatcccaaatcccggccgctttccagagtgagggtctctgagccctgacactccctcaccaccctggtaccaagaaaaacgagcccctcctcaatagccattgctaattacgtggaacccacaagttctttcctgggctgggcctgcctggtgcaaatctattcctgtagatcaggggcccaggggaattcacgtgaattaacaccgtgacatggaaaaatgcaaggaagatgttaacctcattaagtcagtaggaatcactacctcaccccagactcctctacctggaatttctgaattgttctgtttactgaaagccaacaaagcatacaacctgagattgagaaggaaccctgagcatctcttctgaatggtgacacctgtccagagagcagagagcccagccagagttctccaaagcggaaatggaaggggagctgctaccattccggggtgcggctctacaagacacggcattgcttcagtgcaaacacagaatgattttcgctcaaggacaatcagcaaactgaggcccaaacaagcagcccctggctccctcagcacgtgcttcctgcacagacatttcagacaagaccaaacctccctgacagcgctctgggcaaaactggaaaatgctgaatcttaatcaatggtgaacacagcgaggtacgagctagacgcccgtgtctccggcagatgggaaaacagtcagccttgggcaggtctgggctgtgagcagactcaagcgagaggtgctgcccggctgaaacctgccgcccaccaccccatccatcacggtcattccaagtttacctcaggctggctcttttttaaggtcttctgctttgcaaaaacacggagggtctaattccggatcagacaaaaccaccccaaaatatggtctcctctgttatttttcattcccgcggatgcgtgcccccaagcggcatctccactaggaaggtagcggctgaagggaggactcacctgccttcgtgggggcgtctgctcgttaaaaaggccacagtctggtttattagggatcaccagacactctaaggatctggcacagcggctttttcattagggagtgtcactgcaggacgtcagaagcaattggtgaatgagatgagtcccaccagagtcgagttttgaggcagcgagtccattagttctattagggcgttttcatctcagtgaaagaggctgaattattcacgagtgcctcttcccctaaaagctcgggaagtgcagttccgtgctgcaacctggcaaggctgactcccggtgcgtggggttggggtgcagcccaaggtgagggggaggtcctgcccgtccctcaggcctacccttgctgcctccaccatccccgcgtgccagaaacacaaacctttggacccacaggtcgaaaggggcaggccttgctctttggtatctgagtgcgggacacagagcctgtggcttccgcataccactcaactctgaactgtgtctgcagcaggggagctgggggccccgtcgtatggggccaccacccacagccaagggggtctggagaggcctctgctcagcacacgcgcatgctcctcctgtcctctggggatacacccgagatgggtatatctgatactaccggtagctataaatggcaggaaggccccagaacctgctatttggactccacactgccactcactccaggcagggacacaggagcccttctccacggcacatgtcctgacctggggtttgggaaatgctttgagactaggccaaacaaggctgagctctgggatgaggctaagtgctgagccccaaccccagggtcatgacccccagggtcactgcgtgtcacaggatgccagcaaagtcccagcgtgacatcatcttccggctgagaaagcgcgccagtgaatgtgggattttgaatggaggcagaaccgtccccccatgatgaatgagcaaacagtggtagctgccatgggggaaggtgggggacaggaaatcagtgccccagtcgcagtgtggaaggtaaatgaagtgggaggctgggagagcacgtagagtctggaggtgcctggctgcgggtgactagctgcgaaggccttggcaattgaaatggtttgtccccaaaggcccaagcccactctgtcagatccccacatgtcgccctggtcggggggcctgcgcctcactactgggtggtagctgcagcctaacatgctccgaatgaggccctctccttccctgggtccactgctcctctctgtccctttctgtctcagcacctgcccatcagtggccaagccctgtggacgtggcttctgacgtccttttttcaggccctgcaccccttcattctctctctgtgcagttcctggagctcagccgtcctgcacctttcctgggcactgtctggtctccttgcattagcctctctcttccctgtcttactccctgctaccaggcttccttcctagagcagatctctgacccctgccctgctcaaacaccatagatggctccccagtgccctctgagtgcatctgtgccccatcgctaggcattcgaggccccccaccaacatccacctctacagccagcctctctttattctccatcatgtccctgatggcccaggctgggtaactgtcacttcctgttctctgtgcacacctctgagctgtggctcaggctgttgtatctactggaatatgcttcccagcctctgcgttgaatcctgcccagccttcaaggaccagatccaagcccctgctgccttctccgtgaagtcttcttggctctcagctggctgtggcccctccttccttggaccccaaatgctctttgggcttctcctgtgacgtgctctgccttctggagatcatcagggctatttgagacctggggtacatggaagtattgctcccaatccttcacccctctctgtacccatgccctttgccatgtgactttatagctcctcccactggtgggggcaatatatttccagccccttgactgtgggctggttcctgagacttactttggccaaaagcacgtgagcagaggtgacagcgctctgaccccaaccataggccgtaagagaccctgcatgtttctgcttttcctctggtacttttgccatgggaaggacatgcctggggtaggccccagttaagcatgggaagatggaggacatggggatccaacttgcagcttggagacaaacccagccaagccagcttag

SEQ ID NO: 1049 - DNA, 4001 bp, Homo sapiens
gtggaaggctgagtttggggatgtgagtgggagaggggagagagggcaggacagaatgggttttgtggccaggatttagagggcgtccctccctgtgggggcccgcttgcaatctttccttagagctcatgttgcagccctgggagcagacctgcaggtgggagccctgcggcacggagggagcccagagcctcttgctacgagcttgtccccatggtgccagggcagggcttgggccagggaacttgcgggcacagaaatggcagcctttggcatggggtggtggggtgaggagcagggctggtgccatgaggagcccatggccgctggactcccctgaaggttgggtccaggagggcaaggactcttctgcctgctgccactgccccctgaccagtgcccacgggagtgtcccgtgcacagaggaggggctcagatatttgtagaacagtaaccaaggcccaggctccaaaaggccaaccagggctatacctgggcatttcctggcagtgccaggcagctgttggtgggggcggggctggcttcctacctcagacccagcagctctttgcaggtcaccctctcttgtgtgggggggactcccatgccaggactctgtacagcgggggctccctgtggtcctgaaggctcatgactctgggagggctgccccaggggaagaaggataggtacaggcagaaggcaaagaggctctgcccgttaccagcggtgcctggggacagaggacacctctggactccctcacactggggctctattctgggcttttgccgagactctagcagcgtcaggtccttggacgaagggccccccggtaagacactgcagggaggagagagtggccccactgccgggctcctgcctcagggtccccacttctcctgtgctcaagagcacagtgacccctgacttccaattcaaaatatcccaaatcccggccgctttccagagtgagggtctctgagccctgacactccctcaccaccctggtaccaagaaaaacgagcccctcctcaatagccattgctaattacgtggaacccacaagttctttcctgggctgggcctgcctggtgcaaatctattcctgtagatcaggggcccaggggaattcacgtgaattaacaccgtgacatggaaaaatgcaaggaagatgttaacctcattaagtcagtaggaatcactacctcaccccagactcctctacctggaatttctgaattgttctgtttactgaaagccaacaaagcatacaacctgagattgagaaggaaccctgagcatctcttctgaatggtgacacctgtccagagagcagagagcccagccagagttctccaaagcggaaatggaaggggagctgctaccattccggggtgcggctctacaagacacggcattgcttcagtgcaaacacagaatgattttcgctcaaggacaatcagcaaactgaggcccaaacaagcagcccctggctccctcagcacgtgcttcctgcacagacatttcagacaagaccaaacctccctgacagcgctctgggcaaaactggaaaatgctgaatcttaatcaatggtgaacacagcgaggtacgagctagacgcccgtgtctccggcagatgggaaaacagtcagccttgggcaggtctgggctgtgagcagactcaagcgagaggtgctgcccggctgaaacctgccgcccaccaccccatccatcacggtcattccaagtttacctcaggctggctcttttttaaggtcttctgctttgcaaaaacacggagggtctaattccggatcagacaaaaccaccccaaaatatggtctcctctgttatttttcattcccgcggatgcgtgcccccaagcggcatctccactaggaaggtagcggctgaagggaggactcacctgccttcgtgggggcgtctgctcgttaaaaaggccacagtctggtttattagggatcaccagacactctaaggatctggcacagcggctttttcattagggagtgtcactgcaggacgtcagaagcaattggtgaatgagatgagtcccaccagagtcgagttttgaggcagcgagtccattagttctattagggcgttttcatctcagtgaaagaggctgaattattcacgagtgcctcttcccctaaaagctcgggaagtgcagttccgtgctgcaacctggcaaggctgactcccggtgcgtggggttggggtgcagcccaaggtgagggggaggtcctgcccgtccctcaggcctacccttgctgcctccaccatccccgcgtgccagaaacacaaacctttggacccacaggtcgaaaggggcaggccttgctctttggtatctgagtgcgggacacagagcctgtggcttccgcataccactcaactctgaactgtgtctgcagcaggggagctgggggccccgtcgtatggggccaccacccacagccaagggggtctggagaggcctctgctcagcacacgcgcatgctcctcctgtcctctggggatacacccgagatgggtatatctgatactaccggtagctataaatggcaggaaggccccagaacctgctatttggactccacactgccactcactccaggcagggacacaggagcccttctccacggcacatgtcctgacctggggtttgggaaatgctttgagactaggccaaacaaggctgagctctgggatgaggctaagtgctgagccccaaccccagggtcatgacccccagggtcactgcgtgtcacaggatgccagcaaagtcccagcgtgacatcatcttccggctgagaaagcgcgccagtgaatgtgggattttgaatggaggcagaaccgtccccccatgatgaatgagcaaacagtggtagctgccatgggggaaggtgggggacaggaaatcagtgccccagtcgcagtgtggaaggtaaatgaagtgggaggctgggagagcacgtagagtctggaggtgcctggctgcgggtgactagctgcgaaggccttggcaattgaaatggtttgtccccaaaggcccaagcccactctgtcagatccccacatgtcgccctggtcggggggcctgcgcctcactactgggtggtagctgcagcctaacatgctccgaatgaggccctctccttccctgggtccactgctcctctctgtccctttctgtctcagcacctgcccatcagtggccaagccctgtggacgtggcttctgacgtccttttttcaggccctgcaccccttcattctctctctgtgcagttcctggagctcagccgtcctgcacctttcctgggcactgtctggtctccttgcattagcctctctcttccctgtcttactccctgctaccaggcttccttcctagagcagatctctgacccctgccctgctcaaacaccatagatggctccccagtgccctctgagtgcatctgtgccccatcgctaggcattcgaggccccccaccaacatccacctctacagccagcctctctttattctccatcatgtccctgatggcccaggctgggtaactgtcacttcctgttctctgtgcacacctctgagctgtggctcaggctgttgtatctactggaatatgcttcccagcctctgcgttgaatcctgcccagccttcaaggaccagatccaagcccctgctgccttctccgtgaagtcttcttggctctcagctggctgtggcccctccttccttggaccccaaatgctctttgggcttctcctgtgacgtgctctgccttctggagatcatcagggctatttgagacctggggtacatggaagtattgctcccaatccttcacccctctctgtacccatgccctttgccatgtgactttatagctcctcccactggtgggggcaatatatttccagccccttgactgtgggctggttcctgagacttactttggccaaaa

SEQ ID NO: 1050 - DNA, 4001 bp, Homo sapiens
tcaacataacccagttccccgacagctccatccagactttggctcagatgcagccaaagaaatgcgaggagaagaactgtgcaaaccttactagagattggagatcccagtcaggattccctgtgtttgtcacagagaaacctcagtctctcctccaatctcctgaggcctgagccgaggggaccagtggcacggcgacagatgtcacatggttcagtcaacagcagaagcattgggacctaaccacggtgcccaaggtcatgactgccgaacggagcatttgatggtacatcacatcaacgcctcattaacaattttcaagaagatcacaagctagaaatttcaatctcttcaaagcaacgttcaatgcctgttccctgattacaaatacgacaggtctagacttttgcaagaacagtccacattcacatgtaatcaatgctgcaatgaacaaaaaatagaccacagccaaaaaattcccatgcctgccctagctccatcctgcctctcagtgaccacaggtggaaactacggtgccgtgcagggccgctcacctggcactgggtggtgggtaccccagtgctgcacagacggcacgacccgcagtgagtcagggctgccgcaggctgctcactcagtagctggcagggcctgtcccctgcagaggcagcaggagccctcgacagttcagtccccatagccgcacacccaggcccccggcctcctcccttcagccgtccacacacacacacacacacacacacacacacacacacacacacacacacacacactgtgtcccccaggaggcttacagcctcctccctccaagaccacaccctgcacccatatcctgcccaggggaaatggaggaggcaagtgagaggggacgcaggaagccatcaccagggagccccttgccctcccctctgggacagtgactcagggctgtgcaaggggttgcagggtggggaagtgttctgaggggtctttatcccccaccactgccctgtgctcagccccaagggggaggggagagaggagggactggggacccacgccatccatgttcaaggcaggggccttcgcgccttccactcagagatgggaatccccaggccagggcctcccgagagacagcagacaagatgggcagggctctccccaggagctgccagccctgccccctgcagagggacagaggtggccccacatggctctccatcttccggcgtctccctcaacatcatcccagggatgaaggcagaagccaggggagaatgtgcggccgtcagacatctctgctgggtgccaggcccactctgtccagcagcagcaacaggaagcagtgaagggccgggctgcgttgggcagggtgtctttggggtcagctcaccccaggctgaggccaatccctaggcgggcatgcggggctcaggggttcaggctggcacaattaaccctggacattacgggggacctaagccctgctcagggagctgaggctgcccacccgtcagacagaaaacccatcctagacaacgggatccccggagcaccccaggtacctgctcctgaacgggaacgaccggagacaaggccattttccgagcactcaggggaacgccaggtcacacatctgctgcaaagcacgcgccttgggaccacagcacccaacaggaagttggtgcagcgcgtgccagagctatgcactgccgccgcagggctgagaagcctggcgcgccagggccccgtggggtgtcggggcgtggcctttgctctcaggcatgcctagcgcgtgacccaggtgggagggcccgacatctccgaccttcctggatgagcagcggccagatggggcaggagacaggcagaggacaggaagcaggtggctgtgaggagacagcccgggcctgtccccaagcggcccctccagagtaggaggcagaccttccctgtcggcccaggagcccctttctcagggcagagggttctggtgatgttgaagagctcccctcactgctgccagcagtgtgccgggatcggctgtgtgccgggatcggctgtgtgccgggatcggctgtgtgccgggatcggctgtgtgccgggatcggctgtgtgccgggatcggctgtgtgccgggatcggctgtgtgccgggatcggctgtgtgctggggtgggctgcccaccttttacctgcgctccctcatcttatcttccctgctgccctgggaaggggtactgctgcccccccatgctacaggtgacaacacgaagggtcagagagccctggactcagggctggctgactctaaagtgtgctctgagctgtgcactgctgagaagcccagggcaggctctgccactccatctcccaactttgtgccaggacacagagggggcagccgccttgaggggacaggtggccctggggaggacgggccagaggtaagagcaccctctgcggggtttttctccctccccgcggcctctccctgctctgccattccttcttggggaggcccctcattccttcttggggaggcccctcctccctcctacgccagctgctgagcctggggccaggctctctggtgactcactctgggcacagcccaagctctttggggtaccaggcaaagggaggactcgggtggaacattccatctcccatggtgccagccacctgcaccgtgttgagtccctggtcccaggccacacccgtgtgtgtgattccaggagggaggctggcaccccctctcctggcataggtacacagctctgaagcctacaccaggggtgctgctgtgtgttcccggcaggataaagataaagacagtggttaggggaggtagaaagaggaaaaggaagggaaaataaaatagtctgggtgctcactaggaaagtagaggtgtcgagagacaaacaggagggagaagggagaaggaggaaggcgaacgaatgggaaaatgaaaaagaaagagcgaggcgccatgacggagagctgggggacagcaacccatgttgagccagctctgggccttgctcccaaccctgactatgacatgctttttacagatggggaaattgaggcccaagaatattaaataacatccaaggtcgcttggtgaaattagtggcaaagctggaaccagagcctaggtgtgtccagctcgaaattggggttctttcctcacacataccttgacctcctgccctggagccccccatggaactctggctctggacaggtgacctctgctgcctcccagagccagagaacagccgttatcctcttggcccccagcacggagatgttgccctgactctgtgggtctccaaacacagactgtattcacggctatcacagaccacagctgcagatgctgaatctcacgagcagaggtaaaagctaggggatgcgaaagtaacctcactggctgcttcgcagtttcagacacactgaaccagccctcaaacctcagcttcattcctggctcttaaaaataaattgtattttcagatatttgccaactctttttttaaaaagtttctttggaccaggaaggcaggtgactggtaaatgctgagtggcaaaattagagatacttcatttaaaagacactactggctgggtgcggtggctcacacctgtaacccagcactttggaggccagggtgggaggattgcttgaggccaggagttcgagaccagtctgggcaacatagtgagacccaatctctaacaaaaaatttaaaaattagcctggcagctgggcatggtgtctcacgcctgtaatcccagaactttgggaggccgagatgggtggatcacctgaggtcaggagttcgagaccagcctgaccaacatggtgaaaccccgtctctactaaaaatacaaaaattagctggacatggtggtgggcgcctgtaatcccagctactcggaaggctgaggcaggagaattgcttgaacccaggaggcggaggtcgcagtgag

SEQ ID NO: 1051 - DNA, 4001 bp, Homo sapiens
tcaagtgatccgcccgcctcggcctccctaaatgctgggattacagatgtgagccacctcactcggcctaaaaaagcagtttcttagacccactttcttctccactgtttcttgccttccatttgagaaaattcctcaaaaagttttccttcacttatctgcgattcctcttcttcttccggcttataaaccaactccaatcagcctctgccctcaccactccgtggaaactgcacttgccaaggttgcggtgacctcttcgttgctaggtccagcggtgcccatcgtatcggggtgacagaggtgctgcctgcggcttccccagctcccaggactccacgctcccctctcatccctccagccactccttctcagtctcctgggcttcttcctgctcatcgctgtcctccagtggctgcccttgctcagctcttgaatatattcttttccatccccacaaagcccctcagatttccacccatctcgtggctctgaaccccgtccccatgctgcagaccccaccccctctaccactcccctgaaccccagagctgtttatttcctgcctgtgtggctcagctatgagggtggggaacgtgtgcctcggattcctgggtcagacactgagctcccgactgccctcacccccagcccagttcttcccagggtggccccagatgagtaacgagctccccaccctcccaggtgtcagtcccactcccgggagtcaccccgactcctcccttcctcccacgtcccgcctcccacatccaatccatccctgggccaggggccccgtgcctctccctgtctcctctcctgcccagctgccaccggctctcatgctgctcctcacagcattccctgcgcccacctccacccccgccggcagactctacgcggccagggtgatcctcccagaacataagtcagattatgtcactgcttcactccaaaccttccaatggcttccattccattcagagccaaagtccaatctcaacagtgggtccacaacctttctagccacatcccccgctgagcccctcacacactggcccctgccacactggctccctgggggtctgtgaacccagcagacagactcactcccacctcagggcttcatgcactcctcctcctccggcccgaattcaacttctgaccaccgtggtctgcctgagcatgctcccacgtttgcctctttatgccaaggtcaccttctcatggaggtcttccctggacgcctccctttcatcgcagtccccgtctcccccacactccctggtccctcccctgggctgtttctccccagcgcctgtcacctgctcacacgccttctcctccacctactcgtctcgcttatgctgtctgcccaccaagatgccggctccgggaaagcagggagttttgtctgctggttcccagctgtgcctggcacctagtagacatggaacagatatttgttgagtgaatgaatgagtggatggatacctctgtgacccagcctgctgaaggccagaggagagagagcactggagaggcagccggggctcgcagtctgcgttactgcaggtagcacagcccatggcgctggggacagggctcgcacgtggaacaagggcagctttctccggagggtgcaatgcccactgtgtccagtgggggtgctcagggcagctacaggtgcagggacaagcggcaccactggccactcagggaggcgtccctgggaggccacctgtcccactcccaacccctctggactccgagaagtgttgacccgaggtcaggctgtatctgtgccagcagtcagctctccagcctgcagccacagacgggaactgtacaccgtttgatgaccacattacaaggaactgcaggccatcaacacagcctctgtttcattcctccccagggtcccagcagcccagtccaccacctttgccacctcccaggggaggaggggttggtgagatttccccacagcccctgctttgcatttcaggacgcaagacacacaggcagagccgactggcccagagtccaccttgtcgagctgcagacaccactgtccaatcaggagcgactgcatctgccaaggagccaatccctgtggagccaacatcctaaaggggatgccgtgagttccaggctggcacagtggctcctttagcgcagagggaggcaggcacagctaagctgggtggccctgggatccctgacacctccgggacttgggagaacaggcttcagaaaccaacacaccagacccaagaggggagcctagcagctgacggggtgcagggcccagggtccaagcagggagcccacaggctaggtccctcccatcagctccacttccacttggtctgcgtgtgacctggagcaaatcttccggatttagatttggagaaactgaagcatggagcatttagaaaggcctgcccaacttctcacggagcaatgagaagcaagatgtgaaaatgcttggagcccaggaaggaatccggtcattaaatcctagctctttccctttacgtggttggctgacaaggacaggggacccaggaaggtcggtaggctccctctttgggcattttctttcttcctaccaactcactactttgaaaactttcaaacctcataaaagtggaaataattagaatagcaataaatacccatatactcttgatcgcaatcatacaccaattgtttacctcttgtctcacttgtatgcattcccgctcctctcttccccttttcctctctccacacacatatgtacacacatacacatgcatacatgcacaggcacacacctacatatgcacaggcacacacacgcacaccacatccacatgcacagacatgcacacatacaggcacacatgcaatgcacacatacacgcacacatatgcacacacacccacacgcacacacacacatgcacaatacaggcacacatgcaatgcacacacacatatgcacacccacatgcccacacacgcacatgcacacaggcacacacacacatacacgcacacccacatgcacacatgcgcacacacccacatgcacacacacgcacatgcacacacacacttttctctgaactgtttgaaagtgcgtagcaatcccctgagctccacccctcaatacctcagcactcatctgagaattttgtcttaaccacagcaccagcattgtacctaagatacttagttcaatatcgcctgatcctctattaggtgttcccaattattccaaaaataactcctacagctttacaaaaatctgggatccattcaaggctcacaaatggcattggttatttctctctcatctctctcaatctagaagcaaccccccatatttttcatttttgttttttatgacattgaccttttttgaaacgtttaggtcatctgtcctgctgacagtcccttgctttggatttgtctgattgtagcttcaggattcaatttagctgaacctttttggggaggtcttttccttttcatgcgtccaggcaggggcgaacaagcaagtttgcccatcgagggcaagaccaggtctggccatttggttaaggtggtgtctgccagggcatagctctttcttttcttttctttttccttccttctttccttccttttctttctttctctttctttcttgcttgctttctctctctctctcttttttttttttaacagagtctcagtctgttgccaggctggactgcagtggcatgatcttggctcactgcaacctctgcctcctgggttcaagtgattctcctgcctcagcctcccaagtagctgggactacaggcgcgtgccaccatgcccagctaattcttgtatttttagtagacatggtttcaccatgttggccaggatggtctcaatctcttgaccttgtgatctgcctgccttggcctcccaaagtgctgggattacaggtgtgagccaccgcaaccggccactgctctttc

SEQ ID NO: 1052 - DNA, 4001 bp, Homo sapiens
atgctgaagcctatatcctcctctctgaagtgcatagttgtgagcacactgagctgctgggaggatgtaaatgaggtggcacggcatggaagcatctaacaaaacccaccctagtttccttcctctcaaccctgcctgcccccatcagaagaccaaattccagctcttccaggaccgtagtcctgtgtggagtggagggcagctgaagatagggcagcctgtgcagaccaaagaagggggtggaggagctgagctgggcaccccactcactggaggggatgcggcaaagcaggcagctgggactgggtccaagtagtaagtcaagtgtgtgcaatctcctgatggagcgtgcaggggagagggtgggagtgtgtaattcccctgcgagccacggaggggggttgagaggaaggcgggaacaatctgcggtggtaaggtaagtcaggctcggtccctgctcctcccggcccctacccaccacccaccacggaccccttgcagacccaagatggggagacacgggctcctgccactcaccctagcggcccgggaggagtagggatcctcgaagagcgcccacatgcggggctgccagccgcggcagcccccagacccggcgccatggcccgcgcctccctcgtgggggcccagtcgctgcagggccagctcccgctcatcgtcgccggcctcgtcgctgggccccgcgccgctgccgcctccgtccgggctctcgaagatgtcgagcgcctcctcggcgtcgcggtgctgccggtaggtcatccagcagcagggttccacgtcggtctcgtcgatgccccagaaggtgagctcctcttcgaagagcggcccgcacacgtccgcggggcagtgcagcttgccggtgcggtagtagttgagcacgtaggcgaagacgcccgggtgcctgtcgaagaagaactcgcagcccccgccgccgctgctgccgctgctacccacaccgccgccatcggtctcgggccggcccccgccgtcggggtcggccagccaggcgaggcgggttcccggtagggtgcgcagggtgctgcggtaggtctcatgtcgcgtgccgcccacgttgatgatgatcttctccgacgcctcgcccttggccatctcctccttcagacatgttttggacggaggcttgttccccgacttgcgcccgcggtaggaggagacacacaccgagctgatcataagaagcgctgcggggctccggcttggggcggccgctgccctccaaacacccttcccgaggaggcagcgtcagacgggggagggggaggagacgaagaggaggcaggaggcggtggcggccccctctgcggcttgggcttgcccctgcctatccccctaggacgcggagcgggaggagttggatttctccggtacacaggtggttggggttagggcaggaagctccggagagagggaggcgcagagagggaggacccggggaagtagaagcaagcacacacgcggtcccccgctacgacgggacacacaaacgctctgggccggggacacgcccccgccttcaccccgaccaaagacgaggaagcgcacagtccacgcgcaccgcgaaggtccggggcgctcgcgctcacacgggccaccctccggctccaagaccgcaccaagccccggaatagccggcttccccgcagcggcggcagcgcagcagcaacaagtcctccgagcggctgccggggccaggccgacactctcacggcagccggagctccgtgggcccgggctgcttgcggtcaacacgaggcggcggcggcggcatgtggcctcttccccccattcataaatccagcgccgggcgaggaaggcaggcggggcagagcagagagcggcggccgggcgggcgggggctgcgcagggcgaggcggcagctggaaaacaagcgcgcccgcaggagcgagcctcgggtcctgcgtccgcggctgggagctgcgccggaccgggcgcagcgctgcgggggccgcgctggggcgggggtgcctcagacggggcgtcctgcgcggcgccgagcctggggggcggggccgctctggggagccgggctctgggcactggcgaaggtgtaccgggggcggcggccgagcggccaaggacacctgcaggcttcccgggccgcgcggagagggagcctcagcgcaacgccccggcgcctggttcctgcgatctggcggcgctgggagccacgccatctacgcgtctgcccatctccgggcggggcgccggccttggctcgcgcgcggcagggggcgggcgcgaggtggcataggggagggggcgcctcggcgccggtgggctggggccctaggggctcatggtctccctccggcgctggcagcggccgccacgccccagtggcgccttttcctccggggccccgcctcgcccagacgcgcccttcgcggggcggggtgggcggggcgcggcgcagcgcggggccgatccgactcactgcaggccctggcgaccgagcgcagtcttcctccccggagccgagccccaaccaagcgcgtcacctcctcgccgccagtgcccagcccagcgcgccgcccctgcgcgcttccgccggcaacccctcccgcccccctcagccctgctccgcgcctcccccgggcccgcagctcctcccaccgcagcccgctgacaccgaagcgctctcgacccctgacctctaacctccgcccggctcttcttgcttcgtccctcgccccctccccgccaagctggtcgcactgttgccgtttcactgcggctgacggaaggccaaggaagaaagagggtagagacgctgtcgcgaggatcaggctgccctctcctttcccagggaccgtgttggggccttctgaccaccccgccccgcatcctgcgcctcggaggcccaacgtagcccaagacacccatggtcttgatgctctccgcctctgtcccagccaccaaagtccccgcgatggaatggaggacggggtggccttgggcagagaagcgcttcttgtgccggatggaaggaaaccgtagctctggctgtgttcatcgcgaaatgttttatggatgtggagtgggtgggtggccctgaaaagtcattagttaaagcctttgctcgtcattgctctggggtccacataggaaatgcccgtgtcctgcctcatgaccccttcctgtttctactcttattctacccattacaatttgactttgcctgtgtatatgtctcctctcccctccctaaccctgagctcctgcaggcggcattgtgctttttcatcttgatagctcccacagtgcctgcctctgagaacctgtttgctaagtgattgagaagctgccatacccaaaacgtaggcaccaacaggactttactggccctatcccaagagcaatttccagattcatttgtttttgttaagtccagaacctattttacatcttcatattaatccccattgggtttttttttcttttttacagcttcaggcagcctccatgcctgtctggatgatgtaaagagatcttgaggcagaaatgaaaggtgaatgacacacctgccctggacacctgtgcaccttcccagttccagatcaggcagtacctagctcaactgagaaaaacaagacaagggcctatgtgtgtctcaggaaaggttaaaagctcagtgccaatgcaagggatttttacaagcaaaagtctcattattaatgaggccagaaaaccaaaatgacaatgatctttgatgatctgtactgacacgcaggggaggtgagttaatcagaaacacacatttactggcaccccctttgtgcccagtccctgctcctcgaaactgatgtttgtatttcagagtttagctgtctttgagtttgctgcagtgaaaagaaatatcccaagtgtgactgggaagagaagacccgggacaggccagaaactggagtgaggaagaaagaaccacagaatattaatgt

SEQ ID NO: 1053 - DNA, 4001 bp, Homo sapiens
ctaccctgattcccaagctttaatgccaggtacctgcccctgccaagctgagtcccatcaccttctcctctctaccctaagccaatctccaaggaccaccagtcctttacaaactgctttcagatgaataattgagagctcaggggaaggaaaaattaacccctccctatcttgggaccataaaagcttctggtcccacagccaaatgtttaccccatgcgtgaatccagggcaatcttcctaaagaaggccaagcaagcaccaggctgtctccagaggctcagcccctgtccccctggtaaaacataccaaaaaaggagcaattaccccattgttactttctctgtgtgtgggggttgggaggtgaaaggggaggacaagtgtcccaccagataccatatccaaggccacactggccatacccaccccacaacactgcaggaatgacccactcaagtaggccttctccacagctcatacagcagcattcaccccctgacaggagccaacaccttccggagctggcctgggtatgaattcctgcaacaggcacaacagtgcggccccatttccagccaatggcactgcacatgcctcaaatgccaaggttttactaggacgtggacgccttacaaatgaaaaatctgaagctatttttgtttttggcagaagagtttgacagtgggaaagatagggggtggggggaggctggaaaagaggcattcaaaacaggtaagctctgaaatgaaaaaggtgacaaatcctggcaaaggaaaacattttcccctgctgtaaaaagtcagttactccattaaacagcttctattttggaggtaaaaggccaaaagggggtggagtgaccagacagcttgtcctggggtttgacacctagctgagtacaggcataaggcagcaaaaaaagtcatgtcaccaaggtctgtccttcaatgacctcagtggagagcctctggaaacttactttccacaatctcacatcacatcccctagctcagaatggggctggtctgggggcagaggaaggtgcccatgacccggagggcttctcctgtgttcacaggattttggtaggcaaagcatgaaactgacaaggtgaaccaagctggggatccttgggggacaggcttgggacacacgcacagatcctcttctccaacggtgccactcctaggctagccagggcactttcctgaactctttttctccagcctcctcaagagcaaaagggaacaagctactaacctctttctctggggggtcccttgtatacttgcattttgttgcattcaagtagagacgaggaaaaaataaacacatcagttcccttcctgtgtgccaacaggtccacatggggaaatgtacacatgctttgtattgaattcgtggacacccaggagccctttctacagacagtaaacatacaggctccctcgaagtaaggtaaacaaggcatacatttgaccatcacgtacattcatgcaaaatacagcaacgcatgcctggtcttacaaacagatcgcattgtgcctaggaccccgagaaagttcagacgctctctcttaagaaatacggaccctttttcttgcagtgcgatttcaggtctggaacctcagcctgttgctgacatatcagggctgcccgggataaaagcagaacatctcggatcctattcaaatgtcaacactaagcaagcgcaggaatttagttgagtccaggtaactttgcccagtcccttcccgtcccccacctccagtgtaaacacctcgcagagtgagtctttcgatccctctccccggggccgcgacggcccttggcgtcacgtagagacctttcccagagctcgcggggtggaagtggcgtcgggcaggaccagatggactggcccccagcctctggtagacacaccgccggctcgccgagctggagaactttgcgaagcgccccaaaccgctccgggtttccactttcagccatttctctccttgtcccctcaccaagagcggggacggagcaagccttcgccacctgtctctggcacccgccgagggaagacaggccaatggaaagagggcagaggttcacaccccacccccgaaccccagcgcctggctgcccggaggtggctccacagcccgagggaaccgacgcccccgggccggctgtctgctcccccacggcacgggccccacccccaatccttccggcgccccagcgcccacccacccgggcgcgggagtgggagggtgccgcgtgggcagccggagcaacaggcgtgggagcagcgctcctcgcacttcctggctccagaaggctcggtcgcgtccctcttaccttccgcgaagccagcccgggccccgcgcccggcgccccgcgcgcgcgaggaagctgcggccgggagccggggccgcggaggcgccgagcgcccagcagcgcggggaagcgcccagcagccgccgctcgcgcggctcctcctcgccagcgcagtctcgctcgctgcctccctcgctcggtcggttcgtgcgtccgtccgtccgtggggccctccctcccccgccgccactgccgccgccactgccgccgccactgccgccgccgccgctgccgcagcctccgccgctccagccccggctcggcagcgcgtcccctccccgcctcgccgctccgctcgcgggctcgcgggctccctcgctctctcccttcccccgccgctgccggcgccgcgccgagcggagcccggccggccacgggctgcctctcccgaggtccctttcccgagggggggaggtggtgggggcgcggcgcaggcggggcggggaggagaggagagtccgggggaggcggcaaggctgcgccctcggctcccctccgatccccgcgggcccagcggccccaggccgggccggagagcgccgagccgccaggcagtggaggaagagaggaggaggacccggagtctcgccgcgggagggtgcccagggcgagggcgtgcgagggggagtgactccgcgcgcgagggtgtgtatgagtgtgagtgcgtgtgtgtgtgtctgtgtgtgtggagaggggcgcgcgcgtgagcggggggtggggagacgaggcagagcctagtgcgtctccccgggcgagtggaggaatcctagggtgtgcctggaggtggcggagtgtaccgacgcgggtgtgagcgcgtgtgccagcgagggtgggcacgggggtgagcgtggcaaggtgagctgggtttgggggtgggggaggagcagggagtacggcgtgagcgtaagttcgggggcgtgtgtggctggggacccacggagaggtggcagggagggccggcgtgtgcgcgcgtggggtatgtgtgcacctagctgtgtgtctatttctcgctgactgtccacagggcagcagcacctgcttgagaccaagcccggcgacctggcaaggtggggccccctaccgcgcaatctttgcggctggcccccggctctcagctccgagtgcagaggctgaagaggtacccgggggacacactgcctctaaccccacctatgagccgctctcctctcggaggacgaaggcaccatcagaaggtcgagattcgccctcctctcccgccacgtctacccactacctagaccgggagtctggacttgggagcgtgaactctcacccgagccggtccccttacaactggagcccgcccagcccctcagtccctccctgaagcccatgggtccccactgctccgtgcctcgtcgacccaggatggggagtgggaaggtcagcatgtgcccacagggccaggtgtccggcccagattcccaccctcagggcggcggcgcgcaaagggcgcagtccccgccgctgggcggacccgcggctccggctttcccggtgtctccagcctcggtgcccggaatcctggatctcggcctggcgctccggaagcgaggcagctccgtgccccagcagggacggggaacgcttgg

SEQ ID NO: 1054 - DNA, 4001 bp, Homo sapiens
aggtactgggtttcccctctaacttacagggcactgcctctttactgaaaaatagaattgtcattgatatttatgagaaagttggtgtcactgacaatgggataaccaaatttgcaagattgtctccataccccttaatagtccaataaaaatagcaataatagcacagtaactcttattttatttaaaaataaatgaacaactccagcttttttatggcaaaacagttcattgtggctgttcacatagcaattatcatccccttgcatccccaggtaatgactgtgaccttgacctaaaagccaccttagtttgaataaggaagaccttgaaaggaaaggtgactgaccagaaacactcttaagaggcacacaataaagaaatgatcatttctaagaaagtacttaaataatacgtgattatttgctatgctagttgatgtgtttcattataagataaacttaaatcactgtttaattaaagagtgtttattagtagcataagtcacttttcatgcccttcccctgaatccctaactaaatccaaacagaagctcatcattttacacagaagctccttagactctgaaatcgtgatatttacacattattaaaacccatttcctaagttagctcctcatgtctccctggtagaagaatgtcatctgtttctggaaggggtggggtgggggctctaggagtctgcaaagagcatcttatgcttggctatctttcaatatagccatttgatgaactcgtgcgctgcgccttccaactgccaggactcctagtcgctctgcaagtgcttagttggggtctctcctctgttaagtccgaaaggcgtttggaattcttcctttccatccccgctcctaggactctcgcctctcaaggcttcatgctaccgtcgatcttaatgccacaaggaaacagatgagtgctgattgtcagtttattgggtaatggatctatttataggtttggtgagattgggaatttataggtgagcaacacttaagggtggcataaaaccgttgtgggtttggaagaggggaaatataacaggtttgtacctgtgaccatttagttcgctctgcacctgtgccctccacttcccacctgacgccaggaaaaccatctgcccctcacttcgaaggtgagccttaacttcacctagaaagtggtgggtgggtgaaggggtggaatcaggccgccgagagcacgtcccgacacctcggacttttcagttgcagggatggaaggtggaggcagccggatcctcccattctgaggcagcggggacctggagttgcccgtctctactgctggctctccctggggagaggcggcgcctctgggagcagcccgggagccccagagccttcgcggaagggtgggcagtgccgatggggcgcgcgctgccgctccggctgcagccagctttccatcacttttcccagtactttgctcagcagctgtcacgcatccttggagataagaccgagagggcgctagaaaggcccaaaaggcgtccccagaagagctctcctgttaggatggggacccatcagaccccgccccgccctgcccacctttctctgcctcggggaggctgccctgggtgcccgcgccgcggctccttagcagagctcgcgggttctgctgcatctgctggctccgagcggcgagaggttctgcaataaaggcacggataaaacgcccgggtaatcgaaatccgaatgcacctcttaccattggaccgccgaacaatattctccagaaacgtgttttgaggggccactagtcccctcctgcccccagccatggtcatcctcccagcagctcggggtccggcgggcgtcctggcgcggcttcttacgacagcaggaaactggcctcggggcccgcacgcagtcccggctcgaagcgccccatgcgcccggcggggatccgcaggcagggctggcggctccctctggctgctaccctcgcgccctcttcgcgcctccctccctgcggcccgcctcgcagtgcactcgcgccggcctcggctagcggcagccgcctccgggtgggcggagggagcagcggcgcctgggccggcggcgccccctaccgggctcgtgccccaccgccggcctgcgggagaccaagctggggggctcccgcagaggcagggaagtggcgggcggccgtggaccaaggctgggacggcagcgccaccctctgggttcagccgggaaatgtgttcaggatgtgccatgggctgggtggagaggagggcattgtgagcagctttcagggcggattcacccccaacaagtcttaggggagcgtgctgatgtaactctcttcctttgctctgtttcaggccggggcccccgggacctgtgaggctctgggaacaccttcttgccttcctgtaaggttagcctgactagtgaaagttgccccaccttgattctaggccagtgtttgagcagtaattaatgaagtcgtattgcaatagtgcagatttagagtgactggcagattcagcttcagaagagttgtcttgggttgtttttaccgtagacacaaatgcaggctcctgatgtttggtatgatcagtatcaaactgcctgacaaacatcaaaggggtggacttgtctctaagggcgaatgctcaggagaggggcagcattaattaagcaaccgtggctttggcttgaagggtagtctgtagtgcagaggatacagttagtttttacagctgacccctggtatacggaagaaccacatacacccaaggtttctggacaggggctaagacaacggtcgtttgttcacttattttgggggatttcgacccacacatagtctgtacctgcctttttactatgtatccccagtcggtgcggtgggagactaagcctatgtcccacaggagaaatgaatggagagtttactagtttcagactgagtcaacagtcaacacaaaaatgtaagagaaaaaaaaactaaccctgaaaattaattgtctgggttagccatcctgacatatcctaatgtattgcaaagacatcctgtctcagttaattaatttcaaaaacagaagaactaattcttgcccagaaatctctcagagttgctgtgaagatcaagcaagaattatgtatggggacagcaccttaaattgtaaagtgctgtgccaaggtcagacgtcattattggagtgactaaataaattgggccattacgaatatcaccctttatctcgtcttgtgtagagacaaagtaaacagattgctgttagcagagagttggataagactgtcataggatttgaaatgcaagtaatgatacactttttccttaagatagccttctacccatcgcctgttacctagtctagaacagtgatttcttaaaccctagctccgtctagtggttctttgttctattacaaatgagataacactggttgaagagaacttgattctgaaatgtatttggtgctgagctgagccagtttggtgcctatccacttcatttgaataagttcatttaaataaggtttttaaagttgtgttatcgcacaaacatgccaagggaagatttttcatgacaatattaaaaacccatcaagaaacctcataatcctgcttgtgaaaggaagataaagaaaataatgtggaggggaaaactatcatagagagttaataaaatttctaaggttttaatgagctctcatgttctgtggcttagataaaaaaggaaacagatgatattagtttgagatcagagatgttaaagccttggtgggcaacctgatgagaaaaagaaataagatgtcttccattttaaatgtactactgaaatggatctcaacatggactctgtgtgtgtgtgtatgtgtgtgtgtattggcacctttttgaatactacaatttttggtggcacacttgaagaaattaaaagacctaaaacaaaatagtgctactacaaagtggttcttttttt

SEQ ID NO: 1055 - DNA, 4001 bp, Homo sapiens
gctacccctgccactcccactccccacccaccctccatcggtggagtcattgccatttgatatccgctgagacaacttggctgctcaggctctgagtggggggtggggggatggctcagaaaacagcagctcctttcaggacccaggttggcaagggctttgggaggctggaccagcccagatcaccccccaacaccctctccctcccttcctcccttgccaccaccaccaaaggactgggggaaggcagcggggaaaggagttggcactgcctgggccgtgcctattgcctccacaatccagccctggaccctctccctggcatgatgccttccatccccctcctccctcgtttcttcctccctgaagaaccagctatgagtcaggatgcctggttccttccaaacttggtcccctatacccagtctacccccagagaaatttacaagccctaccacttggcacaggatggtacccaccatcatgccaggaatatgttcaaaaatccttggagattagggagagagtttcaggatgaaactaaattgaactcactggtggctgcccacccctcctggggctaatttcatgacaaccactccaggccctcctcagcacccttaaacaaggccatctctcacatgggggccctaaatctcctgtcattatctccctcccacccaggcagcctaaagcagtcccagtggggagaaaaaaaattcaaacaccacagcaagagcagactggccagacatctttagtcagaatttgtattggtaagcaacagaagcaggctttaagcactggcctctttggggtccaaatctgcaccagcttcttccccatctgcctcaccctgcctggggcactcactggaattaaacttcaagacaccagaacccaccctcactttttcccagtgttgtccttctacccattcctgggttcagctctcctcccccaaatcaggaagttccatccttcatctgttccctaacacaggtgccctgggttagttctgatgagaggaggaatggaatgggaaggggcgtctccatctggagggtgagtttatagaacccaatctgcccttctcactctagcagaagtggccctgctcctttccttctggaaatcccagtgcgaaacagctggggtgagggtgaggggccatgaggagggatgtcttaaaatgggagccactcagaatagaaggaagagattgggtgggcaggggtctggagcacaccaggctttggtggctccccggtttaagctgccagtatctgtttttctccccatgtgggaactagcgatcatgggtgtcactatgtgattgtcactgtatggggagtgggggaggggctggggatgggagtaacctgtccatatggggaggagggcgcactgtctgttgtgcctgtgtatggggtgcctggttatgtgtggttgtcactgtattaactagaggagcagggatgcaactgctggtctgcccagtgggagggggcatcgggaaagccccttccttagatgaaagggctgaggtgaccagcctggctagtttcctcgtggggagcccttcccaggaggctccatttgggactgcccaaggcgggaggcaggggaacaagacggtggtaccgctgaggccaggcagggtagggactgaggatctgggaccccgatgtctctggagagttagggggacaggacccggccggggcggcagaactccttcatcagggccagggtcttaccttgggtccgaggtggagtggccccttggatgggccgcggggcagcgggacagatggacggacggggcgggcaggagttaggagcagagctgtgcgacgggccgggccaggactcttaaacccggagctgggatcagataagggcttgtccgggggccggggccggggtcgggccggccgggggcagagctgggccgggccgggccgccccctccctccgcagcgccggagccaaactttgtgtgaatggaggggcccggaggggggccgggcaggcgggggcggggggctccgaacagaccaatgggagagtggagcgccaggctcgagccgccgagattggagggtcttgggcagggggcggggcgtgcggggcaaggaagcggagacccagacagctgcaggcgcagagagaaatatccaaagacagagacccagacagacccggggagaaagagagatgaagagacgatatgcgaaacgataggagctgagctggcagggtgacaggggaagggagaaggaagaaaagggaggcggtcctgtcagcgatgggttacgagagctggagccggggggcgggactgggaccgagttaacgaagtggaaatgaattcaggaccggcccagtggccctgcaggcagcgccgaaggcggcgcctggaagtgagattggggcggagtaggcctgggctccctgagccacaggactgtatctttgggcacaattcccgtgttgttcaccgtctcctaagtccccggtgcggtgctgggtgagagacgcgcagcacacggtgcccacctgcagcggctttctctgtaaggaaagataaggccggaaccctcagcgaagtgcgggaggtactgaaggctgtaaaagggagaggtcattctactcagagggctcctagcagatgtgggaggaaagaggtaacatctgattagggtcccaaaggaagcagaagattcaggtgctgagagatggtccccaggactctgttgcatttaaggcagagggaacaacgtagcagagtcctggggagacgtgaaaatacaagttcacttgggaaacagcatcaaactgtcccatttactagattagagtgcagggtgatggttctcaaccctttcatcaccaaagatttctttaattttctgaatctatgtgttgagaggttttaattcacccccacccccagcatttatttaaaaagaatataattatttcctcatttctgatcatcataaacatttaactgctaatcaataaccagtgttaccatattgaattgctataaattcaggtaaaaaaaggaaagaaactaggaatgtagcttagtttaaccactaaaagccataagataagtaaatgtccattcaaatagcctcattggagaagctggaaggacgggactaaaggttaggcaccataggcagtgtttgtgttaaggggaacatccggaagaaacacagagttgtgctgatttgtggtcaggccagagtttctgtaggctacggagagcaattgaaggttcttgggaaggatggagtaggagaaagctatggcattttaggaaaattaatcgggaggtgacaaaatagtttgaaccaagtggatatagtaggcaagtagacgatagaaaataattgcaataatataagcatgaagagatgacagcccaaatcagcgtggcaatggtgaaaagtggaacacagaaaatgaattggagtacagaaaaatcaaaagaaaatgaaaaaagtttgaagccaacttgacatgttgagcaaaagagggaagcttcagagatcatactagagtctcaagtcaggtgatcagaactgcgaggtcattcacgggcataggggagcctgggggggatcacacctggtgaggagactgaggtgggggaagaggaagtgatgagttcagagctggaagctgtggagaggggtcagaaccagagagagaaaggaggtcattgctgccagggcagtgtgagttgaagctatgagaacagggtagatcccaacaaagactgcacagagaaatgagagcctggcacagagagtgaggaacacctatgtttaggggatgggaagaagaaggacccccaaagagtgaaagagaatccaccagacaggcaggaaggagacaaagaaagtgagatgtcatggagctaaggaaggagagactgttaaggaggaggttctaacagtgccaacaagtacagagagaagagg

SEQ ID NO: 1056 - DNA, 4001 bp, Homo sapiens
ctgaaatcaatagactgggggctttttggggaggggggcaggcgggtaatggagccctccctgccctaaggacttccaccatcccttccccagctgtagccagtgcagccaccaatggctctcctcgcaggctgttttgaagttcaccccaagactgatacacagtctttctcattcttccctccttggacctcactcactccgctccattccctcccctcaacatgcttacaaacgagaaagaaatgaaagctgtggaaagtcagtggaaaccctccagtgcacaagggtggaacattaggaaattcccactagaaatcctccctgagacctacccacgatcactgctgctcttgggccagcctcatttcccttgggttttttctcctagtggagacagcctgcaaatggggaggggaactggaagatcccaacacagaagcctgggaaaggaagcccagagttataaagagttaggctcgtatccctctgggatcctattcttcatgagagacatggaatcagatcaggtgaagcactaagcacccacatttatttccccactccctctagttatattttcccccagcctcttacttcccatggactatcctaacaccagccccgcccccacctgccatatgccccaaagcccacattccaagcgaagcccacctgatttttcttcacatgcttgcctctgaggagctctctgagctgcaatctgctctgagagaggtccagagcccttccccaaagcacccagggtcctctaggagatatggaccatacagggaaaggtttagaataggatttgggactcttccaccttcccttctctttcctgggaatgatcctctcctcccactccacggaaacgtgggctggctagtgggtgggggatggaggagtgtgccataggaaccacagatggcctggatggttgaccaggtcctggggagaaactgcctgggtatgtgactctaaacctagcactccagcatcttatgttctggggtgaggtcctctgcagtcagcactctggagagggtgtgtgtgtgtgtgtttgtgtgtcttggggtagagaaggtaggaagagaaatcaaaatgaaatggctttgagcttaggggcaccccctgcatttattgtccatggagtcaggggacacagggtccaagagccccatggcaatggaagattagggtttcccctgcccccaacaatgggcttccttttccttccctgaagctcagatgtcctcaggaagagtaagcattgactggctcagagaccccaggtcatgcagaaaacgaccctgctcccattatcctagctttagtcccaggtgggcttccagatgttctctcagggtcttaggtaatctgacccccagtcggcttgcctagacagatctctctgcccagggatggggaaggaaccccgatgtcggatcacccccagaactctctcactctccattgccccagggatctaggtaaaccttattttgaatgtgtcccacatcctgtcttcctgagtgggggactgcacttttctcaggggaaggaaaagtgtgaaattgttacctctatctcaagatcaaggacttgatttctccatcttccctccaagaatttcagttcctccaacctactcctcatttcttgtgcatgctatgacccctttgcagaagattgcaataccacttttcctgggcccctcttcctccctctagagagctggggagtaagggggctcattttttggaaggagagacctggtgaaaactcccccaagaaccagctcctcccaaacccccacttgccttggaaataggggcccaaaccccaagtcccccgcaactcaactcacagcacgtggagaggagagtagccggcagcagagacccctggggggtggcgtccatgcccctgacaccgccccccccacgggccccccgaagggtgggagccgcagacaccgctgtttctcctaaatgtagcggcagctctgactaggacttgctatctgtgtcatccctacttcccaggctcccctgctcctctcttgtttccacggcaaccagtctggcgacagctccagagcatccccctcccctccccagtcctgggtaccactaggggttgatccaaaccacacgccatagctatttttagccaaagtccctcctcctggacaactcagagcttggctcctcaccccctcataggaaaaaaaaaaaaagaagaagaaagaaaaacaaagctggcacgctggctctttcctaagaagctccttcctgggggaaaatacaagccctcatgtatttgagaataaggtgctaggttccctggggtttcagagggccatctggtagctggcagctcaccaccttcaacatgggtctctgcgtgcaggtgctgctctcaggtcaggctgaccatcatggtctagttttggagaggccatggatccagaaggcggtagctagaaggaaaatagatctactaaaggaagggaggcagggtcaggggttctaattattgccactgatttgcactgtgtcccataggagtcacttcacttccctgagccacagttattccatctgtaccagggtgtggacaagagcaaatatcccctttctgcctgcttcacagagtcagcagatcaaacgaagaaaaaacaaacaaacaaaaaccaaaaaaaccacaaagggctttgaaatgtgttttattcatagcaaaaaccctagaaacaacccaaatgtccaccagagagaaaagcctaggttagggcttactaagtattcactcggcaaacttctgcggagcccaagtgccaggcagtgtgttagatggggtggttacagaatgggtgagtccctgcccacaaggagctcattaacccaggagggataaagacacacaaacacacagtggctgctgctactaattcactgagcatgggatatgaacgagacacatgcctcatgtcatccccatggcaactctataagacaggtgttatttttcccagttatagatgaggaaactgaaacagagacatgttaagtaatttatcgaatgtcacagagttgggcagagacaggagccaaactcccacatctgtatcacctcatgctttgtaaattgttttaaaagaagacttcttaaagggtagttttagattcagagcaaaactgagaggaaagttatagagattttccgtatgccccctgtccccacacatccaccagaatggcacatttgttacaagtgatgaagctacattgacatcataatcgcccaaagtccatagctgacattagggttcacttttggtgttgtacactctgtgggtttggacaaatatataatgatgtgtatccaccattatagtctcattgctgtaaaagtcctctatgctctgcctagtcaatcccccttccctaacccctggcaacaactgctctttttcctgtttccataattttccttttccagaatgtcatgtcgttggaattgtacaatatgtagccatttcaaattggcttctttcacttagtaatgtaaatttaaggttcctccatgtcttttcatggctttgtagttcatttctttttggcactgaataatattccatttcaggatggccatggtttatttatctatttacctactgaaggacatctcggttgctttcaagatttggccatgatgaatacagctgctataaacatccatcggcagattttcatgtggacgtaagttttcatctcctttgggtagataccaaggagcatgattcctggatcgtatggtaagagtatgtttagttttttaggaaactgccacactttcttccaaagtagctgtaccattttgcattcccatcagccacgaattcctgttcctgttgctccacattcctgccagcatttggtgttgtcagccttagcctagtgtgcctcagtaatgtaatatctgtggaatattaa

SEQ ID NO: 1057 - DNA, 4001 bp, Homo sapiens
cattctttggaaagtgagataacaggtctgtcttgtctagcgctacatttaacagttttttagatctcacaatacaagctagaattccacttctgtttatttcagggtagatttacatcagtttagtaattcaccccagacctctgaataattgtttcatgtgatctacatgaatagtgtattattactcattaccaagtaattaccaagatagtcaacaagatatagcccaaagggaattatacacaataatttgggtggtggaggggggtggggaggaaggaagagttgggagtcacacaaagggatgtgattcacctgtaaaggttgagggtggggggttacaaagtggtcctggcagagaaatcacaaggcccaggttccaggacgacactggtaactaggaagtgtgtgaccttgtgcatgacgagatggattatttcaaagattggatctcatagatcaaaagaagggactgtgctgaacgctctttcagattcctcccactgtccaaataccaattgatatctccactctgggtatgtgccttactaggtccggctggggaaattcggccttcattcatctgatctggcacagtgaccgagccctggggcatgcgcccggcctcatctttcacctgaggaggctcctccatggccgggcgccccgcgggtgagtcgtacggggacgtggcgcttcgaagtttatggggagcctcgcacacctcaagttgaaggaactgctgaatcagggtgccccaattaagtcagatcttaggcaatcctatggttcctttactctccctcacccttcctcctactctgaaaagaaaccggatcggcctgtccgcccagaggtcacctgggaagagcagagtgatgtcactcggctacccccaaaactgcctccaaggtacaaaagagctggaatatctgtgcatggtccaaagggacggcacactccggaaggtgaccctttagaaggtattattaccagactgcagcctcggcctctgggatgggtgcgggaggaaggtggtgagtttccatcatcccgctgccttgccgcacggcggccaggtgctgctacacattcaaacccgacagtttggcttagtgggttgcgaaaaaagaactcaaggggaggaagcacctgcagccacccaggccgaagttagggaccacttccccagagttacggacggcaacaaccaagtcacgtctggagtcacctctctggcttccggctccgcagggcttgccctcccgagtcacccaggcagaggccggggacgccagtaaggggaaggtcggagggtcgggaggacagtgaggggaggcgggctggaggagccgggatggcgaaaggtggggggtggggtgggagggttagaggggcccggggcgccggggccggggtgtgtgggttgtgggcgaggtggccggggcggccagggggcgcgcaggataccctacctgtggtggagagcacggtgctggcgaagaagagcgcggaggtgaagtcccagttccagttgcccgaggcgttgctgagcaccgacacgccgtagttgctggcctccagcacccggcccaggaactgctccagctgctgctcagacaggcactcgtgctcctccaagaagcgtcgcttcagcttgcgcagctcctggcgcagcaggtcctcatagggcagctccaccgaggagaagaccactgcgccgaagaccaggtagagcaagtagcccagcaccaggaagccgaagcaccaggccgagcggtgccgctccaccaggcgcacgcacgagctgccggccagggactgcagcatcttctccaccgccgccgccaaggccaacgccgcagaccggccggagcgcggcccgccgcctcttctggccccgccgcccccgcccccgcccgggcctggctcccgcccgccgcccgctcccccgcgcgcccgcccgccccgctcctccgggcagcgccgtcttcctgcgattggctctctcgggcgatgtttttcttccttcttttcctgtttccttgcaatataaaaagcccagatgatgtggcgctgacgtggttgccggctcaggtaacccgagagtcagcggagaccgcgcgcaaacttggccagagcgcctgggctgggctgccggggcccgggacgcaccgccttctgcgcactccagaggtggggcgggcgctcggtggcgcccagaccccgacccgacagccaccagctcctcccgctccctcccttcctgggtccagtagccaaactctagctgaccgcgcgcggcgtgtgcgtgtgtgtgtgtgtgtgttcgcgcgcgtgtagtgtgggccgcttctggtcaatgcgctggccgtccaagccccctgtccaagctactcttgtttcccacttattttctcccaatcaaagccagtattacaaaacagcaagcgctgaagtactttccttctttgtcttattggtcgaaggattgagcaatctggtgccagtaatgacggtgaaaataccagaacatcagagttggaaggctccttgaatcagtctcctctctcccacccatccccctcacaaaaaggacttgagggaaaaggagagtctcagagaagtcctatttctgagttcgaattttctaaaacatgaccttaggttttttggtgaaaaaacatcccaaatgtgtcaactgccagaagaaactgagctttcccaactgtcacttctttttaaagtgacaaaaatgtgggcgagggtcagcgagccgcctgcttgtggatgaaaataaaaattggtacaccctttctggaaaggcaatttagcgacacgtctcaagaaccttgaaagggtttatttgttctgattcagtgatatgtcctaagaaaaaacaatcagagaggcacttacttacaaagactggtcatagacggtatctatatatacatacatgtagttgtataatatagtgcatacacatgtgggacacacacacacacacacacacacacacggtatagatgaaataatgaagactcagaacaatctaaatattccaaaatagagaatggttaaataagttatggcatctctacagcatggacaccatatagacattaaacacattaaagttgtgtctaaagactattgaagcaaaactgtgtagaatctcaaatatgtaaaatatttgtattttgttacaaaataaaatgacatctgcattattaatcaactgcataggaataaaactatctccttgcagttgtctttgggtaatagtagagtatatagatgactttcctttcttgtaccttttaatatttttcaaattttctacagtggatatatattatttttgtaatcaggaaaaacatttaaaatacacaaaactgaattgtacaattaatcattccaacacctagctgaacatttgcctactttactgaagttctctaaacaagtcatattttgtattttcatagaaacttgtgcaaatgtctaacatatatatcagtgatttttcacttttagtcaatagccttacctcctacgttactcaaaagattgaagccagccctccactttacttctctgtacttcaaaatttactcatcggtaatccatttcttccctttgctcttacccctaaggaaaaaatgtacctccttattttcaaggtgaaaggaagcacttaccactctcagtccttccgcctctgggaacccttccccatcagcaagtgccctactcttttagaacttgaattcctccttctccctcaagtctccatcctacaatgtccttccctgtcctgctctgtaacccttgcttgccctatcctatccttgatctttgcctatttgccctgttcagagacctcttcattcatgaggctacccccggccgtagcagaccctcagaattctcctcctgcctgtcatgatcatttttctccctatgtctctgctcacctgattccttctgcttgg

SEQ ID NO: 1058 - DNA, 4001 bp, Homo sapiens
agatggagatggcatctgtagcttgacctaacctctccagctctctccatacctcttgtttctcttctgccactctagaaatttgactccaagagctactcaatttaactccaagagccttttgatcttcaccttcacctctgagtttattttcatgccccttaaacctaaaaagtagtcttcatcccatgaggacttggccagtgtcttgtccaacccatcaaccctcagcaaagggggctccagaagtgctgatcccaagtcccaatgccacaaaacagaacctggacattacatactaattggaaatgagcctatatatatatatatatatatatatatatatatatatatatacccacacacatacatatatatatacatacatatatatatacacatatatatacacatatatatacatatatacacacatatatatacatatatatatacacacatatatatatacacacacacacatatatatatacacacacacacatatatatatatatatatatatatatatatatatatatatagtgaattggtccccaaacttagtgatacccttccaatgtggaacaaactcttctgtatttcaagagaaaaacaaccaagaatagcaattagccagaaatttgatttttgaggaaattccttatggaaaaaaagtgacacaatgtaatgccattattatatagttcttgttaaatagaattcaatcacactgaaagatacattcataaaattaaaccctgctgtaaaatgattactatacaaacaggaaacgtgtcctattacccaacaccagcatttattcagcattcaaaaaatatttatttagtacatactatatgacaggcactaaagatggactttgctacatttaatatgtacataggattatacttttgatgagttttattcacatttctaagaccacaacagtattcttgtgaagtgagaagtctcacatagagacatctaaataatttcaaataaaactacttgctaaataaactatggaaatgtaaaaagaacttaggtcttagttctcaagatttagtttaaactatcgtaccttttcttccccatttccaagattctaagccacctttttcccaatatacacataagattccctcaggaaataactaatattctaagtaaactacaaataatatgtgtaaatctgtatatgaacaaattgatgacaggactaaccacagcatgaaaccaaagtaaacataaattaccagaatctaaatgcaatggaatttatagatacacatgttgatcaatttttacattgccagaagtaacacatcgcaaataaaagcctgatgtaacatgcctgttgtataaaacatgaccgaattaacgtgcaatttatttcagtgttgcaaggtcatggaaaaaattccagcaactaaccctctgttggaaccacccaatgagtttaattatagactttcatataatgaagactccttacatcaaatacttgcttggaaatctactcagcctactctagaaaatttgaaaacaaataaggtacttgattattgcaaagatactcacagtagaaatccctttttgctcgtgggttcatcatttggtgatgttttcatcaggagtcatcatgcttttgatctttaatgccgttcttcctccaaggtttcttgtccgtaatttccaaaacagagtcacttgtactaacaagccatcgtcccatactgtttcctttttgtgtgtgaatgttaccctgtagatcagtttcctgtacaaaaacactcaaaacgaacaaacgctgctgtatgcaagtgaaatgtgctactcaaatcctctgtttttacagtctggttcaggaagaaattccctgattaaaatgaggaactatatcccagttgttccagagaatttaaaagacagaagtttcttccttatgaatgagcatatcaaagttgccagcgtcacttattctcacaagtttgtggctcaagcatttacacacgaagcatccacgcactgtgtgaaggctaaagaccctcccaactgccacagtaacaatatcccaactatattttcaaatcaggcttagtatgctttgaagtacataatgttttccattcccaaaaggacaaagagatctgcattgtcaaaagtttatttttaagctcatgtgcttgctaagtgcagtggcaaaccggcttggctttccgtgcctgtagaaccattgctggaacctattaatgcaaacagatgaatcgttggctgcgttccatataggcttttattttttatcttaccttatctaaattgcatcgataataatttcttaaatcagaaatgttatcagatttctgagcatgcttgttttatgattgtagaagccatgtaaaaaagtcaaataagaggaaagttttaaatagtttttgctgagataagaaagttagtaattagaggtagatgctgcctctggaagaagtttaagggacatttggagacagtaaaaatgacaacaaatcttaaggagtgaaaaatgaataaaagagaagagaagagaaaaggagagacagcaaaagtgagagcaacagagagagagagaggccttgactattagcaataatttttcacatatttccttattgttgctctggtttgtataaccccctaccagtctgctgaacccaccaaatttagcccacatgtcatctaatatcaggctaagacttgtggaaacacattattgctctattaaagccataacaaaatacagctgaacattaggtagtggggtagtcctgaagtaacacaatctgtatgatggaatttctagccccaattttaaacatctggttttgatatggtaataaatgtgataatgtacattaaataccagtgttcaagtaacataatccttccatctgactgaaataatgaatacttttcagatcatatgagaaacagacacttatttttgtgcacatgcaaaaaatggccctcccatgggcacacactcatgtgcgcgcacacacacacacacacacacacagcaatagcacataaactgtcagctgtttttttccagtaataagtttttactaggcccttcctatgccctcttttctggatatccctttactcaattgcactaatctgtaggaaatttggctgagattgagaggaatggaaagagaattgaaaaataataatatgatgtggaccagacagagatgtgaacccctgacctttgcctcatcagtactatctcacactataatctgaagtactcagtcactggcaacctgaaaaagaaactaaatcaaattatccttctcctgttataacttcatgggagtttctgtattgtaaatccaaatattaccataatataagacatcaagtaatgcagcgctataaatggtgctagagtccggaagttaagatcgctttaaattagcaccttagaattgggccaactgatggaaaagtactattccatgagcatttgttgaccttttatatttgtacatgagaaggctgacagagggacttgaaggacagagaaagtgtgtggaagctgctgagacaacagtcatgtcgggaatgacaaatggtagattagtatttggttgagagataaggatgaggctaatgttgattgagggctcctgtgttacaaaaagggaaaaggttttgtagtggtgtattgcacaatccatctctatttatcaaacatctactatgccccaggcactgtgttaagaatgcaacgttgtgtgttaaatgcaataatataaatatgtgcaaagtagggaaatagcaaagatgagggaggagttaattacatttggcaagattaagggtgagttttagctggacttgggagagaaactggaattttacaagcagaggacaggtgatagaacattacaggtcgcggagttagcgtatgcaatagtgagatgagtgaaatggcaaaattattctca

SEQ ID NO: 1059 - DNA, 4001 bp, Homo sapiens
tatcgtgtatataatatagattataaaatgataatcttatctaaaacacactttcaggtaagtatataagaaatctccatggaattgcactcaaataccctacaggcatctgaaattacttcagtatgagaagctaataaaaaatgccagttttcacatggctacctaccctgccctcttacctaacactgtgagttaattgtaggctaccatagttttaattcataaaatacatctgtaattccccatcaaaaagaagctttgcaaacaaagatatttaaaacactagacctaagtagtgttgtaaaatgatggcagaaggcaggatcctcagtcagcaaagctccaaatggatctgatttggaagagatgaaattagagctgtgatgaggtttctgtacccatggctccaagtggagattccatgtacatatagcttattacagcaatttcctaaggttcaacctactacacagaggaatgcacatgtttctctcctgatacattcacctgttccaaataaagccacaagctagtagatacctttaaaatatttataaagacaccttcactcaaaattagcactgggcatgtgtttaatgctataattaaaaaaaactgttaaaatggaagtgctgataatagctaaaatcactataatctgcagactccccacaacctcctagctgcttagtgagtctgagtgaaaaacaaaagtcataatttaaaatttagccatctttggaacaaaaacaacaaaaaaatcacatagaagttccacaattatctctctaaatgaagatttccaagtctctcctcctcagatctctgtgctctcctatttgtgatttttcacatcagtggtttacactctgcagaaccagaaagcactaagactgtttaccttgatggcaccaaatcccaatctgaaattccattaagacattgccacatggccattatatgctttttggggaaaggggcaggtatttttaagagtgtgtgtgtgtgtgtgtgtgtgtgtgtgtgtgtgtgcattaacctaatacatttccagaaggagtttaattcttttaagctgttgccttattttttaattagcagaaatatatgtaatgtacatttggcagacagaatggacagaaactgatgaaataccaaaataatatttttaaaaaataaaagcagacttttatctttaatacagggaacctcttggtttccacctccacgccatttgatgtatgatcagggagagaagctgccccttccacacacactcagcaccgtcactacccactcccctcccccagctcatcacagtcttctgttaatcccggtcttctgttctcacccagatatgtcttcgctccagcggcgactgaccactgaatagcagcggaagcaagcttttttcagcaccactgcctgtcccaccaggcaatgggcaacaagtgtgaccggggtcaccatgagtcctgcctgccggctactcccaagggctgaccctccttctccatgggaaactcccccaaggtgttccaaacccatacctcaggcagatgcaaaaaccccgggcaccggcgggagaggggggagaagcggcgtggagaggatctggcaagggtttgcctccaaatccagattatgacccaacactttggacgcgaagcgaagatgggaaacggccgcttgctgagagggggcatttgcagtcctcccagaaaaggctggggcaggagagcgtgcggccagaggggtgggggtaccggagggggggtctcacctcctgctctatagccgggtctctcccgcgaggcgctgggaagcatgaggcatgcagcattcaaaatgttttttgaaaaagacggacttgaagcttttttttacaaacacgccattgtactcacttcttattcagagacgggctgcgcgctccgagctgcacgggcaggcattttccccggctttgttttacaaggtggggagagcggggctggacgcgggagggggcgggggggggagcgtgagaagaaacgaaatcgcgggaaggaggggacaccggcgggctgggcagagggcgaggcggaggccaagttgggcttgggcgccgccgcccccgcgcgcgcctgctgccgggcccgggtcacccggagagcgcgggcgacccgggtcccgcgcctgcccgccgccgccgccgccgccgccgccgccacgcgctcagccccgggctgctcgctggcccggccccggcacggcgcggcgcgggggcggtgggtgcagccccagctgccgtgcgccccggcgtctttgtgcgcgagcctcgttcagcccctcttcgcatgtctttgtgtgtctccccccgcaatgccctccgtgccccgcggggggtgtgtggcacggtccgggcgcccgcagctctgcagccctccgctgctctcccttcccggctcgctcctgtcgccccttgccggctcgtttccctcctttcggaactccctcctcttcgcctcctccccctcctgtctcaccgccagggcttgcttccccgcacctcctcctagccctacccttgcctgcgtcgcccctgcaagatgctcccttctaaagatcctctcttccctcttcctgggggcacaaccccttggctcacctgctgcctcctcccctctcagccccttccactaacccccatccccaccccgcaaaatcctcactctcgctgtctggcatccacatcacactgcgctgcatcctatctccttcccgaccagcgttcggggtgtgggaccgggtgtgggaccaagctctgggacgcgagtccttggacccctgcactagggcgtcctcctcgccctcgtggccccccagacctgtacagggaagtgtccccgttggcgccttgagagccctggagtaggggaggtaatgaagaccctggcttcttccagtctacaccttcgggaagggttaaggagtcaccagctcgccccacttcacctccggcggtgctggacatgagctgggcgctataatctgcagaacgtccgggaccgaaaaggatggggaacgcacctggagccagggcgaagacatctagagatgcaaagggaatggaagaaaacccggttaggttctctcagagcaagacccctttgctggaaacataggtttctaagcgcggtgggtgggagcagcagggtgggagaactcagactccagcctgaacttagcgctccccgacctcctccccatcaggatccgtatttggcaggtaccagaccccgcccaaactccaagaccccggcgtagggacagccaaactcgcagcgacagggggacggaacggaacccaccaaggaggggaagaaagccaggagatcagacgttgctgtcgtcgtaataggcgaattctctaacaacacacgtgatgtagtggaacttcaatccgtttctaaactctcttccttcccactttctcagcgggaatcccctgatgacctccaccctcccatcccaactgctgtttgctagagtttttcttccataactgctgctcggccagattggagtattttcccagttacaagaacttcttagtgaaaaatatagacgtaattgtaggggaaaaaaagcttgtaaatcttttgcaaaactgttaccgtcaatgataaaaatgcaattttttctagattccagaatacattcagcacctctttcccctattaaaaaaaaatcttcctaatatccttcctgctggaattcaaacacatttttctcaacttatgtgctcaaaagtaatacaatcagatgtcctttctaaaatgtgaatctgatcctctcacaatccttacaaagtctctaggtcacctataatgtgcttcctgatctggctaaatctttttcattctaagtcttcctgggcagttaccttccctcagtgcacacaccacacacacaccaactttacatgactaaggtattttatcagtaaggttctc

SEQ ID NO: 1060 - DNA, 4001 bp, Homo sapiens
gagatgtttacgaagcagcagcaggtttattctgagtcctctctcctgagggaaaggaccactgatttcctccacctatatttttaccccatgccctcaggagacccaggtcatggatggttttctattttgcccgagactctctgagaagaggagggaaacagaaacttgggaagagatggagaagacagggagagaagggacttgggcaatggtacggaatccccaccccccacccagacatttatttcttttttatcctcaggaaaatggagtggagcagggaggggaggaaagaaggggaagtcgcaggaactggcaaacacatgaaggcggagtgtaattaattggtgcgttaagctgctgggttatgctttagtacgagtgagccaggaggaaaagcgatttctcagaagggattattgaatcctccctaacagagagtctgcaaattagacacagtgtgtggggatgtcccctaccccccagaggaagctaggaatgaattctcccgggatcaagaaggaaaaccacgggaagttagagtgttgaatataactgagcaagcgcctctcaccaccaccaccacctctctctcccagtctccctcccaatctctcaatctctctctctctctctctctctctctctctctctcaatctctctctctcacaatccccctctctcaatccctctcttgctacctacatattccttttgttcaaggtataaagagaaaccacagcccctacctttgagtacaaaccccaagagagctcggtctctatcaccataacaacaattccaaacatcccaaaaatcagagcatagtcactcagtcgctttctcttttcaaacagggccctcctgtgtcccagcttatagccaatgttttggtttttccgcttgttggctttggggaaggtggtgctgctggcggtggtgccggcatgctggtggttgtgggtggcattagggtgatggagcagggtctggtgggcatggttgtcctcccgggaggagatgacgatctccggggggttgctagggctgaaaagctggaggggttggccctcagtctcggcctcgatgaggttcctccgggaggcgctgaggcggctgaggggcttcatgaccccaccgctatacttgcaggagctcatggcgatctccgtgaaggggttgctgtcccgccggtgcaccagggggctggcctgtcggtgccggctgcctccgccaggcccacttgtagctgtggaacttggagagtggccaagcaagtggtcattgagattgagctggctgccttgcctggaggaagggtggaggatggcggtggagttggacgaagggggggccctgaaagcggtgggagaggagtgcagcaggccagggtggacgggctggctctggagttgggcgagctgagacaggggatgcggtggctgctgctgctgctgctgctgctgctgctgctgctgctgctgaagctgcggaggctgaggctgcagcgagggtcccaggggctgctggggggctgctggtggcgctggcggtggtggctgctgctgctgttgctgctgctgctgctgctgctgctcatccccagaggatggacaggggcacttggggtcttcatccaagtcccccacccccgagtcatggaagtgcccagaagtgtccatcttggggcctggctgtattccctgcagcacaagcccccaccccaaagccaccctcgctccaaagatgtcctcaaagaaagccaggcatccaatctcccccaccagtatcttggctccagtcctctctttggcttgcttcggttctctggggctgcctggagtccagacgctgccactcaagaatgcattgtattgggcagggagggagagcaggaggggagcttggagaaagaagagggggtgaaagaactctctcaggaggtggtcctctaggagcgtgtgaggccaggctcagcttcactcctcgctggctcaatagcttcgctcgcctcctcctgccactgttacattgtaagccaagcccacttattagcagctggtctcattggcttggcttaactctccaacctcctcctagctccgccccccgcataggctcctccccagaggaggggcctggcgtcctgggctccggccccagtggcggcgcagcgaggactgggaactgtagtttttgctcccccaccccggagctgagccgctgtcctctttcctctgacaggtatggccacaacccttaagcccacggcgataagggatgttcgctcacgctgggcgatggggaggagggacagagggcctccgaaggaggggaggtgtgcaccctgatgagggggcagacggaggggaaggcaaacatttattaaccaccagggtttacgataggttgtttcacatatattatccggatacagtctccaaacacccaaggaggtgggcagtatggtctcatttacaaagcctgatgcttagaggtgttgagtaacaacgtcaaggtcacagaagcaggggggatccacaccttctaacacccggtggataaactcacctaccattgactgagtgcctacgcctcgtgttcagggtcctctctgttatttccaaccctcacatcaaccccacaaaaatgatgtcatcactctccttttacagatgaaaattggaagaagaagaagaagaaggagaaggagaagaaggagagaaaggaaagtggaaaaaacactcaaacgctcaaacatagatatgtaacttgtcagatgtcatcccgcttgtaattaaagatgctgggatttgaacttagtcagtctgaccccacagatcagatactttctcccaggatgcatttccactatgatattcagtacaaagtggttgttcaataaatattgttcaaatgttagttggggaaaacaaaagagaagctgctgaggaagaactggcctctccaaagcagggtgtgtgaagtggaccatggctccagccccttccctaacagctgggtgtgtagtcacagggggatctggcaggaagactgaagattcccccatggtcattccctgcctgatttgccccatggggctctgagagtcagaactaggaacagctgctggcttcccaggttcagaaccatcatcatcaagtatttattaagcccccactgtgtgcagagggggttccaaaggatgggaccagagctgaattcattttcatttctaaccacagcagccttaggaatcagaaaggaagtcaccatgagggaattccccagaacacctggggttttaaaaggcaggcctcttcctctctggctcttgattccccatcaccctttggcctctgtccagctccctccctcgatgggaagaggaaagggtaggagatccatgcacacatacacagacacacatccagaaaacatgtaagcaggtggacatatgtgcacatgtgtacatggttgtgtgcacacactagcccatgcatgcacacatgcacacatatacacataggaagctcctaaaacagcattcctgactggtaagcagcaagtgtccagatcagggagggacagagcccccccaaaatgagcccagagtcccctctgtatatcagttctcacctctccaatcccccattaaccctgatgattgagagctaaatattacttgtaatacaagccacgaccccagatacgtgacaattactcttgcacaataatcttgattctggccaggcatggtggctcatgcctataatcccagcactttgggagcccaaggcaggagggttgattgaagtcaggagttcgagaccagcctggacaacatagcaagacccagactctacaaaattttttaaattagctggacatggtggcgagtgcctgtagtccagctacccaggaggctgagggaggaggactgcttgagcccaagagtttgaggctgcagtgagctgtgatagcgccactgcacttc

SEQ ID NO: 1061 - DNA, 4001 bp, Homo sapiens
tcctgaataagacccggtgttgctttggagtcattcttacggaaggaaaaataagttcccatgtaatgagagcggtgccttcccccaagctgctgtggacacaggctttctttctatatgatcccgtccacccaccaggaaaccctcatgactcaactccatcctagacttgctctcagcttgcatcaatttcatttcactcttaagggatctttccatcgctggcacatagtgtgcaccccgtcaggtgtcttctgccaaaatgccctcccaccaggctcagcaccattactctcccagagcaggggaaagcatcttggcagagcttaacaccaggtccagcccagagcaggaggggctgggaaccatgggcccagctgtgagggaccttgcatgatcccaaggccactgagctctcagaagaaacaaccaaggtaaaacccaccattgcccagcatggacaagagccccctgggtgacagctctggcccacgttgaattcttcacctctccacccacaagaggaattaaaataccacctcccaaataaaggggccgctgcgcaaggccacacagccaaatagccaggatttgaatccaggtctatggggaaagcctgtgctctcttaggaagagttggtggagaacaacacatctggctggggagagacccccctggagtctgtaaggcacagattctctgcactcctgccgcctggagcagggcttgccacacagtgggtgttcaggatatgtttccagaagagggatgggagaaacaaaaagagaggaagaactaaaaccaggaattccaggattccagctatgcccctgccactaacaatgctgagtagcctcggacaagtcatgtaacttttttttttttttttttgagacaaggtgtcactatgttgcccaggctggtcttgaggtcctggactcaaccgatcctcccgcctcagcctcccaaagtgctggattacaggtgtgagccaccgcataacttctatgggccttggggtcctataaggaggaggatggtcctttccctgccttcctcacagggctgggaggcatatgcagggatcttgcccacccaggctagcacacctggctggcctacagagcttggccatctagggcaggtatggtgcccccctgaggaggcctcccctgcatcctccaccaatgccatccagctctgagccctccaaaggcggtggctcaaccctgagcaacatgcctaccccaagccctcaccttgggagaaggtaacatcacccatgcaggcagctccggccattcccatgtatgggagatttttggggagccaacatcttacccactggaagccagaaaagaaagaaaatagctaaactccaattcgttaaaatcagaaatctcaaaaggggttttgctctgcaaaaatcgctgctagtggaagcttgcgaggaggcaggctgatgccaactcaggcaaaggggctaggaggagccaccacttgctggcagcccaggagcacccacagccaggctggccacttgaccaaccactagcaagtgtcatcctccccaggttagtggatgtcagtctccccacatccattacaaacggggacactgaggctcggagagtttgaggcacagagcttaaggaaaaccaacggtggcagatggaccagaatgagcaagggcagcctctccctgcctccctgcagggccccctcagctcaaagccactgacaggtcagcaaggttcaatggctcaagccaggcaacaggtcatctgcttcctcctccctacctactgggtaacctgggcagggcacccacctttataggtctctccatctataacctgaagcaaaacaccaaacaactgtccttgcagatgtcgcgtggcaggcctggtatcagcaagctctaaggagtaggtgccagctcagtccctgcaaggagtgtcctttaagctgactttcctgttaatttgacactgagcagcactcctgtcctttaagaaaaatgcccaacaagctgactcaaaaataacagatgccaatttgcatattatttcacacatcatttgcatgctgttcatttagtatcatcaaggctctgctcagaatacaactctggttaccctgtgcccagggcttgtgaaacagatatggcttccacaaagggcaagccctgggcacgtccctcccctgcccagctgctcttgctgcctgccccctggcacctggctgggaacgtcacccactgccacagccctggtgctccaagcagggtgaaggggcagaaagaatctttagaattctaggaagcaccctgactcaagtcttgaaggggaaattgtgttctcttgacgacgcatcaggcaagctgtggcaatgcttttcttccctgcttctgtcccaggtcagcttcctagttcggctctccctgtggccctactctctcagcctttttctgcctggtcatcgtgtgtccccctgaccttcctccaggcctctcagcctctggcctggccccacgggtttatttttgttctctctccacctgtccgatttgcatgtccacacccggttagctctgcccagaccacaaattgctaactgagtgtagaataacagggccccatggggtaagaaggctccagaagtccagcccaggccaccactgcagccctgccctccggagaacagcccacttcctttttactcacacagattcacccaacaaggtctatccagaaacatgactggggagcttgtcacggacgggaagccatttggctcatgagaaaaggggcatgttccacacgtgctctccaggcagggacacctgcagacagtggaggggtgacatgggcgcatatgcccctcctgtcttgatgctccaggtggcatcttctaaccaccactctaataaaggcaacagttgccagctgctgagacccagtgtgtggctggctctgtggtggctgctgtgctacagccagtagttgtgattccctcttaacactgaggaaataggctttgggttcagtaagttcccagagcgcccatcactggtgtgccacccaagtttttttttttttttttttttgagatggagtctcactctgttgcccaggctggagtgcagtggcgcgatctcggctcactgcaacctccgcctcccgggttcaagcgattctccagcctcagcctcccaaggagctgggataacaggcgtgagccaccaggtccggctaattttcttatttttagtagagatgaggtttcgccatgttggccaggctggtctcgagctcctgacctcaggtgatccaccctccttggcctctcaaagtgctgcgattacaggtatgagccaccgcgcctggccccaagtccttaactaccaagcctggccacctctaaaaggaaggatatcaggtcttcggggcctgagtgtgcagaactctgcagccctggtggttactgatgctaccaaatattccatccatcactgtgccctcgccctgggcctgtgttcactgcctgcccaaagcctctccagacgagacagtctcctctttcctccctacatgcccctgtgtgcaccacacggcagcaacctgaagctgccctcatgcctgctctattccctacacactctgccccctctccccgggcttctcacactcagaattgagcccctgcccgagcccctcccatcatggcttgtctagtccttcagggaccccccaacctcctacagggaatccacccagcatccccagtctgagtcactgtctccttcctcagtcctcccaagcaccaacaccataaaccaccgtccgcctgggatggatgccatctgggtgctgtctgacacccctaagaacaggactctccggactgtggctgctcatcctcgtgatgaaacatgatctggaatcagattgcgaagcctcggcacaggaagggagttcagctcctgtttttaggccag

SEQ ID NO: 1062 - DNA, 4001 bp, Homo sapiens
ctaaggactgggctactacaaaccgttgaccctgaaccgaagcttgacctcatgtcctgagcaatttcaactctctgccccagcctagcccagctgaggtctctgcacagagtcaaggttgccacccccaacgcacttaatggccgagagagccctgctgtcttccccccctgcccctccctgtgccgcatctttctccccttcacctctgaaattatgtgggcccagttcagatggggcagaggcaggccagcaagcacccgagaaacaggccgaaggacagacccagagacaggtggaaaagacaggtagaggaagagtggacagtcaggtggacaggtggataggcagatgcacagacaggcacccggataactgcacaggccacagatggatggaaacaggcaagcagaaggactgcggacagttaggtggaagggtgagcagactggccaactcgcacacaggtggaaactcaggctggcagagggacagccaggccagcaggagggctgctagacagtcaggtgggcaggcaggtgggccacccaggagaccccagcgccaaagggccctctctggtggcagcaaaaagggattaatagccacacattttccagggaccagaggtctctctctgggcacctctgagcgtcccagcgtcaggcccagcccttcaactgatatctgcggggcctctcatgttcctggctgggccaggccgtaccccaagactgagctctgagctgccaaaattcactcttcacacccaagaggggtcagtgtttttgaaagttgtaggagcctggtgagagggaggagggggccccagcagcgtcagtgtttccaaacctacccctctcctctttctttttcccctggtgcctagagccaggcctggtgctgccagccaacaaggcaggcgagctgggccaagccggcagggtagggcagggcaggcagggcggccgccgttgccactgggaagttgagggtggaggggaagactgagcgaagacacagatcaagtcggacacagcatatgcgagtgtcagggcccagggggcccacagggacccccacacacccacagtcagctgggcaggggtaggaatgagggccgccctggagaggagcacccctgaggggagcccttcatagctcagagctggggagcaggtgacagaagcgtgtgggagccaagggttcctctttgtgtctgggacacagggaggcaggggtggggaagaggaaaagggcgcccactccaggggccccagacttcgccaagcggacttgggggaggcagctggcggtcgggagtacctgggacagaggagcagagattggcggtcaggatggaaataagcagttgcggtgcggggaggtcagaagcgaggtcaagcaggggtcaggcctgggagatcagggcttagggtcgggctcagcgaggggatcagaaaccgggcttaggcctggggggagagagatgagggtcggccctgaggcaggggggtagaaggcggagccagggcggggcggccgtgccccgggaggccaggcttgcgcggggaaacgcggaagggcgcggggtcgcaaactcacatgaagacgtggtagacgaaggcccagccgcggggccgctccagcacgttgtagacccagttctgcaggcggcggtagcgcttgtgcgcggccgaggagcgctggccgcaggcggagcccgagccggagcccggcccagggaggggcgcgcccggcggcagggggctgcccaggaggccgaggcggcgcggggagccgcccccgcccgcctcgccctgttcgctctgcacggccgtgagcgccactagctccgcgcggggggcgtccccgggcgggggacccaggccgaggcggcgcgggggggcctcggccatgggcggcgccgggctgggggcgccggggcccgggcacggtccggggcgggggcgcgctcggggcgctcagagacgcatggctcggacccggggccagaggggcgacccggggcgggcgcgggcggcgggggctaggggccgggccggggccgcgggcgggcgctcggagcctgggggccgccggagcccgcactgacctcccgcttccccggcgactggggctgctctttccgactccaactctcttattacgcgctccatgccgctcgcctttccacctgccaccggcgcgcgccgctcacatgtcaccctcccccgccccgcccctcccccgcccgccccgcggccgccttcccaaatcgggagggagcgagcgagcaagcgaggcgaggcggagggagggaacgcgcggagcaggcggcggggcagggcgcacgggcggccgagttggtgcctgggccgaaccgcgtggcgggggcagcgcgcggggccgggaagccggacgcgtgcaagtggtgtccaccgctgcgtggggcagtgtggccccgaaggccagcccggggtgggacgcctcgtgtgtgcttgtggaaagtggaatgtggagttgtggccgcgggcggcaggggaagggacgcagtgtcccgtggagtttaggtgtagaccggtggaacggcgtctacttgtgtgtgcagggtgggtggctgtgggtctaccaggtgcggggatggagtcagtgaggtgtgagttatgggtcgggtgtgggtggctgcgaaagtggaggtggagtccgaaggggatgaggtgtgtccgttggggtcgagcactgtgtgcctggtgcgggtgcttaaagtgtgcccagtgctgtgtgtggctgggtgggcagcggcggttgtcctgctcttacctgaaaggcctggagcccacgggctgctaggcagcatcagggtgtgtggaacacagtgggcctgggtgtgtctttctcccaccaactgccacctctgagcttcccttcatcgtgatgggggaagagccaccctgcccagaagaggatcctccccgatggaggggcctgctcccctgccccactcccaggtcagggaactgggtttgggcagatggagtgttgggagatgagctctaagccagccttagaggggacacacaccccctacccaaggcccacagaatcccagccagaaaaggggatactttgtcccagggcattccctctccagctggaaagtttttcttagtccccgacctccatctctctggctgtagggggcagtccctctcctttagccctcctgggccctgcacagggttggtaacttgggtttcccgatcctctttccctcttcctccacggaaagctgcggccacaccagccgctccctccgcaggccctgccccagggtgagccttccgcagcaaactcttcccggttcctccgggaggatctcgagggacgaagccgagcgggaggggcgggggaaggggcgggaaggcgagctcgattctcagctgtcagcaaaggcagcattgatctgctgagcgccagtgagggagggagggaggcagggccgtgggctgcagggatctgtggggtccctaaactgggcttggcaaccggcccacacccctaccccatagtgatcctttcccctctgcctagctgggggtgccctctggggtctgacctgaatctcttctgctgctcctggtccaggtgtgcccagggccagagccgggtgccccagggcaggttatgcccggatcctctactggaagctggggacagtttctggaccccaaggccccactagggatgtggtgcctgggctgagttaacccatcttctctctatgagctgaagatggcacccccaaaatatgcagcactgtcctccctctgtggaactgcctggctggttcttctcaatcatagatcctgggaaatgggactaaggtctaggacatgaaaggtgcacaggaaagcagttgcaagcgccctgggggtgtttctagggggtctttttgaggctcttgttctgtagcagaaatggaatttgaattcaggttg

SEQ ID NO: 1063 - DNA, 4001 bp, Homo sapiens
cttattttagtagtaaatgtggcctgctttttaagttaaagttgggctagcataaccttttaatagaacataaaattttaaccattctgcaaaacttttttaatatggcactgatccatttaggcagtgttcaactaaccaaaattcttaattactaaaatatttctgcagcatccttagaaaaatgagggcaaccacatgaaaattaacatattggatatgatatttaaaacaaacaaacaacaataccatcactataaccaaagtatgtgctttatgtgtttaatctatctcacactttctacaaagaggatttctattctatataatgatcctgaggtcctgaactaaatatacattcagtcactaggaacaccatgctacacttactaagccatttaaccaggctaatgcagtttatctaaatgtcaatttgtattacaaattcacttaaaaattattttctttatcttcagtttacccaaacactttacaagaatactgagaaattggtattacttctttaaatttttagccaatatgtgtggttttgcctaaaaaagagattgaaccaaaatatcctctacaaaacatccatctcctttcaaattactaatatgagaccaaacaagatgcccataattgatgctcaagataaaatcctcagtgtgtagagacaggagttggtattgggagctgaaaaggtgaagaaaagaaatagagtgtattggtcagtggtgaatgaggaggggattttggattggaccaataatggatcttttatataactaaaatagcacatcaatactaaactaaacttcaatgaaacatttcaattgagttgagaacctagttagtatacatgtattattttaaaacaaagaaatgtggcatgtgatatatgggatgactattccagaaaatactaaattcgctgaaatacaaaatgtgcttgagacagaaatagacagaggaatttcagaagtttgtgcaaagcagtaatgctataaataaaacacatgaacaatattttgctaacaataaatattctagttttgaaacttaattttaattttgagacatatattctgtttcagttaaaaaaatatactagttatgaaaaggttgtatcatgttatacaaacatcattattcataatggtcagagtcacctgttcaaagtgagtatattgtattaaaaaggttgtcattttcactaactacctgttacatatttaaaccaattgtctacttaaaactccaaaatgtttaaacagcataaaatttccagtgccaagtagatacctactcaagacaacacagacaaggaggaggtaaatagactcaggagattttaagtttctaatgtgctttttcaaacaacttgcatgcaattttgagtttgattaaccacacctaaggaaaaaatgcaaattttctggaaatgatattgcataccatttgggtgtattgtacctctgataccagccttatacacatcctagaaaagcacagatagacaaaagaataagcaccaaatgaatgcaataaataccttgcaagaataagaaaagtgtaaagaaaaagagttccttatctatagcaacagttatatagagtcaaaatggagagacaaatcagagtctcttttactccctcccccagcctagtctccctctctggctccgttttccttttctccctcctttccccacttcggccctcccatttccgtctctttttcagcaatatttacagaacaatcctccaccacaccactcacctgtcgtcgttttgccatccttggtcccctagcagcaaatctcgaaacctgtacctgggaggcagagggggcacttcgctctccaaatcaaccatccttcctcaaagagtgggaaacatcaaacaacaaatggaggagaggagggagaaagaaagaaaatattgcggagtacagggagaggactaacaagacgctgtggccgagagagggatgggagaaggggaaggggacagggagggggagggggtccgcttggagccggaagctaaggcttgaaagggggctggctcctctttcccgagggtgtaatggggatgatgcaaacccaacccaggagcaaaagtctggctctgacaagaatcaacgctgccaaggaaccgcccccaggctcggcaccgcctctggtccccaggactagggggaggcgggtataaaaagttacttcgccgaaaaagacgcgcggtgcctagaaagaggggagaggggtgggagtgagcgccgcttgatggtgaagcactttccttaaaggcagttgccagatcctcccagagggcagcctcccggctactgttccctcgggcgggcttgcatccggcacagccctgagctggcgggaatcgggggcggtgggtttcggccccagacgcggccaacccggctctccccgcaatctccctgtggagatggagctggaggcccagccaatgagactccccctcattagcatagcacagtgacggcacgggggtgccttggggacaaccaatgggggcgagctaattagcggattgcggggctccagacccttctctgggaggaggggggccagggtgcttggagtgttccactatgccacgagctccctcgctttgattgccttcagtccaggtgggcgggatgaaaaaattgcacgtttctggaaagggaatccccactctcagccccaggaaaatcccatttttttctcacattctgaaagaagggaggtgtttccctgaactcggggaaaaagaagggccaccttaggccgctgaagagaagcatttagatgacagggaaagcacatggaaacgcactgaggattttacagtggtgagttgctgttactgctgtcgctgctactagcagcgttgtgggcttccaggtggcctggcctcagccttcggtcccctcctattagtggttcacacggaggaagaagtgagcccgagagaacagggtctgtttttcagtaagaaccactgcttacatgaaccctgctacacaagctatggttctatttgcgcttaccgttctttccttcaaaaactgattgcatcagagtatatacagaccgaataccaaccacctgacagcctgggccggaggataaccatatggcttctcctgcccttacttaagaaccgctctgtgtggaggaacaagcttgttccttgataaatggatacgatgtgagagacaataatcaaagaacatacagagggatttggaaatacctgtgaggtacacatacttcttcgaggtgggggtcaaggaagacattgaaaatgaaccaagccttctatattcgttcgcagcctactttagggaaaagagcaaaggtgaagcaagcagagagaatagtatgagtagaggcatagggattttttagaatatttggcttatccagaaaatagtgattaatttggcatgattaatgctcagtagaggtcatgtagcagagggtttatttaagaagctagaaatgaaggaagaaattaccaaaacttgtaacatcaaatgaaatacaatgactactgaaacctgaagaatagcagttgaaataaaagtcatactgtttgtctctgtcttcaaaatcctactcatccttccagacccatctcaaattacatatcctccattagatttcttggtttttccagcttcttatgatgtcttcttcctttgaacccctttgtttgaacccttcataacccatgtgagtattttgcctggaatgcttactataacctgacccgctatacgattatctgtgcgtttttctttcaactcttcccctctccctgtggcttagctgcctctagcacgggaccttcaaaatagccacatttcaacaaataggtgtggagttgcattaaaagctattaaatctaggaaattaagcatgtttttttccatccatgcttgcactcctgtggtatgtgtttgtttatgaaat

SEQ ID NO: 1064 - DNA, 4001 bp, Homo sapiens
aattccagcactttgggaagccgaggcgggagcatcacgaggtcaggagatcaagaccatcctggtcaacgtagttaaacctcgtctctactaaaaatgcaaaaattacccgggcgtggtggcgcgcgcctgtgacccagctactcgggatgctgaggcaggagaatcgcttgaaactgggaggcagaggctgcagtgagccgagatcgcgccactgcactccagccaggcgacagagcaagactccgtctcaaaaaaaaaaaaaaagaaaattaaagaaaagaaatacattaactatcaatagcaagtagaaaccagtgtagggattgtaaatgattatactgctactcttcagtataatcaacacacattgcaggcctcctctttaggggtattccacaagttaccaaacttccaatattttaacgtgattttaggaaaaactccatttcttacattaggagacataaatctccataagactggtttctatacaactgcaataacgttgtaaattatctaagttttgatttgggggaagaggaaaaaccctaagaacgaagtaccatggttttctgtgttaaattctagaaagctatcaaatgtttaggattaaagcactacagtagacattttttatcactatggttctaagacattaaaatacttttaaaatgctggttgaaaatcatattctcaagcacagaaaaattaactgtattccagagcatttccttgtttatctccttaccaagcctaaaactcaactaatccttctttcaaacagctggcaaactcccttttctgagaggagtgactcataagttataggaaatccacaaaaactacgattttttcccccaacaaacttaataacaggcacagaaggggcgggggggggggggggcggaaggccagaaagagaacagacagagaagagcattcagtctgtttactccaagggcgtcacaccgtgccaatatccagagcttcctaaaagcaaatgttcaaactgcagtttctggacacactgtcctagaagttgaacagatccttcaagcccatgcaccaagaaattctgaaaataaataactaggtactgcaaacctactgcactcccatcacagaaatctttcaaattacaaatcccctaattaggcgcggaaaagaacaccgcactcttccctaagaaaaccgacacctcgttgaccaaagagaaaggaaagcaagttcatctccaacatccaaaccacaaagccaggtttctactaaataaagtcctcaaatacactctaatctgagatgaggtaaggaaggctgtgtaatggttctccttgcctgttgggaggggcaaaggttggcattctaggacagcagctactctgccacatgggcctggtcctcggtaattccaagcgtcccttctgcctctcccttcccagagcagatgcttcaccagctccaaaatccgcccgacgttcttgccgcctggaggcccccacgttcccctccaggcttggcctcccacgctcgccctcgttcctgcgactctcggtccccgtcgacaccaaaggaggaggccgccaaggcatccccgctgcaagcccgctacccgccgactcacctggtcccccctacgttcagttggacgatctcgccgctgccggccgccgccgcggggaagctgccgcagtgccctcccgccatctccggcggctccggacgcgctcgccgccctccttccccagccgggaccgccgagcccggggctgtagcccgaggcagcggcgacggctgcagggccagcggggcggcggcggccggagggcggggggtgcacggggcttcccccaccttcccggcggccgggcggggctcgctagcttctgccccttcccgggtcaatcctgcggtgcacaagggcggcccggcctccacctttcgcggcctccaggccgccgggccgcccgggcctcttctccgtgctccgctgccaccgacgccgccgcagcctgcctgggaggaggggtcaccgttcgggacaaaataccgcagcgctcacgcttcgcccgccactgccgcctagaatgaggaggaggaggaggaaggaaaggtcagggaggagcttcccaacgccgcggggctggcgcgtagggaggctaggggaatgtgctcctggccagccgcctgcccacgcgggattccatttcgttcctcctccccacgcgatcccagcccctttcccttttacatttcagattttctaaaacgaggaagctgattcgcagattgagggcagatctgggcaaacgatctacggatctttatgacccactttgtcaacatggattgggaaaggaaaaactaatcctagaggtagtaaaagttgatgcctaaatgtagacagtgcaaatgcagggaacatttggagattttaaaaccttacagcgtttaccccagaaaactgcttactttaccctcttcaatttaatccccaatctcccaagcagtttttttgttttgttttttgcttttgtttgttaagcaggaaggaaaccaaaggacaaaaacccctagactgtgtaatgcccagcaacctatttctggaatatagtaagcactcaactaatgttagacacacgcagaaaacacacaattttatgcgcttgtttatttatttgtttttgctttaaacggtatctattcaaacccaaaaccttagtggctattaaaatattttttaaatcggaatactataatacttgatgccctgctaacaaagactaacaaagatagtgcgttatgtttcagaggtcattagtttgtggtactaaattcttaacatgaattgttttgtcatagttgtatcataataattcaaactgataatgtatctgatgttaagtttttattgtcattgtcataatttttaccaaaaaaataaaaaatagcctctggcaagcatactaatgttgtgatatgctctatctagattcgacttgaaagatgttaatagtacatatggatgtaagataagtattatttctcccagttgatgataagcttaataatagctaatttgtgtttatcatatacccggtggtttagatattttgtcatctttcttcgtcacaactaatgttataattatttttaaaaaaggaaatttgggaatgaaaatgatcaaaaaaacttgctcaaaattacataggtagcaagtgggatggcaggaatttcaaggcaagcagcttgaattcaaggccactgttcaccatccttaccactgcattgtacctcattatcttcactttagacagggaagatgagtaacagttcagattaaagcagcagcaactaggaatctaaaccagggtgtccaatcttttggctttcctgggccacattggaagatgaattgtctttggccacacataaaatacactaacactaacgataactgatgagctgaaaaaaagaaagaaagaaagaaagaaagtttatgaatttgtgttgggccacattcaaagctttcctgggctgcatgcgacccatggggctgcaggttggacaagcttgctttaaacaatgttaactgcctttgccctaacacataatatctggttctatcaggatctgaaactttgctttaaaatttgcagcgaagatttaagtggtaaaagggccatttaattttccttaggtccaaaccttggaagaatatgaaagaatagttgctaacagcctttgaatccaagaggcaagttggagttagaataaggccttataaatttaaaaatatatatatttgtgaaaggcttcttatttttcctgaaataaatgaaaccgtgttcattttattatactgtacttaaaaattaggagaacatctcttcaagagaaggaaaagttctcagtattttataagacaaatggtcatgacttcttgatatgtccagaacaatatagagatatctgaggcatttcttgctcataaaacttaa

SEQ ID NO: 1065 - DNA, 4001 bp, Homo sapiens
gcgtgagccaccgcgcccggcctagctgttctaaattctatggataaagtgataaaacagacaaaatccctcaacctcaggagtttacaatccagtgagagttgattattgatggcttacactgttctaagtacttcagacataataaccaattaattttcacaaccctctttgtaatattattacctgtattattatactaaagcacagacaggttaaataagttgtccaaagccatacatctatctgtacacaattggcctggccccagactcttatccactaccccatcccatctattacttgggagaaaagaggcagtcaaagctgccagctccatggaccagcgtgtgcccagagagagcccatgttgggagccctgtcttccaggctcaagccttcaggagagtggacagatctacagttaaccatgctgagctcggaagtacgtggggctcctgaggatggactggctattgtcttctccccaacctccaaagctttaggactctctattattgattaaattaatacaacgaggtgcccagcgttgtgctaaatgctgagaaaacagcagtgaatgggccagaggactttcaccttatttgactctcacaattgctctgaaaataagtagtatatctccatttcacagatcaggaatctgaagctcagaaaggtgaagtgactggcccagagacacctagcaagagagggctggagtaagatttgcactgtggcccgccaggctctgaagcctgcgtactttgtgtgtgccacacatctccagcggtggtgggatgagaagagaagacctgggataaggacaatgcctgcctcagttccccacttccctccagccattgaaccctcctgaagtcaaactcaggcagtttcttccaggctgtatctccccgaccctgctgccaccgccccgccaccaccccgcccaatcctaggaacctggtcacttggtttagtgaggggagactccctgtccctattgtggcttgaggcaagattcttaacctcactttcctcatctttaaataaggagagactagtatcttcatgccccgccaatcccgtgagatttaaatgaaatattgagtgcagggggcttcccgcagtggccttgcccatgggaggggctaggtcactaggcgatctaaggcaccgcaaggatgttcccgggggtcagagggtcccggcccgccctccctggatttctcgttgatgctttcctcttcccccttagtcccgcgaacacacacacacactcaagggtctatgtaccgtcccctcctccgagggtccccaggacaggcccggccgcaccagcctctgcccccagcccagtgccaagcctcggacacccggccggggaggaccaccccagtcctgctcgagaaacagccgtcggctcagtgcaccctcggcctcctgccccaaaggtgcagcccgagagtcccatatccgcgggcagctagtcctggggacaaggaagaaccagatcctggcactgtcccccgggctaccacagcccctacaccaactctgccctcggggcgagcactaccctctccagctgcaagggccctaccccgcgggcggacccagcctccctcccgtcccgacgctgttcctcggggtgagcaccagcgtttgtcccatcccgacgctgccccccggtgagtgcggcccccgcacccagccagtgcagccctaagggcgaacgcggcccctcaccccattctgcgcgcccagcccgggcgcccgctcaggccgctccccagcccggcccgcgcaccccggaagtaggagggtggcccccgaggaaccgggcccgggaccctctcctgtccgggctcagcttcggggggctcccgacaccggcgccgccctggcttgcgcccccctgggcccgcgccgggcttacctgtcccgccaggtgagccgcctccggctcagcccctcccccgccccctcgccgctcacctggggcgcaggtgagcgtctcgcgggagcgctgcacgggccgccgctagggacacacttcctgcctccgcgaagcgctaccgcgcacctggaccgaggccccgccccggggctctgcagagctgcgcgtccccgctcgagtgctcggcccgttcagcctagtccgggtaggtgaggtgtggcggggaggggtcgagaggcgctggggctcagtctcctcttctgttcaacaggctggtggtcctgtcagtctctgagcacctgtggaacttctgcccggccgtaaagctccaactcaaagggaagctctcttctgggaagctttccctgatcctgtctgtttttctgttggttagaacagtccctgtactcagcacactgtcgttttgttgtcttctgtctcctcctttagcctcctaccttgcagggtttggtcttgttcccctgtgttcctggtgctcagcacaggtcctggcacatactaggtgttcaacaaatattttccactgaatgaggccctgggccccaatttctccctttgccctgaggcagaactgggagcctgggccgctgatcagtttaccttttcttttgttcagagaaatctgcaggtaaagacaggaacctcagctctgaggccccgagtagggtagaggagggggaccggatatgcagctctgaaagatacatccaggatcagaagtggtggccaaaatgggccatggtcactacatccaaaaaaggtctctgcaagaggcaacaccattgaatgtcaataaggcaaggctcagactattctgggttactgttccccttaatattaataacaactcaataacttaacaatagcattaataaacaagtgacttggccgggcgcagtggctcatgcctgtaatcccagcactttgggaggccgaggcgggaggatcgcgaggtgggagtttgagaccagcctggccaacatagtgaaacccagtctctactaaaaatacaaaaaattagcctagcatggtagcaagtgcctgtaatcccagctactcgggaggctgaggcaggagaatggcttgaacccagcaggcagaggttgcagtgagccgagatcgcgccattgcactccagcctgggcgacagagcgagactctgtctcaaataaacaaaacaaacaaacaaacaagtgacttttagggagcatctccaggagccatgcatgccgaagccgttaatctgtgaagtgggtcaggtattatcatatccattttacagtaagaggaaactgaagcttagagaggggacattgtttgctcaggcagttggcacaaactgacttttggcaaggcactttccttctctaaacctaatctctggagatagtagtacctctctttaactgggaggattaaaagagatcatggatgcaacaggaagatatcactgggatgcattaggcataggtgttcaatttccaccagagaccctccatcccagcgcctcccaccacatcttgtccacattccctcctgaggaaagtgcacattgtattcttatttggagctcagagaatgagtcacatcctcacttcacagtcacatcttgtgcagttgaacatctgtgtactctaaaacctagcaagtccattcctatggtacagccacagtaagctcttgtgcaatgcaccaggagagaatgtatacaagaatgttactagaaacattgtttgtggtagccccaaaccgaaaacacggaaatgctactgacaggagatagagaaatgtgggatattcatgcaaaggaattaattatagagcagtagaaaatgaatgaaaaatagcaacatggttggatcatggtaatataatattggattgaaaaaaggcaaatctcagaagactacatatggaatgacatcctttatatatgattcaaaaataactagaactactgcatctaagcataatatttggttgaaccatatgaatttgctgttatttgacctgttttgat

SEQ ID NO: 1066 - DNA, 4001 bp, Homo sapiens
cacaggtgatccacccgccttggcctcccaaagtgcagggattacaggagtgagccactgtgcccagccaataaatctgtttttaaaaacatcttatacgtggcttctggccacctgtctattgaaatcgtaaaataacactcttgacttctgccctttatttcatttctgagggctggtgtcaccaacctctgtgcttttctaacccatgctttggtaaaagctccagaaagtcttgcctccaaaacggtctttcatccagcactggttatactttagagagttggctcaagtaggcagataaatatgagagctctcagactgggtaatactcatctcaagaagctccccatacacactgacttggtattcccacttaaaaattatgtagacaattttttcaggcataaattatataatctgcaaatttttatttaaatgttgactacacgcacatatatatccaggttgttttttccaactagaccgaccattaaatctccagaaaaggcccaagtctaaagtctgcgccctaatactgccccagtgccctgcacacagtgtcccatgtggtcctttgtttcaagggctgatgataccctgtaacaacatgaatgtgggaattacattccacttccatcacttatttagctttgtgactttaggcaagttgcttaaattgtgtgcctcagtttactcattcctaaaatagggctagcaatacctgcccgttgatatttaacaacaacaaaaaaaagtaatgttggtgacacgctgaatatagcatctaggacacagacatttgaggcagtcactgtctgtatatactgtttggagtcaaatcttttcttcccatatatttgcattttgactattatttgctctctcaatcagcagcttcctcatctgcaaaattctgcgccaaaagatcgctgagaggattttaaaaaagaaaaaaaaaaagactagaactcctaccacacagcagggttttgctcaaacaaaaacaaaagcaaaaacgaccctttcttttcatctccccggctaaggcgatttcttcagcatcaacctacagccccctcgtgcacccagctgaaacgccatcaatatcgcccaacagcttccagacctatctgtgaacaaacaagtgaggtctccaagaacgccaaccgtaaccccacgtcagggagccattttccagtcaagaaaatgaaaaggtgtgcaagaaagacctaaggaataaaatacccctcccagcaatcatcgatgccccttcccacgtcgctcgggacccagcacaaagaccgcagtcaacaccggcaaagacttttcctttctcaccccacccgtccagctagaggggacgtggcgtgcgcagcgatacaaggggaggtctgagtggtcgcagggcccaagacccggcggcggcgggggagggcggagaagcctcggggaagctcggcaccaggcggtgtcgtttgagggaagggtcgagccttaccttcgcccgcttgcgccggctggtccgacgcccctccggagtctctgctattccagtttccatgggggtcgcagacccaggcacgacagtagggccggcctgaggccctgcggaccccggcggttccgccaggcccccggggggcgaggcccgcggaggctctttcttgcggggtgtgcgctcccccaccgcccccggcccgacctcggctgggcccgacaggcccgcgggctgcgcggccacctcagacccgttctcggagccgcctgctgtcccagggccagcctccgtcccggttgctgccgctgcagccgccgccgccgcggctgccgccttcttcccagataacatctcgggccgccgggccgccgacggccgtaggggccgctcgctctgtcgctccgtgggtccgaaaagccttgcctcgcctcgcttcacgctgcccgcgcgccgccaaccgccgtcgcgtacgcacgcgccaagcgcgctcccgccgcgccgggacaaaaagggtcggagacacccacgagccccgcccctcccccgcagccatagagcggcgttctcgcggctagagtggcaccgcagcaaagaacgtgtagcttgcctagagcgtctccccggcgtttggagtgggacctggcacagtccgtggtcttagggcttctgggccagactaaacctccgaaggtgaccatttcctccagggactttcgggtttgcatgcgtgcgttcgttcattcactcacccaattattcgttaattcaaccagtatttattaatgcttgcctactacgtaacaagggttacattatgaagttctagctttcaaagaacttacagtctaatgggggaaaacactgaaatatgttggtagagcgtcttacttattcataattgccctgcttggactgggcaaaaaacttggagagcacagcagtttcgatggtagtaaaatggagacaagttacgaaatccaggtttgagtccagacggaattgctcttgtctccaagcctttgttcatgcttttccttctggctggaccccaacctcattcgcactccatgtcttgcgcttctcccatcccccatgtcccccatcccccatgtcccccatccttcatgtcccccatccccatccacataacacctctttctactccaggttaattctttctaataatgatagtagcggtttattcttttaatttttcgaggaatcccttgctaacccaaaactggaacaggtcgtgtacttttagcatgcgtgtacttattacacaaacaattgtctttttaatagtctgtctcttcgaagtgaaattgtcaaaaaattattccatttacatgaagttcaagaactggtaaaactaatctccagtaataggctccaatcagcccttgcctgagatgggggtcgggggttgactgcaaaagaacaagaaagaacttgctgggggtgatggaaatgttttatatcttgattagggtgatggttacataggtgtatatatttgtcaaaactctatgaactatccatgtaaaacaggtatgttttatgtaactgtagtacttcagtaaagttgttttttgtaaaaaactaagcaaacagacaaaaaggcaatcaaatgtagaaaggaaaaaaagtaaaagctatgcaagaaagaaaatgtatccgagtggcgtggcacgcacttgtagtaccagctgctcgagagactgaggtgggagaatcacttgagcctaggagttcattcaagtccagcctgagcaacatagtgaaactgcgtttctaaaaaaaaagagaaaagaaaaagaaagaaaatataatcatagtacaacatatggctcagctgtgaactgtattaacatgaccataaaaacgtaagcagtgaatattgttttatttattttttctgttcttttgtttgtttgtttcttctttttttttttgagacagagtcttgctctgttgcccaggctggagtgcaggggtgcaatcttgactcaatgcaacctctgcctcccaagttcaagcgattctcctgcctcagcctccccagtagctgggattacaggcgtgtgccaccatgcctggctaatttttgtatttttagtagaaacagggtttcgccatgttggctaggcttgtctccaactcctgacctcaagtgatcctcccacctcggcctcccaaagtgcagggattacaggtgtgagccaccgcgccccgccgagcagtgaatattgttttaaccaaagtgatagaattacattaagagaatggagaaaaaagaaagtttgtggggagaaagatgagaaggttttaaggatttagggaagtagggaggttgttgggggaggtgctgcttgggagctaaattatttttcaccataaaaatataatacataatgttggccaggcgcggtggctcatgcctgtaatcccagcactttgggaggccgaggcgggcagatcacgaggtcaggagatcaag

SEQ ID NO: 1067 - DNA, 4001 bp, Homo sapiens
ctagggcacagctaaaccagatacctaataaaagttacgtggctacaagataacaaaacttaagggttcaaaagtactttgatattagtaacatgatttaaaagccctttgatattagtaacataattttaaaaccctaaagtgaaactgttctgttgaaactaagatgcagtttcagcagtacttaatgaaatcaagctacagacaagttcagttgcactgtacccagaactcaaaggacaaaatttaaactggcaatacacggaaaacttcataactgattggagaaagcaaaataaatactttgtttttagatgagaacttcagctaagtgggtgcatccccacagctcggtaacgcaatagaccacctcaactgaaaaaagacaaagcatatcaatgaaaataggccattctagaaggaacaccagtatgtcctttcctttacccaccctcctcactgagggtccagcagttccgtaccccctatctggggcccaaaggtatggcggttcagctccaagactctctttgagagttggagagctcagaaaggagaaaagcgcctccaatccaccagaaatctagttacaggcctgggagcagaacacggagcacaactgtgtaaggtaggagagaaggcaaatccagttacccgtatctcctaggcttcctatcaaaaataaggcgtgtttctaaacaggcgcttttcatgaacctggcagaaactttgcatggcaggtatactgttctccctgttttacataccaggaaatttgcccacagcccactcttaagtgcaccttccactgctctatactgcttacatactcatctccacctggactaagtcctctgcaagggcagctccaagtgtggagaaacccgaagtttatttaattttgaagaccctcttaaaaagaaaaatgaatccaaaatatcttacttttgcacattttataaaaacatacaatcatgtgaatacaatgttggggcccttccccgggccttcaaaggggccctaatgggcttcatcagcctctgcccctattcatctttgtatgcctagaacaatgcatggcacagagtaggcaatcggtaactgttgaaaaactgatttcctcaccctcacctcaattgttcatcccttcttcaaccctaggattcccttcccccaaatctgttccctggggaaagctcccgtttcatgacaccttccctcccaatcagtaacaaagcctagagattcaagaacaccggctccgaagtcaaaactctgaatacagatccggtctctgccgtttattagctatgtgaccttggctgtgtgagctgacttgagtctcagtttctccacctgtaaaatggggatcccaaccccctgccctgcagggtcgctgtgattagctcagatgatgcaagcgaagcactaagcactaggcccggtacttacccactcaataaagctagctgttgctaacaaccccctcggactcccgcacccttccctcgcagccgctcccgcgagcatcactccaaaggcagcgcaccctgctccccaccgtccccgaacctcaccgcgcacaggttcggcccctcccggccccgccgccttggcgagtgaagctcggccgcaggaagaagaaaataaggcccagatgacccgcccccctctcccgaggtccattggccttgaagattggaaaggaccaatctcagaacccattctggaagctccttctcctattggccgagaaacatgccgatcactcaccgctggaagacccacccccaccgcccctcccccaccaaaactcacggtcactgctacagcggcaatgatcctcgagaattccaaaaccctatagttctcacctacagcccaaagccccgccagggcttaggctcagctcctgctgtcgccactggccgatcctactgcttttccagcaggcgaaggccgaaactccgcctcctctaaagtcggcatctgcgcagccgtacagagtcaaccaattcaagggtggctgcaagccatacaccagccaatgagcacgcgccgcagccacctcccagtcccgacctcagtgtgctcagcctatgagcgccggctcgggctgttgccgggaggaaacgctgtaccactagggaccgcggccagtgagcctctagctggatcgcgaagctggccaatcataggcgggctcctggtcacccataactaatcagggttgaaagaagctagtacctggaagtgggccggtccggtagatgggtaagggcggtgaggttactataggatgtcgctaacgaaaggataggccaaagttttcttgggatgagtatcctctttgcctaacgtggaaatgtgtcggggcccttaggggcagcttccgagctcagggagtgctgaaaagatgaccgtcttgtcccggtttgtcctgggtgtctcggttttcaaaacaaaatcccgtggccttggaaacccctcattcgctgtcaagcctgaacagggaagggaagctgccctgagggtcattaggacagaccatgagggaggctctccttagggtcattaaaaagcaattcctggccgggcgtggtccctcacgcctgtaatcccagcactttgggaggccgaggcgggcgggtcacctgaagtcggcagtttgagaccgcctgaccaacatggagaaaccccgtctctactcaaaaaaaaaatacaaaattagccgggcgtggtgttgcatgcctgtagtcccagctactccggaggttgaggcaggagaatcgcttgaacccgggaggcggaggttgcggtgggccgagatcgcgccattgcactccaacctgggcaacaagagtgaaactccgtctaaaaaaaaaaaaaaaaaaaaaaaagcagttcctcagtgagcggggatttgggggatcattaggagcagctcttggggcggagaggggggcatcctgggaatcagaagaggcacttctggagggcgagggggcttcctagaagtcattaggagcggttcctgaggggtagtgagtcgccttaaggaattcccagattgtcaagggtagtggggaaggtcaagtaggaaagtaaaatacccacaaccagagtcataaaaaaatatacagaattaccatggatgaataatggggtagtgccctggaaagagctatatggagtcaggcctgtgttcaaaactagtaacttctctgagcctgggagttcacatcaataaaatggaaaaaataatgccttgcaaattttgtaaagatgagagttaatgaatgttggcaaaaagaacatatttcatagaatgctatggaccaatcatgatttatgcctcaggctgggtacatgcctactgaaaaaaaaatctttaaaaaaaatagtttcaaaaacagaaatgactgtttcaaaaagaatggccgttggctacgcagccacaagtctttcacaataggggtttttgcccttacccagtaaggtaatcgacagtattagataatagattatactgagtggctcacaaaagtgccgagtctgaagaatccaacttgcaggacacataaagaaaacccaaatcctgcggtagaattcatccaccactgtctttcctgctgccactaagcacaagatactgcaggttgcttcacagactccactgtcctggacatggatacagtcgctagttactgttactgtgttccataaactggattttgctgtatttcctggtgctgccagatgatttccaagggccctctactgtgtatcactagcttccaattggtatgtgcatgtgataggtggagcctaaatcaagttctcgtgatatgctcccatttttctgaccagttttcctgtttcctttttaagctcacctttccctttgcacactttttgtttgtttgcttgcttttttgtttttttgtttttgagacggagtttcgttcttgttgcccaggcacgatctcggctcactgcca

SEQ ID NO: 1068 - DNA, 4001 bp, Homo sapiens
aaccttggctctaaccagccctgttataacttctgcaggcctctttgcactaagagaaacgtacttcccttaagcagcaagaatcaaccttgcccacttcgctgtaagaaatggatctattttcaaacatttccctcatattcgctggccagttattttctgaagcatgtatttcatctccattttcaaacttgcttaagaaaaactaaagtaggtgtccgtgttttaatttggggcagggaagggttaagaagccttattttcagggatctccctgaaaacagctttccaaaacataacgattacaaacagaatccctacaactcaaaatgtcattacaaaaagcaagcttaagggagaaaggggtgggaaggggtcttcctctacttagaagtgggggtgggggaagagagtggggagaagattcttaaacagcaggaaaggcagttaaacccgcttcccaacggtcccagcccgtccaaccgccgcttaggccaactcggactcagaccctcccgaaaggtgggcaaaaaaaacaggggtgtaggagcgcacccagttccggccacggaggaaggagttggccgggctctcctcagcgaacgttggagccgttacggatggtttcagcaacacccacccctcactcactgcccccaggcccgaggcgctgtagacagggctggaagggctgcggtgggtgactgcctttcagtgcccggagcctgagggccgggggaaacgagcacgaaatcttcggaggtctctccgtctgacgttcccctacaaacacggcctcgcccggaccccatccccaccagcacagcccaggcctccccggggagccgagcggctgagccagaagaagccgggagtgtgcgcgttcgggagcgcgggcgggcatcggggcccaccgccgcccgtcctgcccccgccgccccaaaagtgtcccccagacactaacgccccccacaaacatccgctccggggctggacccgcggctcctccccgcccccagccagcgctggccgcccccttcttgaccccggcccgggggacacctggaggcccggggaccaggcggtggaggggtgccctggtctggagggtggggcgcccaggtgagggccgctccgggccgacgccgccaccacacaaaggaccaggggctcccgccgccatattgaaaactttcctcctcgcacgacaactcgcaagtcccccacccccaccccaccccatcacacacccccgcaccccgggagcggaggcgaggaccagcctgccgagcctcgccgggcccacagtcctccctccagcccgcgcctccgccaggctccgtgaggaaactcccccgcgaccacccccggctcctgccatcactccatccggaaccgaacccgaacctccgcacccggccgcccgagccccgcggcgacccggccctcccatggcaccgccgaagcccccggttctcccacgctcctcatctcccaccctggagaagcccccgtcttcctcccccggcctcaactccgaccttctaggcagccccaaacttgacgaggccggcggggcgaccggctccccgccccccgcgcctcgggcctccccggacccgcgcgtccccgctccctcccccagccacgagctggatccggggtgctggcgtgactcaccggcggcggccgcaccttacagatgccagtctgctcggctatgggccggatcttgtggatgaaagcgaaggggtccgcgaactcttcccagctgggttcgaagaccgggcactcgggtggaggcaggaactcgcccagcgggcccgggcccccgaggggcagcgccgggcgcgggcctgggtgcagtgtggtggccgcctccatcaccgcaggctgggcaagggcgaggcgaaggtgggctccgggaccgaggctgcgagctccgctcggtccgagacccgtgcagacgcggctcgagcaacagcaagtccgagttgtacgggcaacggcagcaccttgggctttttcagcctccgacgacgacgtctcgccgcaagcccacgccgtgcgcctccgccgccacggcgaggaaaaagagtcccaccccacccccatcgacccaccctccgcgcgcggctccccgccccgcccccgaatcgggcggggccgcgccttccgctgtggatggagtttatccttagggtttcagttgagccaacttttattgaccatttactatgtatcagagttcctgccctgaagaagttaagtctggtagaaaggatcagtcccataagccaatcattcaatcacgtcagtacacaatggtaggtgcagtaaaacccaggagggggttttggaaagagtattggaaacggagaaggattttccagtagagataacagcttgaacatacacatagcatgttcatgagaaggcaatagtagtaataataataataacgtaacattttggggcactttcatatcctaggcactgttctaattgcatcgcatgattaatcacacaaccctatgagataggtactcttatttccactttacaataaggaaagtgaggcataggtaggttaagcaatttgccataattcacatggctaataagtgatggagactattgggaggtggagatgttgcagggaaaataatcatccacaaacagtctatgacgaggtcagacttgagaggggcgaaagacttgaaataatccagacaaggaatgataggatctaaattaaggcagtggtgctgataattatgaggaagggatgcaaaggtaggaaataaaattaggacatagtgacagattgaggggggacgacgaggtattaagattcagatgtctggcgtacctgcctgagtagatgctagcccgttggcattgctggaacattcaccccaattatatacagaaggcgagttactcaagggaagaagatactgtgttcatttctggacattttgaatttgaggtgtctctggtacatacaggtagaaatacacaacggggtatccttcaacagactgaagggtataaatctgaaggggcgagatcagaattggagatataaatctgggagttatgtgcttatgggtgatagccgctatttaatgctactgtgtgtaaagcactgctctaaacgctctgcatgtattagctcactgagtcttcacaaccaccatattgagtaggtacgatattatcctcattttgcagagcaggcaacggaggcaaagaggttaacgaactttaagagatacgaacacttttgaggcgccttttttcttttggcgggagacgggggacgggggtgggggggtagtgtccagcagcctcagaaaaaaggaggaagctcaaaaagtagaacgtcaacattgaaatgacctctttcatccagaaagctgccaaacgtatgcaaggaatgtttgtcaagatcttagttcgctttcagattcacctagtggaaggaaatctcttatgcttaagaagtcttcaattaaaaggggggatgggcgtggggggagaagaaaaccgccttcccttcaacaaatttttcccagaggtaccgggcccaggaaagagttcacagtggtcctgggagaacgtattccttttcttagctctccagggctttgggacctggagtcttttcctgctccctactgcaatggagagtcaagcccaggggacagctaatacactattaaaagaattatcagtgcaagatagatatgcgatgtggcaagttataatagaatctaggtagtgggtatagaggaatttgatgcaaatttcttttaactttactgaatatttaataatactaaataaaagttgggtagaagaattatcgtcgatggctctttggtgcgcattctgggcctccgagggtcttgatgaagctcatgtagtgtcatgtgctctctcgggagagcgttgactattttcactcctaacgttggcatcctacgagccaggta

SEQ ID NO: 1069 - DNA, 4001 bp, Homo sapiens
tctccaatttcagttgggtttaaaaaaaatacatccagaaagcccaagttaaaaataaagagcactctcttagttaagcagtgaggggagactgaaaattaaaagtaacttttaaggatcaacagtttttgacagttatcttaagaaagcataaaagatgaacaccacactggtaaagatcccttaccttacagtgttgggagacagagaacaaagggagggagataatattttcataatgaactgtccattatattaaccttgccaaagagtccaactactcattcagtgttgaaggatgtgaatttttacttgcttagtaaaatttaggtatcataaaaaatattaaaataatattttaactagaagcgaaagtcagacagctttagggaaaaatcagagcgactaggtgattggccagtgctgatgaggaaaagagcgctaacctacagaacaaagactctcatttctaatctatttcactactgaatcaaaaatgtaaaaaacagcaacaaaaaggccaagcctttcagtacaagcatcatgcaacttctctcaatttctgtccatctcgttgggaaacgtcatgtgaactacgcgggagtccctatcgtcccatttcactgtctctagggttacttcactccttcaacgacagtgaacacacggtgtaaaatggctcagtagcaattcttattttatcagccttagtcggaaatctgattcggaaacctcaagctccgatccacataaatcgctccttcctcccagcaacttaagctgcggttaccgctaagtccggctcggccccagcgacagcaaggcactggacagggcattccagcctcaccccacctcacctcggcccttcctcccacggtccctccccgctctggctgtcttcacctcctacacctcggtcgaggcgctcatcgccacccgcgatcaaaaagggtttcccttcagggaaagggggaaatgaaggttcatttctggaagaatctgcgcgcccggcagccgcaagaggagggaggagggaagagtcgggaaaggggcggggagctcagcactatccatcaagacattagcgctaggggatcgcaaagtcgccttcgggcctccactgcagcctagaaattctcccacgcactccgggctgaggtgggaatgtggaatccaggctcccaaaaatgaggatgagaccggaactcccgactgcctcggtcccgagggggcgggaagcgagaggaacaaagccagggccactcatgcccgggatggccgggcgacccagagggacacgggaggcccccttacctgccgtcagcagctgcatggcgtgagtgaaggacgggtcgagcgagtccttctcggccatgagttcgggcaggtacttgttctctggctccatcttgaccgaggctgtggccgaggggggcagcagcggggtcggcgctggcccgcccactgtcgcgtcgggacccgtggccgagggcggcagcagcggtggcggctgcgtggcgggcgaggcccgggcgcccccgcgggatccccctccgcctccccgggaccggtgaggcagcggcggctgccgagacggcgtctgacgcaccgaggggtgggcaccggaggggtccatggagccgctacggcccgaagaccggctcatgcgcgcggcggggtcgtcccggcgctgcatctgggaggatgtgcgatccaaggagcgagaaagcgacgcggcagcgacggaggcccgagcggcggttggcgggggtggcagagcgggagcggtagcgaccgaagccgacccgagcgacccagcgagagagagcaccggaaatgaggcggcgcgcgtgcgcagccagccaccggcaccgcccttgggtttctccgcggagaacaaagtccccagtccggccacggcgcctgcgcaccgccgcggcgtccgagaagtcgcctcccgactctggctttccctccgctcccgccaggccagagcttgatgcgcatgcgcgggaggcagtgggctccgttcgtttcgttttccacgtgactcggcgctagcggaacacgtgtctcctcccctttctggcgtggagggggcgggagctgtggaatgtctttgtctgcgcgcgggcccgcggagtgtggggcgggagacctgttactcgcggggccacgccctctccaacggctgagcagtggagggaggctgtggggagtggggtggggggcggtcaccgaagtaaggaagtaaaagactgccgagagggtcacggaaaggggagggagagagaattgagaccgcctggggaggaagacaggagtgagacagactgcacagggagaaaggaaggctgagggagagtctgatgcagggggaaagttggggaagggaaacctggagggagaaattgaggaaggacggcttggtggaaacactgaaggcgattggagtacttgaactaagagggatggttcagatcagagatctgaagtctagcaaagaaaagggtcccagacatcagggaacacaagaagttgtttccagtatatatatttccagtattacatatattccagtcggttctaaaacggttgacattgttggtacgggaaatcttaagcagcattttagctctttttacatattttactgctttttctgaattgtgtttgttttgtttcgccgtcattattgccaattaagtgtttcttccttcaaaaagtgaggtagagaccagatccttaatccacgttggttgcatcattaggatggcttcttctaccactccagacttgctcaaagagacccttgccactactctcaaaggcaaggtacatagtggacagtcgcctacgacgttctccacatcctggtgtgctatatgcaagtggagccttaggtccctacttgtcccataagccatcaaaagcctggtgccctctctaactttcccttccctccgcagattattttcttcttccatttaaagcactcactcccatctcttttccttctggattagttctcctaatgagcccacacttttcaaaagtctttggggaccggtgcggtggcttatgcctgtaatcccagcactttgggaggcctaggtgggaggattacttgaggctaggagttcgagagcagcctggacaatataatgagacctcatctctacaataaaaaaagtttccgcccggcttggtggctcatgcctgtgatcccaacactttgggaggccgaggtgggcaaatcacctgaggccaggagttcgagaccaacttggccaacatgatgaaaccccatctttactaaaaatataaaaattagccgggtgtggtggtgcatacctgtaatcccagctacttgggaggctgaggcaggagaattgcttgaaccagggacgcggaggctgccgtgagccgagatcacgccactgcactccagcctgggcaacagagcgagactacgtctcaaaaaaaaaaaaaaaggaaaaaaaggtttatttggaaattgtcttctgagtgcctggaaacttgatttttggatgtgaagcttagaaccctttaactagagaacctaaaggccttctttaaggggttaagggagaggatttccaaattacccacagaaatgaaaacaaaacacgtatctacataaattatatatatataatataaaatataggccagatgcgatggctcatgcttgtaatcccagcactttgggaaaccgaggcgggcagatcacaaggtcaagagatcgagaccatcctggccaacattgtgaaaccccgtctctactaaaaatacaaaaattagctgggtgtggtggtgtgcctgtagtcccagctactcaggaggctgaggcagaagaatcgcttgaacccaggaggcggaggttgcagtgagctgagattgcagcactgcactccagcctgggggacagtgcgagactctgtcttgggaaaaaaaagaaagaaagaaagaaatta

SEQ ID NO: 1070 - DNA, 4001 bp, Homo sapiens
aactgcagtttatttctgtatctgtctcacttaccagactgaagctcctcaaaaacagaaaccatctcattatctttggactccaaggccctggtatactggcctgcacacggtaggtttggcaaatgttgaatgaatgtatggaatggatgcatctccctctttggtgaaatcaataacttagtttgttgagtgtttattattctcttgggtttagtctttagggaagaggacagaagtcatactcatttcacaggccaaatattgacaatgcatggaggccaaagaaacttttgttttacaacgcatctctttcctaaaattgtatctgggatggggacagagaggcagaatttcagacaaaaggaaagacttggtcagattttcctgtacagctgcctctccagcccagcactgggtgaagggcaggcacatcagactaagtggttgatgcaactgaaccagtttaaaggctggtaagacgcttgcagaagtctttagatagaacttgcaaaccatttgcaaaagggttaggaacaggttgcatcaatgctatgtttaagtcctgctctttgtaactcaaggctctcccattatctaacagaacttcagaatgagggttccttaaaattagcttcaggtccttatgagctgtagctgagcaaatgaaatgcaactgctttagaagggaggagcttccaagatgctccagtggtcttttccttcccttcctcgtataacgcaatcggtggcacaatcccgctaagtagcatggcatgctggctgccggtgttctgttaaattagggtgagtgcttgtctgtgcttcagtttccctttcggttaggcaggactggtcttcccactagctatcatctatagtttacttaactctattatcatatgatgaatcccgtaaagctcttcagaatgttagggaaacaggtcctattatgtcccccactctaccttcatgggtgggatggggggtctgggggtgggaccactgagagtcaaagaagttaggaagtaatctgtgtcacagcaagctccctggaaactctcagaatagcaaacaggtttcctctccgcccctggctccacgccatattttcgttttggctagttccttagctccagagaaaatctggcttcacctagaatggtttagaaacacctaagcccgcgatgctttccggagggtctcaggccttagctttctcagtaaaaaacagaatttccatgtgtccccttcaaagcgctcctaccggcagctggagtaaggtaactccaccgccgacctccgaggagttcatgtggactcagcccaggcgcagagaggaagactcctgagagtcctcgcgaaggagggaaacacaccagaactaaagttgtgaaggcgcaagaggctacttaggaataattccttgtatctctggggcaggtctcatccttctaaagacaggagtgactgggcgtcttcttccaaacagagggcgcttaaaaatgtatttttaaaaaacataacagaaagtcctgaaactcacctttcggtccgcggaagggcttcctgcaggcccagggaatctcctggttgctgccccgtctgacagcgccccgggccctggagggaggtgtgggttcctttttggttgcctctgcactcccaccccgagccaggtctggcgtgtagggccccggcgccggccaaggtcgtgggagccgcccgccccgccccgccccgccccgctccacccccgcgcgtacctgccgctgccgccgagggcagcgccctctgtgttccctgccttcctacgggccgacgcctggcatagttgaggtttcgctccaactctgtcctgcccctgatgtcacaggcacaacttcctgaatctggctcgccgttccgcccgctccaggggctcggcccaggctttccaccctgggccagcccacctcgggtgcctctggccttgggcgcacacgccccagacgcgccctccctccccgtcttcccgccggtggctccccactccccgccccccgccattacgtgtccttgccccctcagtcccggaacacgcctccttcaggacacagcggctgcggagccagccccggtgtctctcacagacgcaccagtgttccaggaatgggacacagaactccgggcaaacccggcttcagggaaaacagctgcctaaatagagggccttcctggaaggggtgggaggcgttggagagggataccatgcggcaggttgggtgaaggctccgatgtcttatcgggacaaatgagcatgacagtcccctctagccaacgccggttgctccaaggggtgcaggtgacatctcagaagagtctttgtctctgctgcctggaggcgctaaggaaaactgcgccccaggagctgtctgtcacaagcaaatgacggaggggaaagctgacttcaaaaagttctcaggggttcttccctctcatcctcagctgctctccatctactttctattcagatctcttggctctagttccgagcacatgggatgctaggaaatgaaaagacctgcgcccctttgaataggggactccagacacaaagctctgatgattcagagcttgttcagtgcctccagggatactgtgggtgggaaaagagggggatgccaggacctggctgtggatcatttcaggggcctcctcagtgtcatcctgggaggtcctccctgacaagggcctgaaatgctgttccctcgactgtatttgccaggtacacaggtaccaggtgccaggtgctgaaccaggacttgccctccatcgactgtgcctgagtatgggtgtcctttggcttctccaagtgggcattaaaatgactgctgcaaccaactgtcacaactgagattcaagagattcctttctgtttattcaggagaaaccacgtggctctgagttgaaaggccaaagagaaaacccaccatccagcctgaaacgccaaaaatggctagaaaaagaggaaaataagttatttatttatttatttatttattttttacagaggaagactagattcacaagccgggagaagctcaaatctgtaatgacactttgagcctgcagttgtctacctatgtacaatgtacctatgtacctatgtaggttcctctaaaactcctggagcctaaggccagagtatagagtctaacagggccatgaggaagacaggcctgggatggatgatagtaaggccttgaatgctggcctgaaaatttgggaatggggatctcctgcctggaggtttacacacagtgtatcattcaacctttcacaacacatttatgagaggtagtattatcctcattgtacaggtgaggaaattgtggttgagaggaagctaaggaagttcctcaaggtcacatagctaataaatggtagagccaggtttgaatccaagtgtttccaaccgccgctccccctgacccagtgcatccttttaccaccatatcatctagtagaggaggaacttgccttctgtgaaggaattccacacttgagcagggatcatgtacaggtcttgaatgacgcctattgcggggaggccatagaaaatactttcctgaaagtctggagcaacattacagattggttctggccagggtgatgggtatgtagggttgcttttaagagaaaagaggaagaaactaaatgagaaaaacaggggcaatcgaattgagctcagggcttcatggacatggttgtctgatcgtagaaaggaaaccagggccatccataagatggtatctctagctatctcaattcataaggagaaaagtctaatgctgaaaaccagaaaattctgtggcagagaaatcagggacttataggtgggctggatggtggatttactcacactagactgccaaggctgcaaagtctgttgctgtattgacactactagaagatgcaattatgcagaagaaaagaagtgggcatctggcaaggatgtt

SEQ ID NO: 1071 - DNA, 4001 bp, Homo sapiens
actcaaaaatggcttcctataggagggagttcacccttctcagtctagcagtgtaattcctattacacgctattccctacctgccattgactttgcataccctctttcctttgttcaaaacacactttccctaggaactcctagtcatttccaagaccctgctcatccatcacttctgtggtgtggacttcacagataattctggggaaggatctcctgccctctcccctggattagtcagtgccctgtagctactgctattacaatgtatattatcctgaactgcagtttatttctgtatctgtctcacttaccagactgaagctcctcaaaaacagaaaccatctcattatctttggactccaaggccctggtatactggcctgcacacggtaggtttggcaaatgttgaatgaatgtatggaatggatgcatctccctctttggtgaaatcaataacttagtttgttgagtgtttattattctcttgggtttagtctttagggaagaggacagaagtcatactcatttcacaggccaaatattgacaatgcatggaggccaaagaaacttttgttttacaacgcatctctttcctaaaattgtatctgggatggggacagagaggcagaatttcagacaaaaggaaagacttggtcagattttcctgtacagctgcctctccagcccagcactgggtgaagggcaggcacatcagactaagtggttgatgcaactgaaccagtttaaaggctggtaagacgcttgcagaagtctttagatagaacttgcaaaccatttgcaaaagggttaggaacaggttgcatcaatgctatgtttaagtcctgctctttgtaactcaaggctctcccattatctaacagaacttcagaatgagggttccttaaaattagcttcaggtccttatgagctgtagctgagcaaatgaaatgcaactgctttagaagggaggagcttccaagatgctccagtggtcttttccttcccttcctcgtataacgcaatcggtggcacaatcccgctaagtagcatggcatgctggctgccggtgttctgttaaattagggtgagtgcttgtctgtgcttcagtttccctttcggttaggcaggactggtcttcccactagctatcatctatagtttacttaactctattatcatatgatgaatcccgtaaagctcttcagaatgttagggaaacaggtcctattatgtcccccactctaccttcatgggtgggatggggggtctgggggtgggaccactgagagtcaaagaagttaggaagtaatctgtgtcacagcaagctccctggaaactctcagaatagcaaacaggtttcctctccgcccctggctccacgccatattttcgttttggctagttccttagctccagagaaaatctggcttcacctagaatggtttagaaacacctaagcccgcgatgctttccggagggtctcaggccttagctttctcagtaaaaaacagaatttccatgtgtccccttcaaagcgctcctaccggcagctggagtaaggtaactccaccgccgacctccgaggagttcatgtggactcagcccaggcgcagagaggaagactcctgagagtcctcgcgaaggagggaaacacaccagaactaaagttgtgaaggcgcaagaggctacttaggaataattccttgtatctctggggcaggtctcatccttctaaagacaggagtgactgggcgtcttcttccaaacagagggcgcttaaaaatgtatttttaaaaaacataacagaaagtcctgaaactcacctttcggtccgcggaagggcttcctgcaggcccagggaatctcctggttgctgccccgtctgacagcgccccgggccctggagggaggtgtgggttcctttttggttgcctctgcactcccaccccgagccaggtctggcgtgtagggccccggcgccggccaaggtcgtgggagccgcccgccccgccccgccccgccccgctccacccccgcgcgtacctgccgctgccgccgagggcagcgccctctgtgttccctgccttcctacgggccgacgcctggcatagttgaggtttcgctccaactctgtcctgcccctgatgtcacaggcacaacttcctgaatctggctcgccgttccgcccgctccaggggctcggcccaggctttccaccctgggccagcccacctcgggtgcctctggccttgggcgcacacgccccagacgcgccctccctccccgtcttcccgccggtggctccccactccccgccccccgccattacgtgtccttgccccctcagtcccggaacacgcctccttcaggacacagcggctgcggagccagccccggtgtctctcacagacgcaccagtgttccaggaatgggacacagaactccgggcaaacccggcttcagggaaaacagctgcctaaatagagggccttcctggaaggggtgggaggcgttggagagggataccatgcggcaggttgggtgaaggctccgatgtcttatcgggacaaatgagcatgacagtcccctctagccaacgccggttgctccaaggggtgcaggtgacatctcagaagagtctttgtctctgctgcctggaggcgctaaggaaaactgcgccccaggagctgtctgtcacaagcaaatgacggaggggaaagctgacttcaaaaagttctcaggggttcttccctctcatcctcagctgctctccatctactttctattcagatctcttggctctagttccgagcacatgggatgctaggaaatgaaaagacctgcgcccctttgaataggggactccagacacaaagctctgatgattcagagcttgttcagtgcctccagggatactgtgggtgggaaaagagggggatgccaggacctggctgtggatcatttcaggggcctcctcagtgtcatcctgggaggtcctccctgacaagggcctgaaatgctgttccctcgactgtatttgccaggtacacaggtaccaggtgccaggtgctgaaccaggacttgccctccatcgactgtgcctgagtatgggtgtcctttggcttctccaagtgggcattaaaatgactgctgcaaccaactgtcacaactgagattcaagagattcctttctgtttattcaggagaaaccacgtggctctgagttgaaaggccaaagagaaaacccaccatccagcctgaaacgccaaaaatggctagaaaaagaggaaaataagttatttatttatttatttatttattttttacagaggaagactagattcacaagccgggagaagctcaaatctgtaatgacactttgagcctgcagttgtctacctatgtacaatgtacctatgtacctatgtaggttcctctaaaactcctggagcctaaggccagagtatagagtctaacagggccatgaggaagacaggcctgggatggatgatagtaaggccttgaatgctggcctgaaaatttgggaatggggatctcctgcctggaggtttacacacagtgtatcattcaacctttcacaacacatttatgagaggtagtattatcctcattgtacaggtgaggaaattgtggttgagaggaagctaaggaagttcctcaaggtcacatagctaataaatggtagagccaggtttgaatccaagtgtttccaaccgccgctccccctgacccagtgcatccttttaccaccatatcatctagtagaggaggaacttgccttctgtgaaggaattccacacttgagcagggatcatgtacaggtcttgaatgacgcctattgcggggaggccatagaaaatactttcctgaaagtctggagcaacattacagattggttctggccagggtgatgggtatgtagggttgcttttaagagaaaagaggaagaaactaaatgagaaaaacaggggcaatcg

SEQ ID NO: 1072 - DNA, 4001 bp, Homo sapiens
agccacagacatacacacagctgcaaaactaaggtgcagcccacccaagaaaaggcttttgcagaaccacatgcatctgaaggacttcatcgttctcattcacttccatccattcctatttctagttgttttgtagttgtatttcagggagcagggggcagaaaggaggtgtgtgggccagagacatgttcaagagattatgaaatggagcctaagttagaaagtacatccagcaatttctctagcctcccaagagggaacgagtgagtatgcatgtgtgcatgtatgggtgtgtatgaatcttacccaacacatttctgcctaccacaaaaggatttaaaactcaaggtgactcaacagctgtcatcaatagcctgacaggtgggtgggagaagcagaaaagaaatgaatagcttttgaaaaatggagtaataaacaccactggactaacaagctgattagaagtgccatgtctaataaatcttgcgtctaagagaaaggcagagttaatttcatttgaactcctaaccagtcattcctctgaaacctataattgcctaagggcacaaatcactgctagggtccagttaaaggcttgctgaccaaacgcaagaacaacaacacatcaccaagatccgaatagtttgttactgaatcaaagggtaacaacccagggagagaacacacacccccacaatacttgacaaatgaaaatctagagaagctcacaatagttctggcatttagggcgttacaagtacacccaaaataaaagcactctctgttgcagcagctgttcagacagagcagggggtaatgtttacttaatacttcaggttgatgggggatgtatcacagttcagtctgtcaactacatacgtggaactccatttatgtacacagcgataagatatgtttgaacaacgatggagcacgtctgaaacaatctattcagttggtatgagtaatcgagaataaagctcttttttaaaaagtctcagatatttgggaaagttacagaacagactgccatgaatagctttgcttatatttgcagacactgttttccaaatagctggaaaaatgaacagattgttctgggaggtcgtctttccaatttgttcctagttttcagtctgttaatcacaggagagagcacaaggagagtcagctaatgctcttcactaactgcaactactgtcagttggacacaaccactatgagaccagaagccaaagagttcctggaatcccgccagaggttatcaattttgacttccttcatttcacctttgtgctcactgcagccactacaggaccctctgtggggcataattttcaaaatcgtggatgaggcaggtttcacattataatggacacatcgtgctcaaccccatcccctcttcattctgcaccaactttctatctcggtggagagaccaaacatcagagacagcaactaaagactaggctgcagaggtcgaaggtggaagaaggacggcagcgccccgaaccccggctgtctgcctggctctcaggggatggagggagctgcatgactaggcccaggcccgagagaagcggggttcagcctgggacccaagctgcgcacctgcaaggacagaagcagctggctgccctggccgagccaggggcgccacctccggacccaacatccggccagcgcagccgctgacatcgcccgtcccgcttgcccctcccctgagcccatggtcctcggcctggcagccagccgcccccggccacctaccggggctcagggccacatagcggggccccggctctcggcggcctccgcctcctcctggtccatgggctcggggacccccaaccttcgctcccctcacccggaggaggaggaggaagaggaagaaggtagtgcgggctccccacccggacagctacctctcgcctcagcctccctggacagcgacggcggccggaaacaccgcctcctcccacctccccgggaccgacccggaaacacactctccatgctaaccaagccctcccgcccctcccccgggaagggcaatgccggccgcgagaccaagggggaggaggggcagtgctgggcgggtaaaactacgcacaagcgaaggaatctgggcccccagcctctcgccgcccgctctccagaggcagtctgcaccttgcctccttcgctcgagccccagcccccagactcgggcaatacccacaagcaagatggcggcaacggcggcaccccctactgcttagcaccctgacttgccattggccagagcccggagtgaagcagccgcggattcgtcaagagcggtgcgggggtgggggtggagctgcagcagcctggagccaggagtgggcaacgcggcgtgagcagcggcccgaggctcccggagcatcgcgctgggagaagacttcgccgctcggggccgcagcctggtgagctcagcccccttcgggccctcccctgcatcccagccggggcctctccgagccggcgctgatcgatgccgacacaccccggggaccctatcgcgactccatcgcgccatatcgcgacaccatcgtgccctgtcgagactccattttgtcacagcccttttcaatatatatcttttttttttttaatttgccctgtcatctttgggggctgtctcccatgtcgtgattttgacgtgatctctccgtgacatcaccgcgccatcgtgaagtgtgatctcatcgccgccctgtcgtgacttcatcaatgtcgtgttgtgacctggctgcggcgggacaggtggtgaccgccaggaaccctcctccccttctcatctccccatctcagcagccctgcttcgattatccggcttttggattctccgttgtcctgggaactatccgggaccccctcttgcttctccagcccctgccggcatccacaggctggtagcgggacggggagggcgagaagagggagcgcaaggggttaattctgctgctgccgccgccgctgctgctgctgctgcagcctctacccgagggagggaaaggagaggaggcaaggagcctgcgggggcgactgagagccctggctggaggggtggggtccccaaaggggcctccaagccttccctgttgagcgtcttgtattctcacttctgaagcgtatctctgcctctgaagaagggaggggaaaggaagcctggggtgtccttttctcccatgtcagcctgagtccggataatcgaacttcacccatgtatgtctccatttctccctgtctgtcctcaccactcactccctctgtgtccctgtggagggagataaaacccagcctccggtgccagggggacagctgagcagtggggccagctcccgcccacccccaggagactggtgaggagagctgtccggctgagcagcagcatgcatggtccttctttcccgctttctggaggtgaccttggaccagggtcccttctttatccctaaggatttgcagatccagccccttaaaggggcttctggggggaggtcagtcctgaggagtccacccctccagattctctcctcccctccctctgtgctaatccctccctccctccatcctccactctcacccccaccccacccccgtccctcctctgcagagggatgctcagtccctcttgtgttcacagttgggcaaggcgagcatcatggcctcggattgcgagccagctctgaaccaggcagagggccgaaaccccaccctggagcgctacctgggagccctccgtgaggccaagaatgacagcgagcagtttgcagccctgctgctagtaaggaactggctgaaaattgggaggtgggaagggctgggtggttgggcccccaaggaatggggtcagtgagtccccaaggatatgtacgtagtgctagcaaccctggaggcaccaacgaaggcccaagacccctacctttgtgctcttttttgctccccctgagaatgggggcaaagaggagaatggg

SEQ ID NO: 1073 - DNA, 4001 bp, Homo sapiens
atccttgggaacagtagccaactggtccttggctggctgtgggtcatcagggcaacaaatctgaccaagagataggtggccaaaagtcctcaagacagcagctaagcaatcggatccatcctccaccactgctgtgtttgcttgttctctttcttcaaaaatatctgccaggctgttcttctcatctgccatcagaaaagtcttttccctgtctgacagtttctcttcctcccactctccctcagcctccatcataatccatcgctcatcctcctcaaactttagctcagactctgttttctctctcaggctgggggttatgagaacatgcaattctggatctaacagctcttcactcaggcaaggggagagaggtggcatttccacagtgcaggctgtgtccccaagggggtgctgcttctcactgaagcctcccttagctaaactttttgtggccctcggccaggttgcacttgagaatctggattcctgcattacatctgtgttaccacttgttgctacagcttctgattctacaggctggaattcatgaggagggtttgcactgtgctgctgaaatctaaagtcctggcagtctccacttaagtttttaaaatcttgcacctctggaatacctatggatttggacacatgttccagagttactgactctgactgaggttccctgtggtccaaatgaccagaactttctgttaatgcagaactggactccttcttctcttgcaaggaaggatttgaagcaccagcttctgaaacctcactgagagaagcttctatcctctctgcaaattctgggaagttgggtggcatgaaggacttccacgatctcctgttaacattgtctttgcgttctgcatttggccgccttctgggtggcacaggtgctgacttctgcacatcactgcttagctttagtgcatcaaatattatcctctcatccagcttcttaccttctggtgctctagattcaaaaacattagatgctgctcctaatgtaccattgctggatatagtacttccttccatcttttccatggtgctttttgaagtctggttaagctttgacccctggtcaatttgctcatttatcctcatcgtatcatatatagaccgttgtggaacatagcagtcctctatgtagccatcctcctcctctcctttccccaggcagctggggttccgccttaaacagtctggtctgctgagtggcttacccatcctttttcaatcaagatgaaccatcaatctttcaaaagtatttttcacaggttccccccaaatgcattctacataagttataaatccttttagctgttcataccccaaaccaccaattgcatctgccctccagaaaggcctggaagttccgttttgaaaccattctgggagaagctctaagacaaacagctttttcctcacaggctagcagcctcatggttgacagacgatataatttaaaataattccttgtatggcttatggtttaattttttttaagagcactgctctttcaaatacagtcaacaaaaatcatctgatattgacgagtctttttcgatatctagttccactcacttctcaccgaagcagagttgggagcagcaaatttatgccgattgtatcctttaataacaatggcacagcctctctagtcttcaagtatggcccaagctcctaagaattcctttcattttatcctcagttccagccctggagagtccagctggtctgaattagccattcgtcctccctagctggggtgtttgcatttgaactgggctggtcggcggatattcctgcaactttaaacacaggaagtccttcattcggggccagcttggggcttcctgtctccaaaacatcatggcattgttgtggctcccaggccaaccctgcgctgtagctgcaaaacaaggcgagcggagccccgcgccaggccttcggaaaggcaggcgggcgggcgggcagcagcagcggccgcgggtctgtcggaggggctcgctcagcacggcccgcttccccgcgccatgccgcgcgccccgagggccagggtcgcctcaccgcaggctgcaggtggctcccggccgcgccagcctcaggtcccgcgctcaggaagttagtttgtccctccggcagctgagtcccgagtgctgtgggcgccgcctcgcccgccgccgccagtccccggcccgcagccgccacgccgtgggctgcatgacaagcagccgcctctattctccaccacgccgctggccccgcggccccgccgtcctccccgcccgcagctgtcacggtcccggcatgcaaacttctggctgggaacaaaaggctccgctagggtcgggcggggggcgagtcctcctcccccgcgcagcgcgacccgctagctcgctagctcgctggaagtgctcggctggcgggcggctctcctcccccttccccgcgccgccgcgctgcgccgccccgcccgggcagccccctggaagccagggagcgcgcgacgcggagagcacaggaaggaggacgagggcgggggcggggcccggcgggggcggggccggggagaggagcgactccgagagtggagggagcggtggagaggattggaggctgaggcgccgaaggaggggcttctgcgggattcggagcgagagacccgggacgccagccgttcggctcccgcagcccacgcccaccgcgccccggggccagaggggaacgccccgcccccggagagggcgcaaggagaggaacggaacccgcgcgagtctgggctgcgcggcgcaaatcccctgacaaaggaaagccccgccctcctcccgctggcccggcccctcccgcccctgtctcgctccaaccggcccggctccgagcccagcccaaaggcgaacgaatccagaaagggcgcccgcgctcccccagctagccggctctggcgacggccactcgagttcccgtgtgccggcaggtcgcgccggctggggtaggccgcctgcatcgctctcggctccatctctgccgccaaaggctgtccctgctccttccagtgtcacctttagcgcgccccttgccggaccgaagaacactccagccttaaacccggcactttcccggtgtcccaaaggaattcggtcacgctcagagaccaaagttattggataactctaggcacattctaccttccctctcccccttctcaagtatatcaagtcctggtcaattctcccaccaggatttctctgctcacagacctgagtggtatcaatgacggaagaaaatggggtgttgggggaggtggggatgccaacagctgagccctacgaccaaacacctgggtcctttatagttgcgcacagccaaggaaacctgagcctccttggaccagatgaaaagcatgggtatttcaaatctcaaatagaaaacactagagaaaagtcgctcacaatcccgtcgtccacggcctttggcttttagaaaagccacttggtcacctggtgactgttaaacaaagaaagtacaaagggcaacccaggaaactgtccaccagaggcagctgcatctctgaacgggtccaatactctgttctatttgtgatggccattctctgattttatgaaggaaaaaaacatctattaaaattcggaatctctgtcggaccatgtggtcaatatataccgcaaaacttatggaaaagttatttctatcctttacacaaacagtaagtgaaaccaacacctggtgtatgaagatctggcactgaaaccttgagctgagccttaggcttacttagggaatcagactggtccttggcaaaaatgagaagtgcgctgaagcctgtaatcggaattaggcaactaaaagacctttctctggtaaaatgctttacacttcatttctcacttcaacaacggctgctgatcaattctacccactcaaatccaaaagactctgcccatctgtaaactgaaaggggtggggag

SEQ ID NO: 1074 - DNA, 4001 bp, Homo sapiens
ttatgccaaagccatgtaaccagtaactgtggattctgggtttcaaactgtggattctgggtttttaggttttatgattctaaatccagtgtttatgtatcctgctgaggtcaactacctaaagattattattttaagaaaaaaaaagagcttaaacgattaacatcagtattaaaaatcttaatatacaaggagcactacatctttgtcaagatgcttttaatttttcctcataaaccttataaatggatgactgactcacacaatctttgcaaacaataggctgcgcctggtggctcatacttgtaatcccagcactttgggaggcagagatgagcttggtcaacatggtgaaaccctgtctactaaaaacacaaaaaaaaattagccgggcatggtggcatgcacctgtaatcccagctactcgggaggctgaggcagcagaatcagaatcacttgaacccaggagacagaggttgtagtgagccgagatcaccccactactgcacttcaggctggtgacagagtgagactctatcaaaataaataaataaataaataaaaccctacaggttctaattagagatgacactatggggctcacttgatttacctgaactcctctgacttcagggaaaaagcacatatattaaaaacatgttatgttgctttaaatgactatggaaatacagcttaagctgaactaagtgaacaaggacaagacaaggtatttggtccataaatgtaatcagcccaatcaaaaacgcctcgtaaatatgtatttgtaacaaaatgtgttctggaacattccaaaactaaatgatctctcaactactatatccatttatcctttactaacacaaattattatgcgattacaggattacaaacaactttttttttttttttttgagacggagtctcattgggtcgcccaggctagagtgcactggcacaatctcggctcactgcaacctccgcctcccgggttcaagcagttctgcctcagcctcctgagtagctgattacaggcgcgtgccaccatgcccgactaatttttgtattttcagtagagacggggtttcaccatgttggtcaggctggtctcaaactcctgaccttgtgatccacccgcctcggcctcccaaagtgctgggattacaggcgtaagccaccgcgcccggcaaaacaactattaaattcgcaattagtggagacccttcaacttcaaataccttctcagaagcattctgagttggtttcagcttcccttttgccatgagcatggcattaatcttggcagccacagcagcagcagcatccaaggctcctgaaggagcagctgtggtgcccccaggacttcccccactgctggtgacctccccacctggggccgctggcgggaggaagagaagtggggctggagctggttggtcccatttgctgcggcgcctacatggagaaaaaggaaaacattaggccccaaagctttcgtgtatgttattctttccttactacgccttagcaccccattttccctctattatattccatttacacctccgaatcaccttccaaatctaaaactcccctctccttaaacaattattgcttatttaacaaacccccactttcaacccttccccaaaatctttcgtttctactgtcacctatatcgaaagactccactctatcctacacgctctagtttacgccttccccttggctcgcccttccaaaagtccccgtttgcctcctccctcggatccccgccggccctttaagggccccaggcctgctcaagatccttctccccaaacgtccagccctttacttcccacttaaggacccttccaccctatacgcagcttctcagggtccctccgcctctcctgcgccccagtgctcgctccgatgccctcgcccctgaagccgtacccgccagctccaggatgtgtcgcgctccccgcggacatggcgaccgcttctactcaaccacccgccaactatccgactaccacctctcgtcacttccgcccccaacgttcttacgcacagcctcttccggtcgtggggccgagcggttccggtgaaaatgtcgattccgattggactctcgatgatttaaaggcatctggcgtttctgaggcaggtagggtgtgatcttccgggttgcgccttaaccttaagaaagatggctgctgtgcctactataaatgcggaatcggggctagctgaatccatctttatcgtgggcatgttgttagactagaagacaatatgcatgagtcaggagattaaacaggtttctcctcaaattccgctacgtttgtgttgagtcctagtttctgtctggggagacagccttcccgcggcttttgcccgtttcacgtttctgttacttaggaaaaggaaaaggattcgttgcaaagatcatttggagaatttctctgtttgtttgcttcatttctgtgcaccaagcagggaatataaaaataaaaagatgaataagccgcaggccctgccattctggtactctcaatgtggcaaggcaggtacgcaggcaaatatgtatgatagagttgtatattaagcaaaggtcgaagaagataagctgctcatcttgctggagcgtttaagaatgggacgctaaaaagccggttgagtactggagaggcgatcaagcataggttatggagcaccctgttctggcatctgtgtacttaacggttgagctggctggagtgggaggccagaagatgaaaggccttgaatgctatgctgaggagtttgagttgattctgtaggctaaaggtttcttttttttttttttttttttttttgagacagtttcgctccgtcacccaggctgaagtgcaatgacgcgatctcggctaaccactctccgcctcccgggttcaaacgattctcctgccttagcctcccaagtagctgggatcacaggtgcccgccaccacgcccagctaattttttgttgttgttgttttgtatttttagtagagacacagtttagccatgttggccagcctggtctcaaactcctgacctcaggtgatccacccgcctcggcctcccgaagtggtaggattacaggcgtgagccaccgcgccctgccgaggctaaaggtttctaacctttaggatgtcttggagcttcaatgagtctcctgatcctcccacctcagcctctgaagtagctgggactacaagcacgggccaccacacctggctttttttttttttttttaagagaccggggtggtagggggtgcgggggtggggggtgtcttactattttgcctaggctggtctcaaactcctgggctcaaccgatcctaccacctcggcctccccaaagtgccccttttcctcttctccccaaaacacaatgctgttgggattctgattgaaattacattatttattatatttgtcattttaaaaaatttgtgatgtaactcctatgccataaatttaccctttttaaagagtaaatttaagtgcacaattcagtgttttttagtgtgtccacaagattgtgccacaatcatcattatctaattccagattattttcatcaccccaaaaagaaacccctcacctgttaacagtcacttcacatttctcttgccccgcaagacatgggctaccactaatctactgtttctctggatttacctattttacacattttatataaatggaattatacaatgtgtgaccttttgtatctggcttctttcacttacagtgttttcaaagtttattcatgttgtagcatatgtcagaacttcatttttttatcactgaataaacttcattcttttttatcactgaatttcttttccattggatgtatagaccacaatttatccattcatccattgattaacatttgagttgtttccacctcttgggtattgtaagtagtgctgctgtgaacattcacaagtatttaagtatctgtttttaattctttag

SEQ ID NO: 1075 - DNA, 4001 bp, Homo sapiens
tatctgctgtcacaatgatcattacataagaattgaaatatctcaaggctaacgtacctgcttggattttctgttgatcatctgtgctcatcagcttccagctttctgtgtgacgaacagcatagaaagactgaaccaggaagatccacagcttatcacgcagagcctggatcttgcacgtaaaaccctgtgttcaagcaacaaatcagcagctggtgagagccacattgtcatagcaaccagtcattattcctttcagaatctacttactcctaagctagatcaatgatgtcatcatttagatttttaagatcgttgggtacatgttatttatgaagacttattaataacaaaattttataaatgaacacaaagctaaaaaatctcatcttttcaaccaaatgttattttaaaacaccaatgcccttgatatgaacaccttccacagccttttcatatcaactatgacattacaaggtcaaatgctctatggaatagtaataaatatgatacattttaaaaaccattcttgtcgaacaaatacagaatgccaataatttgtaattacctaattaatggccactgattaattgtatttaaaaataaatattttaattttgcttcccagcctaattttaaaatatgattttttgaagagaaaaattaagattataaaaataaaagacactgatgattaaaaactctaaaatatacatttatatctaaaatatacattttatatctagaaaatttactgtaggaccagggagaaatacgagagttatgctgtgccaaataatgttgctaaatatcacactaaatttaaaattacccagccaaactgccaatttctaaacttttataagaagtccatttggagacaaacggaatttttaaaatttagtattataaaaaattccaaacatatacaaaagtagagaccttaatccacccctaggtatccactgcctagcttcaatgaccctgcaacatttaaaatgcacatacatctaaaaatcttagttcaaatattgcattattttaataaatttcattacattcagtaccatttcctttgtactgtcagagttcagcagtgtgtccagagccataagaagagagcagctattttcagtggtgatattttcttcaattgcttttaaaattgtgtccaacagatcggctgtgctgctcattgcttgtgactataaaacacagaaattaatatttaagaggaatacatataaaatgcacaagaaatgtgaaagtctggcgtaacagatcattataactagctgtatgaagtcaaccagaaatcgtattttttccctttgttaaaaaattcgcatatatgcatatgcacgcagcttttatttttatttatttatttttattatactttaagttctagggtgcatatgcacaacgtgcaggtttgttacatatgtatacatgtgccatgttggacacacagtttttaaaagccaacatagccctaaatacagaacctagaaataaacaataggagttattctgtgaataattttagagaaagtagcttcccaataagacagagaattctgcatggatcataattgtattactggccaaaacagtacctttatgactttggtttctaaaatgtggcttgctgagggagggctagagttggccagaattacactgtgccttgccagggcactcaaacctgtccctctcgcctttctcatcttgtgagccaaatatcctgtccatcactgccttaaatcctatgtaaacatgccatctgctatggagtttatttaaatcacattaatttaatcaaaagcaacctgcatttaaaagctcttacataattgaaatcagaacacaaagatggaactaaatataggatataatttaggcatagtacctgtaaaagaagagcaaaattttcactctgaataatcttggagaagttgtctacaataaatgcaatacatttttcttgaagctgagacgccatggtcagtgctgcttccgtccacttcactctgggtaaactgatgattagcctgtcactttccatcagaagaaaagcagcattcttatcattcttagatttaaaaaaaaattggaaagttagatgctattactgctaataaaataactctctaagcaaatcaaatacttttgttgttatgggatgtttcctgcaaaaacaaaattccaggtagctaatgtctttgttattagttttacatataatgtttattcattaattcagaattattcaaaagggtaaagtttgagctaggaagaaaccacctttaaaaggtagctaaaagaggtggggtacagtggctcattcctataatcccagtactttgggaggctgaggcgggtggatcacttgaggttaggagttcaagctcagcctggccaacatggtgaaaacccacttctactaaaaatacaaaaattagtcaggcatggtggtgcatgcctgtaatctcagctactcgggaggctgagggaggagagttgcttgaactcaggaggcggaggttgcagtgagctgagatcgcaccactgcactccggcctgggtgacagagcaagactccatctcaaaaaaaaaaaaaaaaaagaaagaaaagaaaagtagctaaaataaacctgatagcaaagtgataataactagaaagaaaaatttgagttccctaagattatcactactaaattaatttttgtgcttatagatatcatttataactgcatggctacaccagcatagcactaattcttttctgactacaaaatatgtttctttatgcaaatttggaaagactaaaaattacttataatccccagggattttcctcctcttctctaattaggttaagactctactgtttatattttattcatttcatcattcattactatggaaaaaaacattcacaaatattgatctctatggaaaatggaatgacaatgagcaaataccatgtactccacagaaaaggaaaaaaggcaacttatatattactgtctcttattcatgtttgatttccagttcttaaaacaatgcttagtaaataactatttattaattagttacttgatagactggtaaattgaaaaatatggccacaaattccatccaccaagaggtggaatctatctcctcagtcttgaatctagactactagccttctcacttgccttaaccaacagtggtgatgtgcaagttctagagcctaggcctcaagaagccttgcagcttcagtctaccttctgagaatcctgggaccaccagaccaaagaggcctaatagggaagaccagccccccagctcagcccccagctgaatgcagccgccacaggcaagaccagcagaagaatcacccagtgaactcacagaattgtggagttgttttaagctgccaagtttgggtgtggtttgttacacagcaatagatcattgataaatctggaaatgactgaaatacctaacatggacagcatgatgtggactctgcacagcctctgttttttttttttttaggtccagaagcactacatcttccctgataccatatatctacatcagatttcttttatacacactataagaaaatctgttgctttttgttagagcatttaattcatttgtaattaatcaaacatgaacattactatttaatgtctgtctccctcactgggctgtatgttcaatgagtgtaaaactacctctgttttagctcaccaatgtatcctcagggcctagtataaaactgggtcatagtagacactaaaatttatttgctgatcttttaatatgattggtgacagagtctatcagtcaatctctaagataacaagtttaatctttcaacttcaaaactaaaaattttaaccatttactaataattcttttttttttttttttgacacaagtcttgctctgtcacccaggctggaatgtagtggcttgaacatggctcactgcagcctcaa

SEQ ID NO: 1076 - DNA, 4001 bp, Homo sapiens
atgactctgacctgcagacgaggccagccctgacctctcttctcctgaatttagtcctcaaaggtggcctggtccttattccttactgcctcccttggaagggcagagtctgcattcagctggccactgttagtgcccacacagcccacccacacagtcgatgtgctgcagagagtggggtggtgaggaggttacctgagccattggagtaggaaccatatgggcagggctggcaggtgctgttgttggttttgaagaagcctgggttgcagggtgggcagtgggtcttcacaccagaggcaggcagcttcactgccccctcaaggtcctcgctacagattttcggcttggcccatttgtacatgagttgtgtctgcagaaatggattaagcacaactcagcctgtgtgagatttaggacatctttgggactctaccttgaggataggggctgggggcagagatccagattctgggccaggtaagagctcctctggggtggggaactttgtgtggctcacggatgtatcccaagcacctagcccagtgcctgagtcatggttgtgttcaatcactatctgccaaatgaatgttgcctgggtgacaaggaatagctctaatgaagactttatgacagagaatgtgggaccagttgtcttagagaaagctccgattccactgtagaatcttattgctaccaaggtcacaggaaaagcagctggtgaaaatcccagaacacagaaaggcacaagggtggaggtggctcagatgtcccccggggactgagggggtggctgagatgtccccacttattttttgagtggtacattctttgctcttttatttattgggtaaatcctaatgcatctatgtgccagacctggtgtctcagagatgaatgaaacatggcccctgcattgggtacagaagtggagatgacccgcaggagaccccggctgagtcaggggtgaaggtgggcagctccattcttcccatgtggccctcagatcgagtcacagacaaaaacgtgcccttataggttgaactgaggggttgatgaacatgatctgtgcagataccatacatatgaaaagaaggatgaataaggcctctgtccatatttttcaagataagaaacaagtccttaaggagggacacagactgccttaactgatggggagccctgggctcctccttcccctgctcagctcggccctcttccctgcggagggctgcgacagccagagccccaggcttgaacctcacctgcctcctgtgagtctcagggagaggagagtcctaggagctggcaaactgtctcgggccagctcttggagcagcacattcactgaccccaatggatgggccatcctggtccctgagaaacaactgaggcacagccaaggtcagaaatgtaatcataggagccagctcgaggtgtgtcccttgattttaaaatactgttcagaagacaaactcaatcaccagactgagcagaaccagtgcgggaatgaggcacaaagcagaagtctgcaaggaacagctggggaatgcatgttcatgcgcactcctgaaagcacacgcttcagtgctcctcctctgagctgggccttggctgtgctgcaaggcgggaacacaggctttggtctgacccagcatctaaaggccccggcagtggtcaggccaaggcagacacccgggctttcaggcagcaagcacggtactgacccagaaggccttggcgtgagcccagggagggaagagaatggggcagaagggaggaaagacagccacattcagtcacatgttatgaacaggagggagaagagcagcaggattaattgtctgccttttattagtgagttggctgagaccaagaaaatgaaaataaatgttcacaaggtcatacagaataccagacaccacagaactgagtctaaggtgcaactgacaagacacagccattctctcttggctgctggagaaggggatgatgccccaaatacgtgggggaggtggtgttggtaagagatgactgtgcaaaatattcattgttaaggaccagactttaacccatgcttagttaggaaagggagaattcagtcagccgcccagccagcaaatgtttatgctccctaagagccaagcatcatgcttagtgctgagtgcagaatgcccaactcctagttctatcctcttgagaatctctagcttagggatacagacagctcagccagatccttctccgtgcacctcaagcccttccctgctcacttacactgtttctccacccacctggcccagctgccgcctcctctcctgctgtgtctgctgcctggaaagctccacggctcctccctcatctccttcaggtctctgctcaaatgtcacctcctgagaggacatccctacccttctaaaatagtggcaccaccctccttcattctctctctcctaatcctggtttttttttttccttcctaccacttactaccatttgctatattatatacccatttgttgtctattatctctctctccactccctccccaacaagagttaagctccataagggctagatgttccctcagttttgttaagtgatgcatgcctagcacctagcaccgtgcctggcacagagtcgctcctcgataaatatttgttgactgttgaacaaatggcctcctctgagaggctttctctgctgcccccaccccaagtcctggtcgcttctcttctgggctcccccagttccctgcacatccctctggttgccttgactgggcccgtttttctcctctctccagcctctcatacaggactgtgagctccctgggggcaggagcttgtttcagtcgtctctgactccccagcctatagtgccaggcctgacatatcagtcagcctcaaaaaatgcttgttgactcagtgacagtgtagactaggagggaaagttcttttctgaagcagaaagcctggaggaaagagaagcagcagaaacggaacaagtcagaccataggcaggaatccattccccgtgccagcccacaaaacagtgccgagggggtgagcctgaagagccccgggaggacattgtgtacggacaggcaggctctgccggagtggctcggcaaatagaagaaaccaagcaagagagaatgaagtgggtttttgaaacagaacatatgtgcataaacagtgaaacaaacgctgcaaaaacagtttctgaccggaaaatgaatgaagaggtctcgttttgccccccaccccacctagccctagggtcacctcaaaggtctgtggggttttaactagtgccaatgtcattgactgctgaagttccaaatggtggcaaacctcagggagtgggagacagtccatctggggctaaggggctccaagactgtactacccacctctccgttggcatcgcaggccgtgtgtgtgtagaaataatctttgtctgtgcaagctgggcgcacgttacaggaagaagatcctttctctaaattgccaaagcaagaagaaatatttggagttacataagaaagctgagctcctggcctcttcatggccctgtgactcccaagtccctgggtgcattgccacacaaatattgccggaagtagaaaatcctgcacactcacccttccccttgtctcaatagtgtcatttccagttccccaaccctgctcaagcttccctttgcacctgttccaggtgctgatgagaaaccactgtttgccgcttcccgtcccccgccccatggggcaagggagggagaagtggcctggccaaaggaccagcaaggagggtagacggaaacagcttcttgcaggttaaccactgccaacctaagttccctgaaacctggggaggttcagagagttcaccatcttccaggtgccttagtgtcttgactctgggtgtggtttttctactcctgaagtgttgaagtaaaacatgattttgctttcatactcattccaagcctttctatg

SEQ ID NO: 1077 - DNA, 4001 bp, Homo sapiens
gggctttcttggtctcattattttggttggttagaccacaggccatcaaggccagtgagccagtcactgataagatcatactgttccctgcgatctctaaaacaggtcataatgcggctaggtggaaatgtagatggcccagggcaggttgtcattggagctaataaaggttatcaaaagtcccactcactggggtcacttatgtcatattcatgaatcttcaaaatcaagtatctttattcacacaaaaatcctcccccccacacctgacttctttatgacctgctgtgctgtagacacagaacatctttataagaatttatctccatatgggatggagttgttgccaatcagttcacactaacaatttataaaaaatattctgggctgggcgcagtggctcattcttataatcccagcactttgggaggccgaggtgggaagtcgcttgagcccaggagttagagactggccggggcagtatatcgaaacctcatttctattttaaaacatatattttttaaagtaaagaaaatacatctatatatatattctaacctctcaaaaccttagtcaagcttgatatttgggattaaatttacagagctagatgcttgactttttatgaagtccttcacatttcacagaaataacagaacttttattttgccttccccaacgtagttcttgtaaatatcttattgttgcctctgccatatggtttctaaaaaagttgctcagagcacaaccaaatattgttatttcaataacatagaaatgacttagttttgttgctgctagtgcccttttatgttcctccaagatgacttttcaaaagctatttttggttataagagattgactacctattgtctgaattctgcttccaacatattggaaataccttgaaaaagactttgacatatgttaagtcagagaaggagactagaggttggcagaacacaagatattgaagaactcaaaatctgcaaaaaggtgagtcgtgtactgtcaggtacactaaacatagtacgctgcggggaggccaagctataaggaggagacacattttacagtctgcactaaccgatgtttaataaacaaggaactagagagctggaatcctatcatccctctcgcacatctcccaccttcacactccgttttgtgtagccatgataaaaccacttcgctctgatacttttttctggccttcctaactcctttcctctcccactactcttctttcctcttcctattttgcttctctgtgcataatcttttcttgtcaaccacttttaaggtgagttcatcctaactggaaaataactcgtctgcctccctcattctgagttcaggtacccaggtagctccccttcttggggctgggacctttctcgctgagctcagcatcccaatctgtgaggatgatctatccgtgagtcctccaatgtgctggcctcctcatgacgccagactggctcctcttccctccccccacgcctcatccccaaagaaatctaaactccgtggcgtctgaaactctctgcgcctgggtccccaaggtctccgcctggatccaagacttttgtgaccaaagcgggatcgggtaggggggcggcagtacctctttgcaggcatgaagctccggtcccgttccctgggtcacctggaaggcggtcccagcccagagcagcagccgccacagccggggtatgcgcctctcagttcttcccctgactctggcggagagatggtggctgtgcccaggctcagccatagcgttgtcctgagtgagcggcagtagcggctcaggtgctgcggctgctgcttctgctggcagaaggcggaaaaaaaggggagggaggtacacaggcggaggatgcaagaggccaggctcgcttcagtcacctccctgcggctacgccaacaccgcccatccttcctcctccctctgtcctctcctcctacccacgtcgccttgacaaccgcctcctctctggctccgcgcgggtggggcagggaccacgcgcgcctctgcagctcacctgcgggtcgccatggcagccgccgccgctggtgcgcgcggcgtgggcgcgggagagcgcgcgcccggggtgcgcaaccggcccaacaggcaggcccggggctcgtgtgaagaacacagtggaagcatcctccaagccagccaacaaatttccgttttctactgccctttcgggccaggggttattttatgagcatctccgatgttgcacacgtggcgtgtgaaccgagagaaagaagatggagagatcaccctccagacgtcgtcgcctggaagaggccccagtacgtgttccctcctacgaaggccactcctggagatcttacatcccgccaaatccatccgtgcttttacaaccggctagaagagaagccctgacactgtagttgatccgagtttaagcgaggagtttgccttagccgcaatttcccaagcgccgcacgtgggcctctctctctctctctctctctctctctctctctctctctctctctctctctttctctctctctctctctctctctgagacagggtctcactctctcgcccacactggagtgcagtggcgcgatctcggctaactgcaacctccgccttccgggttcaagagattctcctggattagcctcccgagtagctgggactacgggcgcgtgccaccaagcccagctaatttttttcctactttttgtagagacggggtttcgccatgttgcccagactggtctcgaactcttgggcttaagcgatccgcccgcctccgcttcccaaagtgctgagattacaggcgtgaaccaccgcgcccggccctctttggtctcttgacatcctcattctctcatggctttgaaagccttttgttaggtgcgagggagaaggaaatttctgggtcatctttcaggacttctttcctcaactgaagtcttttgcagaagtcctgatggtgagcagccagcacttttccgccgaggctcaggagtgcaattccaagtctcgggcccgctcagcggaacgttccctctgcagtccccggagcttcctccccaggggcctcccgtggtcagccgccaggtggcgccctcctctgagggaattcctctgtcatagatggctgggcagttgcctggcaaccgaaaccagcgctccaaacaattgggacccgggatcttatgccagtgaggctgtgctgcggctgagcgggcctcccatccctcttaaaagagttaggcatttagccatgcctcccacccgggaccctttccagcagcctacattagataacgatgattcctacttaggagaactgcgggcttccaaggtactgtggtttcttgcgcagattcccagtagggtcgccggtagtcttctttctgtctgtgtgatgagcagagatggtaacataaaggactctggtgaagacactcagtcgggtaccagggaagtctgttttctgcctgcctccctatctccatattcaagtcggctaacgtttcagaggcgtttttgagcagaggaaagtagagttctagtctagaggaacaaggggctctggcagctcaaatcaattgtgagtataagttatggcagtgcccaggttccttcaagctacccatttccctatttggaagactgttctctgaagagaaatgagatatggagtgggagagaatcctctgaaagccaccagaggtcatgctttacacatctgtgttcacactgtctctgtcttctggttaacaccacaatatgtttgttatgtgtgtgtttagcatgatggtggacactgatttcggaacttagatgatcttttttctggtagaagtgattgggatatatgaagtggtgcacaataagatgaattaagtggtgattgtggtctaataacaatattgagagcccctttttatttattcaatacttatttactataagccagacactctgctaaacgcca

SEQ ID NO: 1078 - DNA, 4001 bp, Homo sapiens
cacagttctggagtaaacactcaacacacacagcccccatatacacaaactacacccaagtgtacataaatctgagtacccacaccacacaaagggccccatataaggccccacacacagggcacacaggtacacaggtctactgtgtacgtacacagcactcacagatgtcattcatgtatataaacaaagggcatccgagtataaacacacataggtacacacaccaagcacacccagcccgcacgtaaacacacaacacccacagtccctgctctgtatatacacaaacagtaaccaagtatacacacgactatgtactcacacgtcactcagagccccacaaaaaacatcccgagtatacacatagcccatagtaaatacattgctctcgcctccatacccaaaaccccacttcacaggaaaacaaaccactcttttcatgccaccacttgaaccaggtccaggaagaagatatcacgggaaatcaggaaggagagacagctggcatgagttacaaccatattcccagaaaatcctaggggggatgcagaccaaggagatagcctcctgggtcccctactcacccatgtggctgccccttagtggaaggatgggcaggggaggggagaagaaagacccaggcccctccacccgcccaagggagctccagtctctcttggggaaatagtcccaggtatccccctctcctggaggccctggccctggccctggcccctgttgcagaggagccagggatccattacaaaggatcctgttacaagccccgcctgtggaggggctggccatctaatcctggggatggggggctgtgtcagcactttgcagccccagccccccctttaaatgaaacccacaacataagcaaaagcgctggaagggtcatgtgaccttggtaacaccttataaagggacgggaacaaaacaagccctttaaagggccatgctccaggagcagggtcttcagttcagaaacctgcctttcctcctccctcagcccattcgtcaacagccagagctcctgccctagggagtctgcaggaatcccacaggtcagagctaggaggcccccaacagatccaaccagaccagtgcccgagatccccagattttacaagtggggaaacggttcaaaggggcaaggccttgcctaaggtcacccagcagtaggagtcagactgaccctggactcaactccaggttcccagaggggactcccggatcacactcagagtaggggcccccaaccctcaaaagtccaataaactcttgtccctatgtcttaatccaggtctgaaagcccaattcctaggagaaggaaggaggaacaggcccctccctccaaaacttctccattcccaggcctctaaacaggatttcactgagcaggcttcccaacttccagtggtactactctcctctcttctgggccgcccacgtcccatcctccccggcacactaggaaaggctagtacatcttgactgggaggctgtacccagtaaagtgtgggtaccccggcagggaggcaagtctcacgggagggctgcaggcttcaaggtcagagacacctggatccatcctcccaacccacaagcagggcccagacaaaggcagcaacaaagcggctggacaaaagcacagccggatgggagattctggcctcattatcagcccccagccccaccccattacttttgcccagccttgattcctcattctacataagggtctgggaaagggaggcatcgagcatccctcccctccccccaagccacacccactcacccttcttcttaaacagccctaggagcgccgggaggcggcggccaacgaacaccaccatgactgcgggcgccactcgagacgttccctatcccaccctgcctctccagagcagagcgcggggcgtaccttcactgtaacccagcactatggggatgcgagccctcccgccccgccgcagagcaccggctccagacagaggagggggaggggctgctctccatgtcctcctcccaccttcgccactgatcccgcccatctgccgaccccaccccttaaatggggtgcaggggcacagaaaggcaactgaggccaggagtccgtgggtgctctgctccagtagagtatgattaggaggaccgaagatactcaatccagcagcagatcactcaccctgcctgcaagtccagagttaaggcaggggtcccagctgccagatggtaggtggaggggctaccagactagacttggcagggtgcccacctgcaagcctcctggctgcctagcgtaattccctggggaaagagctcggagcctgcagcagccaggcaggagcccagagctgctagtgggatggcaaggctgtgggcagaggcccccagaggggcaggggccagtcccaggacacagtcctgggaagccagggagatgcccagagcagaaccacagtggctggcagtacagcccctcatacataggttcagccccacactttccaaaggactttcttcctactttggcaatgtgacatcagaagcccagagaaacacagtaaactctccaagatcacacttaatcttgcagaggctagacttcaaagcagacctccttctcccctagcctggaattcttcacattggccccacgctgtcagtgattctgtcctggatcaccaggcagggagaacagaattagccaagaaacagtccatgggtgaaggcagtaaaaaaggaggtgaggtggagaagtactggaaaagaagtcaggtcgaggttcaaatccagctccatcacacaagtcacgatctcatatgaaaataaggctaataactcctctttttaagattgctgtggctcacgcctgtaatcccagcattttgggaggccaaggtgggcagatcacttgaggtcaggaattcgagatcagcctggcccaacatggtgaaaccctgtctctactaaaattaaaattaaaaattagcttggtgtggtggtgcatgcctgtaatctcagctactcgggaggccgaggcaggagaatctcttgaacctgggagccgaagactgcagtgagccaagatcccaccactgcactccagcctggatgacagagcaagactccatttcaaaaaaaaaaaaaagaaaaaaacaagatggttgtatccattcacttgatcagcaaacatgtgttaacctagtactagggactatagttaatggagaagaactttatcttgttcaccagtttatccccagaggctaaatcagtgcctggaacatgttatgagttgagttcaaaaaatatttgatgaatacatggatgaggtaaactaacaatgtaattttgggtagtgaagactccagagctgtaacaggaagctttggtggggccggggggcggggagagtggtttagttaggttgtcaagaaaagcccctctaagaaaagaataggctgggcatggtggttcacacctgtaatcccagcactatgggaggccgaggcaggaagatggcttgtggtcaggaattcaagatcagcctgggcaacaaggcaagatcctatctctacaaaaaactttgaaaattacccaggcgtggtgactcacagctggggtcccagatattgggaggctaagacaggaggattgcttgagcctgggaggttggggctgccgtgagccatgtttgagccactgcactcccgcctgagtgacaggcatctttaaaaaataaaatcagccaggcgcggtggctcacacctgtaatcccagcactttgggaggccaaggcaggcagatcacctgaggtcaggagtttgagaccagcctggccaacatggtgaaaccctgtctctactaaaagtacaaaaaaattagccgggcgtggtggtacacacctgtaattccagctactcgggaggctgaggcaggagaatcgcttgaacccgggaggcagaggttgcagtaagctgagatcc

SEQ ID NO: 1079 - DNA, 4001 bp, Homo sapiens
gggccacctccagacctggagaaacaacagccaggggcaaggaggtgttacccatgcacgtgggctcaaatcaggccgacatgctgcccagaaagcccagagccacctgataccaaacacaaggcaagagggaggcctggccactgacccaatgaacccaaacccaggctgttggagcagtgacctacaggctcagcttttccagccccctgccttccaggctggtctcccagaggaaaaaggtccattgccctggagtatacactgctagtccactagccttctgcctgccaatcctgacagtctgaccacaatacatcctgctgcaatgccctcttgaatgagacggggatgacttcagactgaatcccagtggggcagccctgggacagactccatgtcctgttaggactgcagaggctttggaaacacccctcacccaaatccagtcctccctcagggtttggcccagtcaccccagccccagcaccctcacttctatgtgtggctgtgccgcagggaagcagggcccttatccaaaaggaagatcaagccggatacaatcacacatgaggctttccaccctcttcctgacccctaaagtgttccttctaactctcccagaagaggtggttaaaggacactgggagggtaaacacaggcagaatgggatgggcccgcacacccagccatttcctcacctccagcactgcagcagcagtctaggaaaggtggacttcccaggacagcaagccccaagggagctccaccctcttgcaaagactcaagccctccccatcaaaaggaagacagaaactggaaaatgagggaaggcccaagaaaggaactgaaaatgaccccagcagggatgggccaggtcggcttccccgcctttcaggctgcccgtccaggccagaggaggagcccagggactcaaattcagaaagactgagaattagctgttgaattttaagtacccaccccagcccaggtacagcctctccactgagcttgggcctcagtttcccccatctgtaagcacacttccgacactggcatgtttctccagggctggaagaaggagtgatagggaggggcgggttggttcaccttggtgagctcactaccccaggaggtgatgtttgtggcctggcccaggtgagcgttgagggaggccaggtgggaaaagccagcactgttaagaagctaaggcagggcacactgtgctccatgtgaggtcctttgtggggctggaaatccagatccagctggagctgaaactctttgtgagtgcggttgaccttccagacccagagggtccccaccagagacccaaggccacctgtctctcccattggccacaggccagcgttaagtctctgaccccctgactcagcagagggcagaacctcggtgagcctgggggagggggaatcgcctcaccgccctggagtcgggctaccagcacttcctgctctgccaggggatccctgccccagccgggggtcccctcccctcacagcggggcaggactgggtctggaaactgcggaaggcagcgcagggtggaagtgttcggactcagccctggcctcttcgctttccagcaccagctcctgggggtcacccccctccaacacgccgcgcgcggacccccggcagagccccctcggccgcaccctcgacgcccccccgcgctcagcccaggtgccgaccgccttacctcggcctttgcccttggccctcttggccttgtcctccgccttcttggcccggggggcggccggttcggcgccctcggcccccgccgccttcttcttgcgccgcttgccccgcagccagctgaaggcgcggcggaggccggacgcgccggagcgggacttcttcctgcgcggggggccgcccgggttccccggctcctcggccgcaggtgcggcggggggcgcgcgggccgccatggcaggcgggggcggagcgggcggcgggtcaggccccctgcggcgcggtgcccatgccgggggcggccgccggggacgcgcgcccggagaaaagtttgggcggcggaggccgagcgggcgcggagagcggacggcgggagcggcgcgggaggggccggccgagcggcgggcggggcgcaggccggcggggagggaaggagcggggcgggagcggccgcagggcgggagcgccgctgcctgcggcccctccccgcctcccccggtcccggcggagggcgaggtccagtcccgagaggagggggtcccgggagcccggggtcgtgccccccgctggggcccgagagggcgggtcgtggggccgcccgggagggggcggcactgaggttccgtcccgcagggggcaccgcgggagatctgttcggaagagggtggtatggggtggggacggaaaggggaagggcgcaggaaaggaggagcgagaggctggggttggaccccaggagacttggtatcccaagtttgggctgggaatagacaggggattctggaatattttttcctggaataagggaatttggagaattccttccaagccccgacagtgttggggcgcttgcgccaggaatagaggcttcagacacgtccaagacctgtgacccgcagtgggcatttccctcccatctgctgactggggtcgcctcctcgctctttaccacaccttccaggctccaaccatcttcggtgtgcagcgggggcccaggtccactgtgttcctgcctcaccctttggtggcaagatgaggatagcccttcctccgtttacccttggactaggatttgaggccccagggcactcctgcctggaccaggagttcccactgagatgctcaacactaattagggttgaactctgggcaggtgagaggtgtgactgggaggctggtaggaaaggaaacattaagaatcctgaaattgctgtactcattgcctacaggcctctgggtctattacagctgaccaagcccttttatatcatctgatcccacgacaacggaaatggaggccagaaggggacagaggtggtcagcgggagaggagccaagatggtcatctgggttttgtctcaggctggtccaaggcttcaaaccctaaggactagaaattgcgctggggaccagctgtgggttcagcacccttgaacctcctccgtcagtccccagaagggccttgtgatgtccataccagtggggtggccagaatcacccaatctgactctggtcacacggctttctcttggtcctggtctccacgagggcaggggcccatttgtctgggccacccagcccagtcagccccggcgcactgtagatagcactcaccataacattgcaggattactagagtgcagtgggatctccctaacctgccttagccccctgcatgtccccaggggctcagctgtggtgaacctgggacatcattgacactctcccacctgggggccctggggcagaccacccagtgtccatgctgggcctcagtttcttgtctaaccaccattcattcagatccagcccacaatcccagagcacccattctggatcaggaaccagccctgtactctgggtgctcttggcccagcctagcactcctaagaacccagcctcttcctctgttagttggtgaggaaagggaatgtagagaatgcagttttcaagagaaaagtgttacaggtgccaggcatggtggctcaggcctgtattcccagcactttgggaggcccaggcaaatggatcacctgaggtcaggagtttaagaccagccagaccaacatggtgaaacccggtctctactaaatacaaaaacttagctgggtgtggtggtgcatgcctgtagtcccagctacttgggagactaaggcaggcgaattgcttgaacccggtaggcggaggttgcagtgagccaaaattgcaccattgcactccagcctgggtgacagagcgagactctgtctcaaaaaaaaaaaaaaaaaaaaaaaaaaaaaa

SEQ ID NO: 1080 - DNA, 4001 bp, Homo sapiens
atgccaggcgggactgcaagtgctttcaaacacactccccccaataatcctgtccctaacacaatggcattattgaccaggagcggtggctcacacctgtaatcccagcattttgggaggctgaggcgggtggatcacttgaggtcaggagctcgagaccagcctggccaacatggtgaaaccccctcctccattaaaaatacaaaaaattggctaggcgcggtggctcacacctgtaatcccagcactttgggaggccgaggcgggtggatcctgaggtcaggagtgctgctcacctgtagtcccagctactcaggaggctgaggcaaggtaattgcttgaactcgggaggcagaggttgcagtgagccaagattgcaccactgcactccagcctgggcgacagagcaagactctgtctcaaaaataaaaaaaataaataaaaataaaaaatacaaaaaattagctgggtgtggtggcaggtgcctgtagtcccagctacttgggaggcagaggcaggagaatcacttgaacccagaaggcggaggttacagtgaggcgagatcccgccactgcactccagcctgggcgatagagcgagactctgtctcaaaaaaaagaaaagaaaagaaaagaaagaatggctttattatatacttctacagatggagaaactgaggcacagattacaatacacaggtgctaagaggaggcccagtttggaaaccaaagcttctcattccaagcccaggccttttccaaaacatgtagtgatcacttaaccctactccccttattctgtaaatgataatgttccatccccagaggctaggtggcttgtcagcgctgcacagatccttagcagcatggctgatgtttatcccttcacaaggaatgaaggtgagcaggggtttgactcagggtgttgcatgcatatctacatgccacagcgttttaatattgattctaccttctgagaaaaatacaactttaatatcacacatctagatgtccccccccccttgaagtaaactttgtgcataaaaatccttatgtgtatacactacaaattaggagttatccacttcgtaacacggaccaagtattcaccataaaattctcttaaatggcaagtctctctgtagtcgtttattacaattcaatttatacacaagctttcaggaatgcacatattttataaagcaaaatacacatataatgcgaaatgtcacaccagttttaagccagtaaagtttaaggattatctttaggaggacagaaataatttgttctatgagttaatctagaatgcagcaagtttctctttgcatctccttcttctcctctaaagtccaatccagaaaacaggggattagaatgtaatatgagcaatttctgttaagttaaaataactttttgtttttggggaggctgaagccagaggaggccgggcttgagcccgggaggtcgaggttgcagtgagccatgatcgcaccactgcactccagcctgggcgacagagcgagaccctggctccaaaaaattaaagtaagaattgttgatgggtaaactctggaacagcacgccagagaccttaaagaatgagaccctcccactggagtcccctgggcacgggctttcgggaagatcggtcagctcggagctgcctggttctatggcccaagcactgtgatgtatttcccctaactcagaggggccaaacgaagatggacgtgaagggcgggcctccccacgacccttccagctccgagcccgtgggaggcccgcttcccagtggccggggcgacctgggctccccgctcctccgccccgccggtccgccacccccgcccggccggcccggcgctgcctcctctatactcactgggggctgccgcccgcgggtttggccgccgccgcctctgtcccctccatccctcggagaggccaggccctctccagccccttctccctcccaggccagctgctgggttcggggagggacttccagccccgaatccggggccggagggagtgcggcccgcaggcctcgcccctcggggcgcggccgactgggggtccgggacggcgccgaggccgggccagctcccggctctgctggcagcccccgggccccgggtgggtctggccggcgcagcgccccacgggccgcactccctcccggcgagaggacgggaagcggggtcgggcagggagggcgctggcagggaaggaagtggcatcagctgtccgttcacggctttgccgtggaggggaagagcggccaagcccgcgccttcccggcccgcgctgggcagagggagccgagcgcggagaggtggggccgcgggaggggctggaggagccgggcctcggcctcccaccccgcccggagccccgcggggccgcctctcctgagccgcggcccagggagcgagtgtccccggccgtcagaggcgcgggatggaagtccagggcggccccgagcttggggacgacggggcggccgccagcctcgcagggcggtggccccttccccgcgggaaagcgggcgcaagagcggaggcgcgcggggcgcacggaggccggggagcgcgggcaggagctgggggcgcaccacgttctcggcgggctccgcgcgccgctggtaaccctacacccagggctcgcctttcggggtggaagctgaggaatgccttttgtgtggacaagttttccagaggagccggccgccctctctgtggggccgtccatcgctccgtagagccgtttcctccgaggtcaaggtcgttggttcccgctctccagaggcgtgagggaaacccggagggaacgcgctccgcgcatcccgtctgccgcggtgccggaattgcccgccgccgccttgggtggggaccggttctcagggtcctgggggctctcgagcagatcactttccccagcgcgggacgggggtcgcaaccaggggcattccctgcagccgcggcccaaaccgacggagcttgctttctccttccacccagagggggtgaccgagcctcacctatttccaagcctattttttcacaaagacgggaagcaataaaagtggcctcaggagattccggaaatctctacaaagagaaagtgcccgttcatctttccttcagccgactggcttcactgtgaagcatggggtagttgtgcacctccagatgacaggacagacacagcaacagtaagggccgcgcaatatgtaccggggcaggggaggaggggaaggaagttttctagaggggctgcctcttgagtcaggagggggttactctgcacaaggtgggggaaggggcgtctggcagggcaacaggagagcggagcctggggagctgtgagtggactggcgtcttggcaatctaggagcttgagagattatccagtgcaaaccctctgtgtcacagtacaggcccaaggttacgtcagaggcttcgaaccagagcgactccatcttgtgtgagggcgaggaaaatgaggctgggacttgctgggccacattcccagtgagttagctatacccagcttctagatatttacggttaagagaacaaattaataacgtttgctaaacagacccagacttaggagtgtcctgatatcctgatatcttgagaacagactcatttgtaattatgctttaaagttaataatatcgattattgcaaaatatagtaactaagaaaattaatcctttatcacaaacccttgtagcacagcacatctccccatgatccttttttatcctgtgtaagcgagtattgtacccagggtggatgcgttcctcctcgtactttccagaactccctcctctgtctatggagtagctgtactttcaccactttactttcttactaaacttgcttttgctttgcactgtgaacgcaccttgcttttttttttttttttttttttttgagacagagtcttgctctgttgcccaggctggagggcagtggggcgatggattct

SEQ ID NO: 1081 - DNA, 4001 bp, Homo sapiens
tgttattaacccaaaagtgcattacggtgcacaccagtgcctcttgtctggagaaaagaagccattgaaccaataataaaatcatatttcacgtagagacactttttttttttttgagacagagtctcactctatctcctaggctggagtgcagtggcgcgatcttggctcactgcaacttccgcctcccgggttcaagtgattctcatgcctccgcctcccgagtagctgggattacaggcgcctgccactacgccgggctaatttttgtatttttagtagcgacagggtttcgccatgttggccaggctggtctcaaactcgtaacctcaggtgatccgcccacctcggcctcccaaagtgctgggattacaggtatgagccaccgcgcctggcccatagagagacatttgaatgaaaacagtctttggaaaaggtaagagacatgaagtcatattttgaataggcaaacagcaacctcaatacagcacttgtaaagttgacgtccccgagtgcattcggggactttgatgaaggccaccgggtgaagacggtcatgggttccatataatctgcagaaggcctcggtttgcaaagtcctacccagatgaatcacctctggtattgaaaggccagactgccccctgaggtttctaggagatccaggtattttacaaatgtttcctctacaagcaagtctggtctgaacttttttaaaaagcacccaaaggcaagtcaaggttaagcgtgtcaccagccccaaagcaagtaaccaaggactagctggacttccgagccctgaaggcctgggcatgagttgctgctggcgccctaaggctgactcccacctctttccatctggtactatgtcctgtggagcccgcctgggctggcacggaggtagtcttcccccacctccctctggccccacttactgttgctggacttgaggtcccggtgcaggatgggcacgaaggcctcctcatgcaggtagagcatgccccgcgctatctgcacggcccagttgaccagcacgtgcggagggatgcggcgcgcgcggcgggggccgggcgcgcgcgggtccggggcggcgttggcagcggccagcgctcggttgagcgctccgccgcgggcgaactccagcaccaggcagaggtgcggctgctgcaggcacacgccgcgcagctcgatgatgttggggtgccgcagcatggcgaagagccgagcctcgcgccgcacgctctcggcagccgccgccgcgtcctgctccgggtcctggcgcgccgccttcacggccacctcctggccctgccaggtggcgcggtacacctgcccgaagcccccagcgccgatgagctccttcagctccagccgctcgaaggcgacgtgtaccggggagctgggccgcgagggcggcggcgcggggctggcggccgggcggcagggagccacgtagttggcggggaagatgccgaggcgccgctgcacctggcctgcccaccagccctcgtcgcccgacacggcggcgtcctgcgacagcacctccaccagctggccgcgccgcaggctcagctcgtcctcgccgcgagcctcgtagtcatagagcgcggcccacagccccgcgcccgccgaggccgagccgcccgaggaggtggacgacgaggacgctgagccgccgggggctcccccggccgaggacaccggggtgtcggtcgctcccgcggcgccccgcaaagccatgggggcagctgcgcggggaaggcggagcgggaagctgggctcagcctcccgggcggccgcgggcgcgcatcgtccggcggtgtggccgtcggcgccgggggaaggcgagggggtaggaatcgcgatcggtgacggcagagatcacgggctagctgcccaaagggtccagcctcggcccgcgttcctggccagccgcctctgctgccgcagcggtccccgaagccgcgggcgacgtcccaccatggtcgtgcccaggccctgcggccggcccgcccgccgcgcgctccttagccagagcctgggacgccccaccccaccctagccgcgccagggccgccccgccccctccggctccattccgcaccgcccccccacccccccgggcccgcccctaggccagtccccagggccttcccgcccctcccccagccgccccgccctctccaggttcattccgccctccttgacccgtcccgggcgcccagtctgcgcccgccctatgggaccgccttcctaggttcgccccacccttccccaccaactgcaccatcccgccccgccctcgccaggttcacttcccttttctgtgccagtccccagagcctcgtcccgcccctggcgcccgggcccgtcccccaccaccttgggccgggcccgccccctgggcccgcctggctggtcccaccccgcccccgccgcaggtgctccggagcaatggtgagccgcgcccacatggtctgggaggcgggatcggccgtcatccgctataaattttcgggagagtttaaattaagccaaaggtaagactgagggaggggacgcttctccaagaagcggtgggagagggttgagaagatgtggggctttagggtgtggcggggagagagagagttgcagttcagggagagtgacagaatctcagaacgggctacagaagaaattgtagcgcggtgccagacctgggccagtgcgagtggcaagtcaccatgctaagtgcgtttgagccaccgtgcatctcagaactgactaggttacagatcgcagcgcagagtgacccgtggtcggtatagtcccagaagctccatgatggtaaatcctttgcttatttttactgtctactcagatggaaaatgccccagtctccctggaaacccacaggtttgggtttaggaagcattggcaatggctgggtgccagacgttggtaggttactgtggcaggtgatgaggctaaaaagatagaagagcttagttattaaaattctaaaatattagattatcctgtagtaggccagaatttcctaacgtgtggatcctgtacttccaataacagaagggacaattttagatattatgaggataggacatacagtaacattctgagttacataaagataaatttattgtcttttcagttttctttgtctctcagatcaaactatttattggctgtgtgaccttgagcaagtttctttatttctctatgactcagttttctcatctataaaatgggaatataataaatagtacctactttatagggtttttaggaagactaaatgagttaatagttttacagtgggtcttctgcatccacagaatcaaccaacagctggtcaaaaatgttttttaaaaacccaaaaaataacaatacaaataatacaaataaaatacagcataacaactatttacagagcatttacattatattaggtattataagtaatctaactatttaaagtatgggcatactttggagatactgcaagcatggttccagatcactgcaataaagcaagtgacatgaattttttgatttcccagtgcatatatatacaagttatgtttccagtatactgtagcgtataaagtgtgcaatagcattgtgtctaaagaatgtttataccttaattttaagtactttataggtaaaatgtgctaatgatcatctgaaccttcagcaagtcataatcttttagctggcagaggtcttgcctctatgttgatagctgctgactgatcaaggcagtggttgctaaaagttggagtggctatggcaaattcttaaggcaactatgaagtttgtcacatggattgactttacctttcacgaaagacttctctgtagcatgggaagctgtttgataccattttaacaacaatagaactactttcaaaattggagtgatccttctcccaccctgctgctattttaccaaccgagtttgtgatattcaaaatcctttttgtcgtttcaaaatg

SEQ ID NO: 1082 - DNA, 4001 bp, Homo sapiens
aattttcacttttctaatgtctgtcttcctcccaaccagaatttaagcaagcaccatgagaacaggaactctggttcccatctgcacccccccatgcatagaacagccctggcagaagcattcaatagatacttgctgaatgaactcaactctctgagcaaccaaacacaaaggttcagacaattggaaccctggaaaccaaaacccctctctcatccagaacaggattttcttttctttaacagtcaacgagaggagagttttcatcgggcgggagcatctcaacctgctaaaagggattctccaacctccctgtgaaccagttgcagccacaactgccaggacgcacctcagcctagcaggggttatgtcaagaagcccacgtctgtcaccaggccgactgcggtgctgagcaaagaatcaggggatccacctgctggtttcacctctgcaaactgactctaaaacacttcactctgctcacatcaggccccatctaccaaaacaagtaacagaaagaattgacctttacactcaattgtccactacagtctcataaaaaccttctgaggtaggcgttattgttattaaatacaggcccagagagattaggcgacgaatccaaaggtcgcacagacactaagcagttgagcagattcaaccactggtgaaacgccaagcccaagtttcaaccaccccaccatcaccttcagtgtcacctctgcagacttgggagggacatatctagggtggaccaagcgctggccaggactcacctgggctgaagagctgagcccagaggagctggtggtcttgaagcagctccgccgctggcatgtccaagagctccagcatttccttccgtgccaagtcctgcagcgccttgagctccttggctgctttgcttttgagcacctgggggttaatggggccagagacgtgcaccacccacagcaccgtctcatccagctgcgtcttgggagccacttggaggcggttcaccagcttcttggcggccaccaccaccaggtgcaccaacccagtgggcgtaggcggggaccggcctgagtagaggaggaactgatggtctccgaccttctccagggtactggtgaaggccttgggggctgggccggcagtgggccccacagtctgcagcgcggccacgcgctccgtggggttgttgagctggatgcgctgcaggtagacgtggggtcggcccctgtgcgccagaaagtcctcttgcagcagcacgcagtcgcggccggaccccgcggcaaggccagagacggaggcgggcccggggccggcggccacggggccaggacctggggaccccagctgcaggcaacgcacgcggcgcagaagcccctcccgcagcagcagcaccgcctctccagcttcagccagcgcgctcagcgggcgcagctgcacgaagggcacaaagtccggcgccacggcgggctcccgctccccgggagtcacccacagccgattggcagccacgtccagggccaggaagccgttggccaccagggccggcactccaggacccagcggtaccacctcaccgcgctcccgcaggccgcgccaggcgcgggtggccgcctccaggcaggcagacggctcggcggcgcccggctcaccgcgggaccagggcagcaggtgcaggccgcccgccgcccgccgcgcgccggaccccccaaaccacagaagcagcagcaggaggccaagcaggcagaggaggcggcgggcccagctgctcgacagcagtcccggcagccccttgagccgctgctgcagccacatcgggccgccaggcgcgggcaagggtgcgagggcggccgccgggcccgccgcccagcccaccggcccggccgcccgcgcctcactgcccggcccggaccgcggcgcccaccccggcccccgccgcaaccgccgcagcagccgccacccctgcttcctccttcttctcggtggcctccagccgtcaaacgacgccggcggtcaagcgtcgccgtgtcttttacgacagatggaaaacgggagggcggagggaggagagagagcaggccggagagaagggggcggagccacggcgagggcgggacaaaagctgccgggggcgggaccactcgttcccaggccggaagagtgaagtccagtggagttaagtgcaggggtctggggaggactggaagcatccaattcactcgtgaaaaaaacatcgagccagccaaaccgaacacgtgttgggcccctttgctactgatggattcaacagccccaaaatttaaaaacatacacacacacacacacaacaactttgtttctgtaaaaatgaccatcctctcgccgcgcgcggtggctcacgcctgtaatcccagcactttgggaggccaaggcgggcggatcacgaggtcagcagtttgagaccagcctgaccaacatggtgaaaccccatctctactaaaaatacaaaaactagccgggcgtggtggcgcatgcctgtaatccctgctcctcaggaggctgaggtaggagaactgcttgaacccgtgaggcggaggttgcaggcttgcagtgagccgagatcacgccactgcactccagcctgggcgacagagtgagactctgtctcaaaaaaaaaaaaaaaaaaaaagactatcctcactgcaaaaaaacacttggaacaatacgaaaaagtggaggaaaaaaaaaggagagagaagaagaggaagaaagaagaagaaaggaaaagggaggaggaggggaaggggaaccaccagaggccaggagtggtggctcacgtctgtaattccagcactttaggaggctgagatgggcaaatcacttgaggtcaggagttcgaaaccagcctgaccaacatggtgaaaacctgtctctactaaaaatacaaaaattaggctgggcacggtggctcacgcctgtaatcccagcattttgggaggccgaggccgccagatcacgagatcaggagatcgagaccatcctggctaacacggtgaaaccctgtctctactaaaaatataaaaaattagccaggcgtggtggcaggcgcctgtagtcccagctactcgggaggctgaggcaggagaatggcgtgaacccgggaggcggtgcttgcagtgagccaagatcgcgccactgcactccagcctgggtgacagagggagactctgtctcaaaaaaaaaaaaataaataaataaaaataaaaaaataaaaatgcaaaaattagctgggcgtggtggtgggcgcctgtaatcccagctacttgagagactgaggcacgagaatcgcttgaaccagggaggcagaggttgcagtgagccgagatcgcgccactgcactccagcctgggcaacagagcgagactccgtctaaaaaaataaaaaataaaataaaaactaaccaccagaaactagacttccccaaaaatattttgttaacagacctgtctagctgcatgcacaccacacgtggacacaaatccagccaagggccatcaatgtctccactacaccaaatcgtcttcttgatgtcagtcctaagttttaacttattaaataacataagacactaacgtctcatactttgaaaatggctttaaattgtgaatcatcgatgcaaaagataaatattgctttgtattttgggaaaaaaattcaatataagcacagaggcagacaatgggtgattgtttccactttggtttcagtacattccaaagccagacagtgcttcccagttgttggaaattaaacggtcatttgaggtggcctctggtgggctgtgagcagacacagaaatgtttgctgaggccagtgccctttagaaggaactgtccaggtggtcctacagtctgcttaccatttttattttttttattttttttatttttttttattttttatttttttgagacagagtcacactttgtcccccaggctaaagggcagtggtgcaatctcagctcact

SEQ ID NO: 1083 - DNA, 4001 bp, Homo sapiens
gttattttaaaaaagaatgttactaagaccctaagctcttctttggacattcatttgatttccagccatttcttatgtatccatttctgaaagtatctgctaaactaaaagaaaaaaaaaagatttagatcacacagactacaaacaagctttaaaaatatagagagaacatcccattgtgtaagtaaattcccagaggcatacattacaatagatcacaatctgcagctcagatactgcttccaagcaacttcaggcaagtctctcagagaacttaccatcattattcaacaaatattgactaagtttccattagtgccaggccctctgatagatactgtagacttcaaagacaagaatacaattcccatttctttagtctagaagaaatatactgataagccatatatcaggccaaatgtgtcaagtgacttagaagatgtaaaaagtgcatgccaacatagattttcaagtacttccagtgtggggaatgggaaggactaaaggaaaccctagcacctaaatcagagtgtggagcaaagtatttttataaatacctgctacacgtattttttttttttgccaatgttccataagaaggtttattttattttatttttataaaaatattttttttgagatggagtcttgctctgtcaccaggctggagtgcagtggcacgaccttggcttgctgcaacctcctcctcctgtattcaagcaaatctcctgccttagcctcccaagtagctgggactacaggcgcccaccaccatgcccagctaatttttgtatttttagtagagacggggtttcaccatgttggccaggatggtctcgatatcttgaccttgtgatccgcccgcctcggcctcccaaagtgctgggattacaggcgtgagccaccgcgtccggcccatgtatgttgaatacaggaatgcctatagagaagattgaattgattggtgtcacgaggcagattattcccaagtaccacaggcagtaagtacgataagtactgtaaattaattgtgttgagaaaaaccatgcaagattagataaacagacaacctgccctttagcagtaagacaacaaattagacagaggtgtatgtaaatatacagcaacaatatctatcaggtattaacgttttaaagaaagggaacagcagtgacagctaagagacctggcttttagtcagctttgtatccaactccttacaaggatgtaaacaagactttaaatttgcatgccgggttctaacctgtaaaatgacactggttcaaactattgcaaagattattgctagcgaggaacaaattaatggaagttcatttttaaatgaggcttttaaatttttacataaataacagtcattacaaaaaaaattcgtcagcttataagcatctcccatcaacgtttcaactcaaaatacagaattttcctgttatgaaatgaatttaaaggcaaaaagaagattctggaaattctcttgcaactaaaaaccatttgcgatttgcacaaatcaatacggtttctgtttgaggagtttcgccatcagattttaaagaggactggaaggaatacaaggaaaataagcacaatccaaaccaaaacatccggtgattctgttctttctctgctagtcattaccaggggctatgactaagaattacctcttaatgccaaccgactcggggagactcggggagaagcccacgggccgagaggccctgaagtccggcttcccggtcccagcagagacgctgccttgcgcccttcgttcggggaccccttcgccgccgacctggaatgctgaggaactgaatgggggactggagctaagaccacccgcccgcagagcagtggtcgcctgtagggaaagcgtccgcacgccctccccagtgccgaaacttcgcccctccgcagggtccggcaccttggggaccccctcgacacagtccccacgccactcaccacctccagcgccggctccccagaaggccgcaatttgaatgggcgccccgccttctgattggctgctgggcgtcgcgtcgggtgccgcgcctttgcttccacccgccccccggaagtgccggtggttgggctccggtagccgtctctgaatgctggactcgccccaccctcatctcccaggcaacgctccctcccctcctcgggttctgctaaagcgtggagcttggccccctttaaatccgaccagaggaaggggcggcggtcgcgggcgcagcgggcccctcgttgaagtgggtgtcaaacgaaaagcatgacagtgacactcttgtcggtctttaatctaaaagaagccattacatcgaagacttcacattgtaaatggatatttgcccccaagttaatcataataattaacttttctagtgtttcctatgcaaggcgttcacgtaggaaatatgctaaatgtcttatatgaatttttaaacagtcctgaaaatcttgtgagataaatattaatgttatccctcgtttacagatgaggaactgaggtttagagttaaacttgtgaaagatcagacaattagcagtggcataactagaacttgaaggttcttgccgccgtacaatgtaactccgtttcagtaaaagttccctttttttaattttttttttcttttttgagacggagtctcgctctgcagcccaggctggagtgcagtggcccctgcaacctccgcctccctggttcaagcgattctcctgcctcagcctctggagtagctgggattacaggcgcgcaccaccacgcccagctaatttttgtatttttagtagagacggggtttcaccatattggccaggctggtctcgaattcctgaccttgtaagctgccaggcgtgagccactgcgccgcccagcccccataagattttgaaatctgaaaaaatattacaaatacattctgaaaaataaccaaataaatgagaaagactagataaatagatattgtaaagcaacaatgttttttaaacaggcaaaaagtacagagatattgaagaagtattcactgagatagagaccataagtagctccaattatatagaccaaccaaacagatgataaagtactcattctaaatcttactctaaaaatcattctaaaactcaattaaaattaaggtataaggaaactatcagaaaatagaatataatatttatcagggccaggtgcggtggctcacgcctgtaatcttagcactttgggagaccaaggcaggcggatcacttgcagtcaggagtttaaaaccagcctggctaacatggtgaaaccccgtctctcctaaaaatacaaaaattaggcagccgtggtggcgggcccctgtaatccccgttactcaggaggctgaggcaggagaatcacgtgaaccgggtaggcggaggttgcagtgagccgagatcgcgccattgcactccagcctgggggacaagagagaaactccgtctcaagaaaaaaaaaaaaaaaagttatcacatctatgggaaaatgatcattcaatttagaaacaaagcaagatatgtcaaagaaaagacagacaaactcaaatacataaaaattttaaacatatgtataattcaaaataataaaaataaaatgtaactggaaatatatattaaacatgacagaagacataaagacctttttcaattttaaaaggaaaataagctcataaatagaataaagcaagtatttttttaaatccaccagagggagacaaacagaaagaaaacgtggaaagagtcgaagtaaaactggcacgtttgaagctttctggattatgtaagatttaaagaaaaatgattaactcatgctaattaatgatctcttaagattaaattttttttttttgagacggagtttcgctctagttgcccaggctggagtgcaatggcttgatcttggctcaccgcaacgtccgtctcccaggttcaagcgattctcctgcctcagcctcccgagtagatgg

SEQ ID NO: 1084 - DNA, 4001 bp, Homo sapiens
gggcagattacctgaggtcaggagttcaaaaccagccttggcaacacggtgaaaccctgtctctactaaaaatacgaaaaattagccgggtgtggtggtgagctcctgcagtcccagctactcgggaggctgaggcaggagaatttattgaacccaggagattgcagtgagccgaggtcgtgccactgcaccccagcctgggcgacagcgcgagactccgtctcaaaaaaaaaaaaaaaaaaaatcaatatcttaaagggtaagagcagcacctgcggggctctcacagggtgcatacagggcttctttcgtgcatgggcacaggaagcactgccatacacaggtgatggcccaatgtctgcctgcaatgcagggagctggacacgtacaggtgattctcgtggcgggctatggggcggggcacacagcgacaagagtccaggcagccagccggcagggacagggagtacaaagaagcgaaaacaggatggcacaggaagaacgaagcacagctttccaggcggcaaagacagggagaactgggggagctgggagtggggctcgtactttgccaggtgacaggaagaggaaggcattccaggctgaggggtcagcttgagtaaagccacacagatgaggtgtggagagcaggagggactaggggaggggtggaagatgaggcctggaaggaagagaggaggcaaacccggtgctgttcccaaagtcattcccaaagtcattcttcattcatcgctgtttctattcattcgacagggactatgctcagcctacggacaaagtggtgaacgaggcagacacagttcctgcccttgcagagctcatgagcttgcaaattctagaccttagtgtgggcttggggtggatcctgtatgggtagattggcccagagaattgttctgagaccccaagggcccacatggcatctatgcccggttccactgcaaagacccatgctgtaaccaaaacagggctaggtgtgccccatcttgccagtgagggaagataaaaagtcaccattcggccggacgcggtgcctcatgcctgtgatcccagcacttggcgggcggatcacttgaggtcaggagttcgagaccagcctggccaacatggtgaaaccccatctgtactaaaaacacaaaaattagacgggcgtggtggcaggcacctgtaatcccagctacttgggaggctgaggcaggagaatcgcttgaacccgggaggcggagacgctggggatagtgcagacccggaggcgacattagaggcaggctctggttgtgtcccgcctggacaaaagcctccggacctacctgttcccgtccgcctgcgcccctcgagggcctttcctcctggctggggggcagcgcagccccctggggactctcggggcggcctcatgccctgccgcctgcagggcggcctgccgggcgccctcacctccaccagcggataggcgatctcgttgtagatctgctcggtgacgtggtccacgtggtaggcgccgtcgaaggtgaactgcttgggcggctcgtcggcggcgcccgggttctggatgcagcactgggcgcgcgcgcagtccacagtcaccacgggctggcagcgcagctctcgctcccgctggttcatgggacggcagcgcacgacaaccttcaccgcctcggaggccatggcgccgcgcccaggaccaacgggaccagagctgacccccgccccgccggggactcccagcagcccgggccaaggggcggggccagcgccggccacggggggcggggccttgaggcaggggcggggccgcggcggggggcggggacccctcggggggcgccccggaggggagctgggcgtcgcaggacccgagccggggccgccgcttcctcccgcgcccgggctcgcccgtttctgaggcccggcccgagcggggacgtgggggatccgcgctgcaggcgccgccgcagaacccgagcccggagccgccccagccgcctgcccgcaagctcaccgccgcggcgttcgcggttgctgggcaacgcccgtggcgtcacaagagcggccccgggaacgccccgcctggcccgcgagcttcgcccgagtgatccccgcagccacgcgcggccgcttgcgggaagcgccagccctggctgggctcctttcgcgtccgctgccttctcgaatccgcacagtcccagttcagagatgttacgcagcttgcccgaggctgcggctaagactggggcccggggccccaggcttgactccacctcggggctacagagatcccaggcctcaggcacgggccagggacctaggaaaagcggcaaggacctgttgccccttatccacgtccccgtactggctcagggaaaggctgcccaccacccacagcccctggacagcttcctctcatgccacccgtgttatttctaagacccgagattgtaaaacaaacactttgggagcaagtcttttgggccgggcgcggtggctcacgtctgtaatcccagcactttgggaggccaaggcgggtggatcacctgacatcaggagttcgagaccagcctggctaacatggtgaaacccgcgtctctggtggtgggcacctgtaatcccagctactcaggaggctaaggcgggagaatcacttgaacccgggaggcagaggttgcagtgagctgagattgcatcattgcactccagcctgggcaacaagagcaaaattccatctaaaacaaacaaacaaacaaaaacaagtcttttggatggaaggctgcctggcctatccctcctggctcagtgcaagttccccagccaaaagagcacctccgtcacacctctgggcgctgggctcttccttgcactgaaacactgagtgtcggctacatgtcaggcaccgtgacagatgttagggagacagccctcctgcatgatctagctggagagacagacacaggaaacaaaatcccacaaacaaaatcccgaaaacgaaaatgtaattacaagctgaataatcagttccatgcaacatatctttttttgagacagggtcttgccctgtcactgaggctggagtgcaatcatagctcactgctgcctcaacctcaggaggtctcaagcgatcctcctaactcagcctcccgagtggctaattttttgtagagatgggatctcattttgttgcccaggctggtctccaatttctggactcaaacgatcctctcacctcggcctccaaaagtgctgggattactagcacgaatcactgcacccagcctatggaacatctaaaaaaggaacctcactcagcccagggtgtagggcaggcatcctgagattgactggagctgaaatatgatggctgagtggttaacaaggtgaagggaagggaggaggaggaggacgccggtctgggctgtgcggaggtcctgtggcacattgcagaagcagaaagcaagcccaggttgccagtgcagaaggacttgagtctttttcctatagatatatccactgaaagttgcagcagaagaggaacgtaaattgattgagtctccctgcgcaattccttctgagcccttgaggacaggacctctggttcaccattcagcaccagctgaagatacgtttggcaaaaacgaaatagggaaacgacaaaaacctcacctttcgaaggaaagaaaagtctgtagcagacaatctgaagcaacacattttattttgtttcaagtccacacagcaaggaaagtggggctaccgaggtggcgcagattggaacaaagagaaaactgtggtctctgattaagacatggagtctgcaaacaggggccaaaaaccttgccctctctgtaacacgagatcaatctatgctggctggagggatgttaaagtgcttggtggagactggtcccttcagtgtgctaaacatggccctgatagcttctccacacaggtaattcaccagtaaaacccatccctcacagaggaga

SEQ ID NO: 1085 - DNA, 4001 bp, Homo sapiens
ccactctgttgcccagggtggtctcgaactcctgagctcaagggatcctcctgtctcagcctcccaaagtgttgggattacaaggcatgagccaccacacccatcccaaaattttttacatagttcaacctgagaagttatgagaatgtatttatgaacaaattgaacttgaatgaaagcaaaggccacaaagaagaaagcaggcatgccatctctccaggtcctgtccacatctaggatatagaaaagaacagatctacagactcatgctgaacccagttattgatcatctccagacctgctttacaataccaacctatgtgtaattctcatattccaccttcaaacaatacattaacaacacttgctctataatccagcaaccatatcaacttaatcagaaagcaccacctcacttcttagaggaacacaagaactagattttgttatgactaaactaaggagacaaaatgccagcctttaaataaaatatccaccatgatatcacctcttaagagttattcaaatctcatcagcacactttcatcaggctcagacaggcacatcatgacacaaagcggaatgttcaatggtggcagaacagctgctcagagcagtaagagatatgagcaagggatctgttgacaatctaatttcagctacctcgagattccacaaagatgacagcctgcgtcctcagaaatgccgccactagcctcgcccactatcagaatactctggtttacttcttctctgcaagtcgagcgactctgaaaatctatccatccaatgctctacggctactcgaggcctccatactgatacagtggccttagcaattctcagatcggcctatgcacatgtaaagcatcagcaggcctttcacagcccccgcactggacgcagaagatgaatagagaaacacggaatttcaccccaacaagaatggaatcttgaaggcagtttaccttggaagctcatttagcaatcaaggaaaaaaaaaaaaagggatctggaagctccattctggcgttaggggcgggaatgttttgtgttgcatgaacaatgactagcttgctcaagcagcctcccaacccccacaacttggcttctggtctggccagtcaccctgaaagctgccagggctgtcactcggtgccttccaacaactggacttggctcctaaaggatttgtcagatcatcctcccaatatggctgcccgagtaatcccagtcggctgaatgccgagaccacaccagccttcctcacacctggccagcatccaacaagccccctcccttcctatcgcacccctctttccaggcctcgagccctcggctcccccagcgccaagcgatgacctttcctatcgccatctggcaaagggcataaccacattcccagccgaagcccgatgcccaccacaaaggaggaaaggggagagggaaaatgagaaacgatggcttcaaacgaagcacagccgccccccgggctgcaacgtgcgcggagcccagggaacggccaggcagcggcgggtctggagagcgctgggcacagccggggcctggcagcgcgggggaaacggagggccggtgcagggcactgcgggggccccagccgaccgctggacgccggcccgggactcgctgctggcctagggaggggtcccctcccccgagggcgaggctcccgcacccggcgcccgtcccgcgctacctcccctcagaccccgcccggaccccggcccggccgctcctccccgcggaagcggccccctccccaaccccgcgaccgcggcgccaaccgcggccagccccgccgccttacctcagccgcgctgcagaccgacgggcggaccgggtcaacaggagccgcggcgcgcgggggcgcggggggccgggcaccgacgcacctcagcgcgagcagcggccgccgcgagccgcagggcgccgctccgcagccccatcacgcagcagcccggcaccgcatcgaggtgggaggtgggcggtgggcggcggacaggagtgcgcgagtgcgggaggccagggcgcggcgacggccggcggtgacggctgcggaggacggggagctgctccgacgcgcgcgggcgcctcccaggaccgctgccgtcacactgccccgcttcggccctcgcgaaactccgcccgcagtcgccggcgcgggacaccgccccgagctgggcctctgcgcgtcacctcgtatccgccccggcgcccgcgacggacacgggctgtgaccaatcacagcacagagctcggggcggccagccaatcgtagggtgagccggggagtggggctgctgcggggggctgcaggaacatcgagcgccccctggtggccctcgggccggctcaaccaggggtgcgggctggccaaagccggagcccggagttccctcccgggtgacccccaagggcattcgtcggaatcagccgcccccagccaccccgataatccgccttatacggggacaaaagattgactgagtggagcggggcggggcccaggggtcctgacgcccgcagaggagctgggatcaacatgggaggcgccgagagtggaatcattgtccgtcggaaaacatctcgcaggcggaaccggccgaacgcggcgcggtgggagcggaaccccgagaggggatgagcgcatcccgcgggaagctgcctggcctattcttacagaacccgagcaaaacacctcccacgcgccacctcgggagagaaggcggaatgagtaatggaaaagcatgacttggtgggcattccacttgtctccttgggagaccgcggaagggctgtgaggagaggaacaaacgctttgcaccgtccctgagttaacgagcccagcccccttctgggagatgcccttgaaggagggagagtggaagttagaaacccggaggacacaaaagcacgagcagtgatttctttaaaatcagatttagattcagctggaaagaaaaatctcactgttcagaaactgttcaattcagtacttaacaaaatataatcttcagtgataatatattcaattatcaggcccaggccgagcactattactttataaggttgtgaattatttttatttactagcagacattgaaagtaaaatcacatgtcttcccctgaattaaatacagtattattgtgagtaaaaggtattatgtacaagcatatgcactaaaacatcgaaattaattttctacactaataattctggaaaatctccaccaccactcaagtcctcagactcttcatccgcttttattgatcacgtctcattttatagaatttaagctccacctacctgcaaaaggatttgacatagcttacactaaagcatacagcagtgaaaccgtatagctttaaaataggcgtaaaattcataataatgaaacaagcaagagactttttaaaagctgtttgaatgagaggcatgcctagaaagaaaaatttttttgttttgttttgagacagagttttactctcgcccaggctgagctcagtggcacgatgtcaaatctctgcaacctccgcctcccaggttcaagcgattctcctgcctcagcctcccgagtagctgggattacaggtgcctgccaccacgcccggctaatttttgtatttttagtagagacggtgtttcactatgttggtcaggttggtcttgaactcctgacctcaggtgatccacctgtctcagcctctcaaagtgctgggattacaggaatgagccaccgcgcccggccagaaaaacaatattttaaaaatccatagtcaaggaaatatgttgccactgagcacagaactcagctcttagcttcctgacggctaagagtaaaatgaaactatagtaggttaataaagaggaactcatcaattcaacagtagacaccacttcatcatagcgtggacctccttgcgtaaatactgtggtgagcgccatggagagttacgaaaacctgggtggctgtattgct

SEQ ID NO: 1086 - DNA, 4001 bp, Homo sapiens
tttgtttagctctctccagcaagatggaatctaaaggaaaccccctgtggaaagggcacccccaagccccttccttcccagccctcattcacaatgggtgggggccagagcttcatttcccttttatggtgttctcggactctcccaatctgctgcagatgccatatttacatttctcactcccaccccccagccatgcacccctccctcgacctccacaagatcctgctgcaatgtcagccccagcagcagcctggccccgccccagtcagcccaccaggcacctgcagggctcctctttgtctctggctgctcagggccaggaaagctgtgctcaagtgattcttgagtgctgcctagggtgcatgggtgggggtgcctcaatctccttcccttcacccaagcactgatcagtgtcagctcctctttgggctgcagaggcctggccaggtggccgtggcaaggggcatctgccctggggcaggaagaagaaagctttttcattgccatctctgactctgtctaggagcaacctcctaggacccctggaatctgggtcacatatgacccaagggatctagagacctgagagacctaccctagacctggacaatcccccgccccctccatcatacagggctggggcagagatagatgttcttgccacatccctaccttggtgagcagctccagattggcactctgccgccaagacacccctctcaaagagaaaaacccaaagcaaaaactgggagaagtggtgaggtgtgaagcatctccacccagcacaaagaacacagatggctcaatttcacagcatttcctgctcctgcacctttgtgtacccctcccaatagaacccacccagccatgtcctctccctgtctcatttctgccggctcaagtcccggagctgttgagaatggaaccccagataagtctaggcaaccctcccctgctcaattttatctgagtgcctgaggatggggcatctgcatcacaccctcctgccctctcagagagaagcacctcagatacacctcttcctcccttcctaggcccatctcctcttgggacaggactggtaggattctcccccaaagccattgacttcccacagaaggccaaggcatcatcccagcttttccgttggtccccgcacccgatctttgtctgcagatctggctcccagggtgggtgtgctgcctttgctagctggaccaagagcacataactagctgactcgcatggatgaggggaaatttccctctctggtatccccgtatgagacagcagcctcgtggggaggcgaagaggaaacgcacagacgctccggcctgggccagagctgggtgtgaaataccggatttccttgtttattcgattttctgatcattaagggctcccaagaggggcccaaaattaccacccaaacaaagccaccttccagtagtcggcggggtcgccgctcccctgcggcagactggccagcgcgcggcgccctccatcccgtcccacgccggcccctcctccgggagtgcaggctccagcccaagcggtgctcgcgccccccgcccaaagcccacgcgagacaaagcccgaggcttctccgcgcgcccccttccccgccccgggtccctacctgacggccaccttgacgcagcagtccccctggccggccatggccctctggagctagggtctgggcgtggatcagaggcgggggtctgggggccaatgcccgaggcagcggctgcggctgcgggaggcgggggcgcgggcgcggctggcggaggctgcggcggcggcggctggaggtgacatgctcgcgggcggcaggccgaggggctcacccgcggccggccccccggggctgggcccgcgcgcctcctcgcgccatcgggcggcggcgcggagctagctgacagccggcggcgcgacccgccgctccctacggcgcggcacacgcgcacacacctcccacccggcagccacctcccgccgcagcgcgaacaaagggggcgggggccgatccggccccgagcccgccccgagccagccccgagcccaggccgggccccgccccgcccaggagccgccaatcgaaagccctaatgagcagtgggggcgggactcgcgcctttaaagggacctcttggctcgcggccacggggtggctgggggtagggggcgggattgaagggtgggggtgggggtaggggtgggagtaggggtgggggcgctggacgcagaccacgttagaacctcggctcctggagtagcagaacctcggcttcaatgggaccctcatttcataaatgaagaaactgagattcaaagaggggaactaccgaaggttacagagcgagttcgtgggtaagcatggtaagaaccctggtctcccggggatcccacagcgattgacggtttatagttcaaaagagccaggaaagcttcccttctgcatttattccagtaaattcgccaacccttctcgaagggagttcttgctagcccctaactaaaatttcccccacctccaccctgcagcatcttaaagctcatgttttagttgattcctggccaggctcctagcccaagactagcccctccctactgctagacgactgtcccattgacctttatgacccacagatgaccccactgggcctggctcacactctgcttgttgtggctgtggggccagagggtcagtgtgggaggcctgagctgccctgggggaaaggagggaacaaagggggccctcagttccgagcacctgggtagagaggctgggcggtgaagtgggtggggaagggaaggagggcagctgcctgcaggaatgggtataaaggacaaggaggaccatggagactttaacgctgggcctggatggaggaggagaccagtgctgcaaagtcacaattcccttcccagtccatctccctccctctgagcccagacgcctcttccctgccccctgcctcccaacattggggccattcacagggcccctcaccagctgccctcacttcacccagctccctcccctggaaagggcccaagaggaggacccagctgcagccccagatgtggatggggatctctgggggaggggaggaaggggagtctgactccaggcctcttacattaccctcagatgatgaaaccatgtcagagattttggcaagggtgtggactggggtctgaggatgcatctgttggtaccatcttcctccccttccctcctccactcacacccccctccccgccaataactgcttcatgcagtagctcagatccctgtttggcttgacctattaaggtcaaatcaaaaccaaagataatttcaagggcaaatttcaagggccaatcaacacatccttttcatccccatggcaaacaggaggagcaccgccagcagtgcccccatgatgggggctggagaagaggtcttggtggtatcctggaccttttattagcatttgaatctagaggaagctctccctggggccaggggatcacctctcctggaccaggaggttagcagaatgttgcagtcatatcctgcaacattcctccccatcttccaaccaaaataattcgtggggaggagactaacacatatggaccacctacacaaggtattttatgcacatattctcattttttccctataaccttgtaagctaggcttttttattctttttaaattttgcagatggggaaactgagcctcacatgtatgaattccagcatataagcaacagactccagatttggacatgtatatcttattccaggcttcccagatgaccaccaaggtggaagggatgatgatgtccaggcagaagggagctaggccggcccaggcttttcctctaggcacagcggactccaggttcagccttcccggatggtaatgttgcattctgaagagctactttcccgccaactcatctctggacttctctggggcccaactctggtttcctgcctgc

SEQ ID NO: 1087 - DNA, 4001 bp, Homo sapiens
tgggagggggcggcaggagagaccacctgggggcctcccccgtgggccgtgaggcctgtggccacgggcgccccttcgcgctcgggactcggtcctcctgccccccgggcggcctggctgaggaaggggcatgggtcgccccgcgtgctagagccccgtgaggtgtggagcatccccagcgccgccgggggctctcgcgtggagccggcgcgcaaggtcgcggcgggctgagcagctgctgtgggtggcggcccggccccgccctcccggcgcctccccagccagccccgcgcggcgctcaccttgcccgggaagggccccgggaggagcaacctcagggcctgcctcttgagctccaccaggcgggcgttgcagttctcgcaccagacgccgcggtccgagccgggggaggagccgccgccgctgccggagcccggggagcctgtgccgaagcccggagagccgcccaaggagcccggcgaactagtgccgatgccgggggaggcgggtcccggggagccggtgaacgagctcggggacgaggtgcccgagccgggagacggggtccccgaggagccgagcgctgagcccgcgccctcaggagtgggccggctgccggcgcgcgactcctcgtatgctttccggtaccagctttccggggagaagggcgctgcgggcttggtgggcgagcagacttcattcacctgcggggaagacacgccggtgtcaggggctgcaaggcggcgggctgcagcgcccaggagctgggtcatacgtgcgccaccaagtacccgctcgaaccgcccacgggagtcggttggggacctctccaagccctgcggccaaattgccctccgtctgtctcgttaattgtccttaagtgagtccccaccgcccaggtgacccctgcgctggtccccggtggcctcctcctggggtcaggaaggggactcgctcggggccgtttccacggcttctgcaaggcgggggggatccataggttcagcgccccacgcttttgaagccggcacctatcccagcaagatcccgggaacaaaatcctggaagaccctatggggggggtagggggagggctgtgatttcaggatttttattcatacggggtccaactctccggatcctgcaggtaaacgagaggctctcacggctccagctaaacgatccgaggtactgcccagcattcatgggaaaccctccccttcggcttcactctgcctagaagtgcaggaatgcggcaaaagttacgggtgcgtggaaaggaaggaacgagagggctgaaaaaattccgagagcgaggcgagcgtgcgggcgtccccgcggccgacccgcctccgcgcactcacaaccccgccagccccgggggcgcctctgcagcgggggagagctcggggccggggccgcacgatcccggggaaagggggacctccgccgagatgggtctggtaacgcgtctccgcgtcgtaccgtcacaacttaccccgtatttcttgcccctggtggagaccgcaagcctctctttattcccagctaccgaattcatggtggcttttccagaggagagtatctaaaggttccaccgacgctacatccagaaggtcctccaacccagaagcgtcccccggctgcagggggctggctctcagccctcagggcaaggtttcttcagcggtggggtgggagggaatgaaagcaaatggatcccacaagtaatagcaccaatttgcagaaagggttggggtcgctggtttattcttctcttcaaagcatgcttttcctcgtccccttctgcctcttccagccgcacgtcctcttgtcacggccacatccacagaactggcattttcttcagccaagtcagtccgtgctcccccacgaggaaagcgagggatacaatcagggctcgcggccgctgccgggaaggtgggagagccgagccgagtcagctgtgggaacttgtctccttcaccgagcttggtaactgagttcaaagaaattctcccaaaatataaagatccagactcggggaggagcctcggcgtgtcgccgagccaatatccgccggcccgtttcgcctgacagttgcgcgagggccgggagaggggcggctccgcgtggcccgggagcggtcggcggtcacagcgcgcgtgtgcgcccgggcgcagcgcggaggagcctcgggaacctgccgccctcgccgcgccggccgggatccattttatgtggcggcgctcgtgcctgacattgcgaggcctggagccgggctggggctgggggcgggggatcgtcgatctcgccgcgtgcggggaagttcctggcgcgcggcccgggcccggggctctaatgaaacgccgctgcgcgagcctggagcccgggggccgcgcgagcgagcgtggctggacggaaatgcggtgccccagcctcccccgcccccaagttctttctcttcctgacaaggcttgcaggtctgtctgtgaaacgccgtgcaaaagggattgagtcacaaacaagtccacaaacatgccgggtcctccccccgccctttgttctcggagagctgccgggcaaaccttttctggaattgccctaccgaccccgggccggccggggggccaccctccccgaccgcagccgcaggactagggcccttggtcccccgcccgcccgagccccggtctgtgatggactaagccgcccggggctgggacaggtgagcctggtgacccagcgggccgctgccgggcaggggaaactgagggcttcgccgcgctgcacgcggacgactctggcctggagagggggtgtggcgcgagctggccttggcctctccttgcgtgggatcgggcccctcgccccccgccgcccgtttcttcctgcgcctgggccccgcggggtctccggagcaccccgtcatcgctccctctccgatcgccccccgccccagtcccccggcgcagcgcccaggagcgcaggaagccggcgtatgccaggctccacacgtggctgctctggggtgtcatttttcatttcacgggaggacatttcttctggtgagccagcaggtctgttttgttgtgacctttaattaacaccccgcgagacgcctctggaaggactggccgggcgcagggatcacgtggggtgtaacggcatctccgcgcccgcggggagacccagcccgggggtgggcgagggcgcgaaggacgttcagggctttctggtcgctgacttccttctgagctgtggacgacgcaggagggggcaagaagacaaaggttcggggttctggaagcctggggccacgcccccactctgccttcctcggggacaatttcttctgtgcctcccgtgctctgccccactcctccccgctccagctcctgcgcgggaatatttcacagccaccaaagcgaggtaaaaaggtcaaaaggaagatggcaagaacagagtggacgtttccgttacgttcccacttccaatttaaaagcgatcctatcaataggggaccttagggggcaggtacacctccaggcagcacgcgccagctcccacccgcatctgtatttcgcgtaggtgccgcgaaacacatcatcgccattggccacgagccgcttatcagccaaaaagcagcgtgtggtgaaacgagccggcgaggccgcgggtggggaaggtggggtgtcgagggggagtgttggggagctgcgcgatccacctcggagacgggggagcccagagctgctctgatttgcatttctaagtagctgggggcccaaagcgtgtttggtgggctccgagcgccctctgttgattaaagtttataaccggaggctctgcaagagtttttaagaagctttcaaaaattgatgtttatgtaaaatgtatatacataagatgaaacgcacacattttaattgttaagttctatgaattttgacaaacgtgtactctgcgtaggccaccacctcgatcaacatctataaatt

SEQ ID NO: 1088 - DNA, 4001 bp, Homo sapiens
caagtattctgtgagtccctgaggtagctgaatcatttcagggcaatgatgacccctagacctggagagctgtgcaggtcaccagccttcaaggtacaactggctttaagctggatcttttgggaagcttaccccctagagtcacagtctatcatgttgtcaaagtaggttttcacagactacttctgcagagagactcccaacctcctagaccacgaggcaatgctgttattctctccagccccagccatccctctctatagcgccaccaactgtacttctaaacaacccacaggcctagtgtctcccattttcaaaatctctttccaaggcatactgttccactgagggggctgagccccgagggaagaaaaaaggcctaccaatggctgattcctactctcctcagcatcaggctctggattctacagaaaaggtttctaggccaggcagcaaatttcctaaatgcaccaggtctcttaaaggttggcctgatagctgtagattggattctttctcatagagaaagatgcttggaacacaggcaggactcaacccacatagaaaccacctgcaaaagaggagcttccacaactctgagtcctagaaacataattcctgacacaaattccatgatagtaagctagtagaaatccacttactttcttttggagcaggaattttggagttgacggatctccgtttttgtttctgaaaaacaaatcaaattgtcacaatatatggctcttatcaattctcaagggcccatcctgggcccatgtactatgctaaaatgccagacaatcaatcagcaaagagtcaataagcaaagtgaattctctggcgcactggctgcagccagatgacaggcacctacctggattgttacattttcctgcaagggcagattgtccttcggatgtaagggaagaagctgtaagagttctgggtttattgcagccacatcatcaaaatcaatctgcaaggagcaagtaaaagtttcaatgaaacaacattgttcaatccaaatacattttttctttttttttttttttgagacagagtatcgctctgtcgcccaggctggagggcagtggtgcgatcttggttcaatgcaacctctgcctcctgggtccaagcaattctcctgcctcagcctcctgagtagctgggactacaggcatgcgccaccacgcccagctaatttttgtatttccagtagagacagggtttcaccatgttggccaggatggtctcaaactcctggcctcaggtgatctccccacctcggcctcctaaagtgctgggattacaggtgtgagccactgtgcctggcccccccgaggctgaggcgggagaattgctggaatccaggaggcggaggttgcattgagctgagattgagccactgccctccagcctgggcaacagagcaagactctgtctcaaaaaacaaaaaacaaacaaacaaacaaaaaaacaacatagaaaaaattaaatttctatagacaggggtacccctaaattcaaactttaccaactttaagttccactaagtatgaatagctataaaacaaatagttactccttaataatggtttaccatctagatggatatgggtttctgatttccaagccaatggtagacgtcagtgatgagaatgaggtgaagaggagggcagacaggcaggcaaacagtcgggtactccacagcagatctaggccacttggctcccctgctgatctgctgggcagtgaggtcctgctgggcacagccccccaagcacctcttgatggctgacacggaggaggaaacaagttctaactgtctggtgagagtcaaatgggggccctttaggatcttatgggcaggggcaagttcctgacagctgctacctaaccctaagactacctacattttcttctgggcccagaaacttccccagttacggcttcctgcccatgccttacctatttcctgttgatgcctgcaatgaggtcacaattctaagtttacatcatcagagtcctgcaattctccaggaacaactcaaacttcaccaggatagctttacaacaggttcagacatattaaatttgtcccaactttgtatttcaaaatgtgacagagctgaagcatgtactctagggtgagggctttactgcctagagatgaaacctgcaggactgggtgcggtggctcacgcctgtaaccccagcactttgggaggccgaggtgggcggattacctgacctcaggagttcaaggccagcctgggcaacacggtgaaacccctgtctctactaaaatacaaaaagttggctgggtgtggcagcgtgcacctgtaatcccagctactcaggagcctgaggcaggagaatggcgtgaacccaggaggcggagcttgcagtgagccgagatcccgccactgcactccagcctgggcgacacagcgagactccgtctcaaaaaaaaaagaaaaagaaaaaagaaatctgcagttatttgctgcctattcaaacatttgttaggcaccacgaagacagcagcctacagggggaaggtagtcaaagatgaattaagacatatataggccgggcgtggtggctcacgtctgtaatcccagcactttgggaggctgagacaggcagatcacctgaggtcgggagttcaagaccagcctgaccaacatggaaaaaccccgtctctactaaaaataaaaaattagccaggtgtgatgcatgcctgtaatctcagctactcgggaggctgaggcagaagaatcgcttgaacccgggaggcggaggttgcagtaagccaagatagcgccatcacactccagcctgggcaacaagagcgaaacactgtctcaaaaaaaaaaaaaaaaaaaaaaaaaagacatatacaacccctgccaccatgagctcaatttctaatggggattataagtcatatgtacaaaggaaatcaaagcagaatgagatttaaataaaaaaaaaaaaaggaggatagaatcactaaatgcaaaagctggcaagcacttcagtaatcacacttctatccacacttctgggacagccacagactcttggtacatacctcccccatttctaacccctaaactacagagagcataaacaacaaagaaaaccagaggtttttttttttttttgagatggagtttcactcttggtgcccaggctggagtgcagtggcatgatctcggctcactggaacctccgcctcccaggttcaagtgattctcctgcctcagcctcctgagtagctgagattacaggcatgcgccaccatgtccagctaattttgtatttttagtagagacagggttttaccacgttggccaggctggtcttgagctcctgacctcaggtgatccgtccacctcagcctcccaaagtgctgggattacaggcatgagccaccacgcccggccttttttagacggaatctcactctgtcgcccaggctgctggagtgcaatggcgcgatctcagctcgctgcaacctccacctcccgggttcaagcgattcttccgcctcagcctcctgagtagctgggactacaggtgcgcaccaccacatccggctaagtttttggatttttagtagagatgcaggttcactatattggccaggctggtcttgaactcctgacctcatgatccgcccgcttcagcttcccagagtgctgggattacaagtgtgagccaccacgacccgcgaaaaccagagttttaagccttgctctgacaatcaactgattctcatgttgataattcagggtgaacatcccaggagaaaggaataagagtgtaaaggcagcagggaattaggcagtcacagagcagtaaactgcctcatttgccagggcataggatatgtggaagaagagtatgtggtacaaagaaaaagggtgattagaatcagagcttgagccacatgtggtggctcatgcctgtaatcccagcactttaggagg

SEQ ID NO: 1089 - DNA, 4001 bp, Homo sapiens
gaggttttgtcatgttgcccagcctggtcttgaactgctgagctcaaagcgatctgcccacctcggcctcccaaagtgctgggattatacatgtgagccactgtgcccagccaagaagaccatttttattttttgaggaaaggtctcactctgtcgcccaggccagagtgcagtggctcgatcatggttcagtgcagcctcaacctcccaggctaaatcaatcctcccacctcagcttcccgagtagctggaaccacaggcgtgagccaccacaccctgataatttttaatttttttgtagagacaaggtctcaacatttttcccaggctggtctcgaactcctgagctcaagcaatcctccagaccaggcctctcaaagtgtcgggattagaggcaagagccaccgcacccagccaatttttttttttttttttttttgagacagattctcactgtcacccaggctggagtgcagcggcacagtttcggctcactgcaacctccgcctcccaggttcaagcagttctcctgcctcaggctcccaagtagttgggattacaggcatgcactaccacgactggctaatttttgtattttcagtagagacaggtttcgccatgttggccaggatggtctcgaactcctgacatcaggtgatctgcccgtctcagcctcccaaagttctgggattacaggcgtgagtgagaagagcacagcatcagaaactaggctctcacagattccacttctgcacagatcctttatgtaggaagacattaaatgtggtagaggaattctcatagaacctacctctttgccctttgtggcacctccttctgcccattccactgaaacacaggatttctccaagttcacagtccttacattggcactgtgaattaaacctataaagtatgaaaaaaccagagttacccatctctttcctgagagcttcacttttaggattccacagagattcccaaagtggagttaacctgaaggaacaggcagctaccttaaaaaaaaaaaaaaaaaaaactaagagaaacaaataaatctcctgggcttcacctttagaatatccacagtgaggtgggctggggacaggtttttaaactgagctgcatgggataaggattcacccctactcaagagagcctacaaaaaaagagagatagagcctacaaaagagaacatacaaaaggtatgtttgagcacaggattccccacaacccttagatgaacttttcctcaacatagcattgaggatctggcccttttggggttttcctaactcatttctggcggtcatatctgtccatttccctaatgacacgggtatcagacctgccagaactgcggtacctgcttaagcaaaagagagaacgactacaagctcctcaagcgcagggttcttgtctgtcccgtttacctgacataccgcaactgcgcaatatttattcgagagtaaaggggccaggagaccgaggtccccataagagcagggcattttcaggggagaattttggaagggaagtgaatttagaagtcccaacttccctgggaggtctaccagccttggagaaggtccgcccactcccagaggactgcgaaagggaccacgtacagcgcagggactctcacccctgtgtaggcaagaatgactgccagtgcagagacccggagtgagtgcgtgtgaaaaggagggagggagagaaagagagtgaaagcccatctgtgtgtccggggacgggcagtaatttcagtcgtctcaccgctcacgagtccccttgacctagggaccccgctcctcaccattactgcgttggatcttgatagcgagaccgggaaacaggcgggcctgaagcgacgagtccatggccattcggagagtcagcaaggaagagaaacgcgcaataccaagaaacctcaatttcgctaaccctacgaagtcttaacgccgcgtaaaccgccgcagtttaaatcccgcgcgcaagcgtccttaaaacgtcattccgctgtccccgccctcgcttccgccagtcagcggcgccctgcggagccttgggggagacgcagttcccaaccatcttcctacgcttggcaccgcccatgcgtctggccacacccccgagcgctgtgccttctgggaacttcgccgctacgtggggtctggggctcccatttctggtattgtcctcggtcaccttgtactgcggggttcccgaaaactgggaaacttcagtatgtatttgacaatgagggctctgggatcctacagacatgggttcgaatcgtagcttcttcaattgcaagttcagtgacctcgagcaagttggagacttggccgggcgcggtggctcactcctgttaatcccaacacttaggaagggagaggtgggagtgatcgctcgagatcagaagttcgagaccagacagggcaacatagccaagaccctgttctcaaagcaaaacaaaaccacagattagaaacttgacttagtttttcttattaaatagtgcagaagcatgttgcctcattcaaggagttatgtataaatttccagaaagacactgattcaccagatatttattgagtgaagtctaccacctgctaggcatggtaccaggaaatggagataatgaactagacacatagttcctgtcctcctttttttttttttccatttaacccttagtggacacagcacatgtttcagagagcacggggttgggggtaaggttatagattaacagcatcccaaggcaaaagaatttttcttagtacagaacaaaatggagtctcctatgtctacttctttctacacagacacagtaacaatctgatctctctttcttttccccacatttcccccttttctattcgacaaaaccgccatcgtcatcatggcccgttctcaatgagctattgggtacacctcccagatggggtggcggcggggcagaggggctcctcacttcccaaatggggcagccgggcagaggcgccccccccccccacctcccagacagggcggcggctgggagggggctgccccccacctcccagacggggcggctggccggtcgggggctttccccccacctcctggacggggcggctgccgggaggagacgctcctcatctcccggacggggcggctgccgggcagagtggctcctcacttctcagacggggcggccagtcagagacgatcctcacctcccagacagggtggcggcggggcagagacactcctcagttcccagacggggtcgcggcggggcagaggcgctccccacatcccagacgatgggcggccgggaagagacgctcctcacttcctagaccgggtggcggccgagcagaggctgcaatctcggcactttgggaggccaaggcaggcggctgggaggtggaggttgtagcgagccgagatcacgccaccgcactccagcctgggcaacattgagcactgagtgagcgagactccgtctgcaatcccggcacctcgggaggccagggctggcagatcactcgcggtcaggagctggagaccagcccggccagcacggtgaaaccccatctccaccaaaaaatacgaaaaccagtcaggtgcggcggcgcgcgcctgcaatcccaggcactcggcaggctgaggcaggagaatcaggcagggaggctgcagtgagtcgagatggcggcagtacagttcagcctcggcttggcatcagagggagaccggggagagggggagggggaaagggagaggttttttttttttttaattagagacagtgtcttgctatgttgcccaggctggtcttgaactcctgggctcaaagatcctccctccttaacctcccaaagtgctaggattacatgtgtgaaccaccaagcccggcctcctgttcttgacgatctgcctgcctcagcctcccaaaatgctggtattacaggcatgaaccactgtgcctggccaggaaaggtcttgtttga

SEQ ID NO: 1090 - DNA, 4001 bp, Homo sapiens
aaaattgaaggttctatcagacatcacaaatgttttccatcaggcctgtataaatacatgtctcctgtatgcttctagtctgaaaacagacaattcaaactttttattatttatagtaaaaattagatgaaattgagaaatgtatttttcaaccttttcagactctaatctcattttacttcaaacattacattgactggcttggttttaattttggaactctagatagtatgtatttaaaagcaaacaataggttgagaattataagtcacagtatgcctcagtgtccatactggtacgataatgttaagaaaaactacctctgacacaaatatattacatgaaaatcagctaatggtataacagcggctctttgttccagaacaattttgaatttaaagttaaaaggcaatttattttcttctgtcacaaaatttttaaccaaggtattttaaaaaccaacgttaagtaaaattcagtgaggaaataaacactgatgtaggcttatatattcatttaaaaatttttactgacaaagtctggctatttgccagtttcagatatatttacataaaataaaaaagacagtcaatatatgcctgtcttgccaggacaatagagttgatttatttattatacaattgtttgaatcccttctatgagtctactaacacttggaagatctttctgtgatgatgagagctcagccaagccagaataaaaatattcactgcaagtgtattatgacttgaaataataccaccaccttacattcatgtttcattttttaaaagtatttcatctttcgtccttgtatctctcagaaggtaacgcctgtcccattttcagatgaggaaaccgtgcccaaaggaatacatgcgacttttccagggtatttactgaatcagtactgaattaaaatttttttctattggatcactgcttactcttggttcagtgggaggtatctttttttttttccaaatcaggaatgatctgagtatttgccagcacccaaataatcccaacagactacaatttttttgagtaactgatactatatttaaaagaaattatggcctattttattgtcatcaaacttctgaacaaacctcttaataattactaaatgtcctacaaaaattatgttgtatacatgggagtcaaatggatgacatggatgcggaaagcagaaagagactggaaatcaacatctcaattcagccttccaaaaagtagaatccaccacttctttccccttcatcatttcaaaagcccatggcaatgaaccccaaactgaggcctgagggcggatgcaccagactttattcccaggctctcatgggatttatctattatgggaaaatggagagtctgggaagaggcgaaaaaaaaaacaaaagacgcggtttaccttgccctacctccctctccccctggaataaggtgatgtagcgaagaaaccatctttcaatgctgtcagggctccgccgagtcaggtcaaaggactttgaaacccccccagagctctccttttttctccacttcaccttttccctctcctttcggtgacttctctccctgcttcccatcccgtctgctaaactagcgttgcccagtgacatctcacagccaacccaagaacatcttcagggccctggcaaggagggtaggacagagccttggggagtcgtcaccttttgaggtatctggcgtcctccccttgcatggcggcagcggcagcggcgtggagaggatggggtatcttgagaggcaggcgcggttatttccggggacggtggccaaagtaccctcacacccagaggcgatgacagtcctgaggcctgcaaggcggggcagcagcggcgctgtggttaccacggtgaagcctccagctcctcccacagcttctgtgccccaaaacactggagcggcccagacccgcccagagtcgcctaagccgggccgtcacgacgcatgcgcttgctctgcacctcttgtatgcgcaggctcagtctgaggcggtggcctcagagtttgacgcaccggggagccgagcagggaagttttggtgcagttttgagcgtccgtgtataaggagtggctccgtagtcaccgcccccttgaggatgggaatagaaagggctgtcaggtcagcttgaaaggagagaggggaatccgataaccttttagttagcgaatgctatacagcagtccagctaataagggaggtttctatttgggggcctgaatggccctgattgcacttacaagctctaacttatggagataatctgaccgttgtacaaaatggatataactttgaaggcggcaagtctgtcactttgatgtcttaaatctagaatacacctcccccaaccaaaacaaacaaacaaacaaacaaacaacagcaacaaaaaacagttcctgaaattccaactccaccaattatcctgaactcaaggtatgtttagaattgcttcttctgaggcaggcaattgttagcagtgcagggcataggaaagaagggttcttttttaactgcatgttctctggtttaagatctattcccatgggttcagctattatgtctatgcaaatgatataggttcatttatttggtaaatgtgaattgagggctggctgtgtgccaaacaccaaaccaggctctagggatgcaaagaaagcacctctactccccctgctcacctataatcttgtcacttattcactgtcttctagtcctgttttcccagttgctttgagacgtgcacgtagttgctctgctgcttttttcaaatgtagtacattgatgcaattattgattatccgttatgtgtaaaacaccatgttaaggcactgcatggtatattaaatatagaaatacagtccttacccaacaaaatatatttttatcttcccacccattcacaccagctacactatttctgtagatgttatagtcattctttcattctgaaagggaagaaaatttgcagctaattttgactccttcctctgtatcatgccctcttactaaagtgttacaaaattctatcttttcttccttcaagatattcaggtagtccagtttttttctacattcttacttctaccaatagtctaatcactttatacctagagtactgcaattccttcctcattggacttcctattttttgtttttctaaatattaattctgcaaactaatgtaaaattttacaaattatcatttataacacctttaatggtaatatagcaggctagattactttaaaatcttcacaatacgtaaaattggaagaccaaaatatacattaaaatgcatagataatataacaaggatttttggaatgtaagttagctccttgagctcagagaacttatttcgttcacttttgcattcagcccatagttgtcactgaataaaaattttggtgttgaaaaaatgcaaacctgagcttgaaaaaacaatagcaacaacaacaacaaaaaaacctaaagaaaatgcccagaggccagaaagaaagagagagctggaaaccagagcaataaatagatagctgaaactgggactgaactagataaactgtctgtctgtggcaggaaaagtacaagatgagcctggaacattttatgcttgacagtaaggacatagtcagagactaagaagataagattatgtaaaaaggacactggtgaatttgaggcaatttgggaatcaaatggaattactgggattgatttaagacattaaataaataaaaaaaagaaatccataatgatactcaacaacatagaaaaacagggaaaaaagaaccccacttccactggaggcaactactgcatcagatctttactctgaaagctggtaattaaaagaaagaaggatttaatctaatgcttttggaaataaaccagatttcacctccttttaacaaggaaaagctcttcttaacagaaaatacctggtaggaatggagaaaaataatgatagtta

SEQ ID NO: 1091 - DNA, 4001 bp, Homo sapiens
gagaacatcatcctgagcctcaaatgattatttatacatttatattcctatatatgatactcaaagaatagtcatcttcagaaaaaactagataatttttttaaatttctagaattaaaaatacaataaccaaaattaagaataataataaataaataggtttaatagcagattagatacgggtaaggagataatttatggcataaaatataagtcagaagaaaacacccagaataaaacatagagacaaaaagatgtaaaacacaagcaaaagtataattcagcaatgcatactgagtaggtctagcatatgtacttgaagtcccagaaaaaaggtgagagagaatgggtacagagcaatatatgaaaagataatggctaagtgacatcagtgaaaacggcagagtagggacctctagaggctggcactccccagaagcactaaaaacttggcaaaaaaaacctatcacaatcaacctcatcagaactctggaagacagtcaaaggtttacagcaaccaagtgaatgtttaatcagaagaaaggttacagaaacaaggtaggcgatcattatggtcttttcacttaccctagacatccaccccactctcaagcacagtggcagtcttcaagatggcagcccacgttcccactgttaatacttggttctagaggagtcaagtggaccttgctcccaaggaattttgtctgattgttttgcaactgactgaagtttcctttgaggtcagctgcaaggggctttcctttgttttgactaattttaaactcttatcaggatagtgcagctatgcagtcactgaaatcagtgaaagccaagcatacaagctgctggcccctgggataaatagtaatagctgggtcaaacaaaacacaagctgaaagcccaagaggaaagtccagggagtcagacattttgggggaatagatgctttgaaaagctattgcatataaagagaaatctagaaatccatgagcatgctcagggcagaatacatacccagaaaaaacctgggaagatcataagcttttacctctggctggtcttcaggctctgtgcaagcagcaaatgaaggctaaggtaaaattgtaaattgcctggctaagtgttgaagccatatccaaacactgagtcaacctacaaagatctgaagagtatttttttcttttctttttttcctttggataccataatattcaaaatacccagttttcaacaaaacaaaatatgaaacatgcaaagaaacaagaaactcattctcattctcacaataaaaaaaattaacagaaactgtccatgctacagcacaaacactggacttatcaaagactttaaatcaactgtcttaaatatgtccaaagagcaaaaagaaaccagtgcaaataactaagaaaaaggagaaacacaatgtctcaacacataaatagtttaaaaatatattatcataaggatccaaacaaaaacactagatctgaaaagtacaataactgaaataaaaaaatcactacagggtttttaacagcagatctgagcagagagagaaaagaatcagcaaacttgaagatatgtcaaatgaaactgtccattttgaggcacagaaagaaaacagaatgaagaaaaataaacagaacctaagagacttatggaacaccatctagtataccaacatatgcataatgagggtatgaaaggagaggaagaaagaaacatagagaatactgggagaaaaaacagtcaaaaacttcccaaattagaccaaagacaaacttacacatccaagaagctcaatgaaattcaaagataaactcaaacagatccacaataagacactctatactgacgctctatttaaaaaaataaataaaagattttgaattaataacctaattttacaccttaaggggctagaaaaagaagagcaaacaaaaccccaagctagcagaaggaaataataaaaagcagcaacagagactagaaaaagaatagagaaaatgaaaccaaaggttagttctttgaaaagatcaacaaacatttttggaaaacttttagttagactgactaaaaaagaaaagaagagactcaaattactaaaatcagaaatgaaagtgggacattactgctgctcttttgatgattaaaaaattacaagagaataatatgaacaccaacaaattggataacctacatgaaaaagaataattcctagaaacacacaaactaccaaaactgactcaaaagacacagaaaatctgaacagaattagaagtaaggtgattgaatcagtaatcataaacctttcaacaagtccagtaccagatggcttcactggtgaattctaccaagcatttaaagacaaattaacataaatacccctcaaactcttccaaaagatataacagtagaggaaacacttcctaattcattccatgaggccaccattaccctgataccaaagcaagacaaagacactacaggaaaacctttagaccaataccctttatgaatgtcgatgtgaaaatcctcaaaatactagcaaacagaatacaggagtatattaaaaggaccacgcaacatggccacatgggcatttcaatacaatacaccacattaatggaatgaagaaaaaaagtacatgattatctcaatcgatgcagaaaaaagcatctgacaaaacccaacatcttttcatgataaaagtacttgataaattaggaatagaagaaaagtcccttaacataataaagggcatatatgaaaaatctacagccaatatcatactcaatggtgaaagaatgaaagctttccccctaagatcaggaacaagacaagaatgtttatccactttcctgacttctattcaacatagtactggaaattctagccagagcaatgaggcatgggaaaaaaaaataaaaaggcatccagattgaaaaagaagaagtaaaattatttctatctgcagaagacataatcttatatatagaaaattctaaaaatggcacaaaaaactggctagagctaataaattcagcaaagttggagaatagatcagaacacaccaaaaaaatccactgtttttctacatattggagctgaaaaatatgaaaaggaaatttagaaaacttcatttccaatagcatcaaaaagaataaaatactcaggagtaaacgtaaccaaggaacaactgtatactgaaaacaaaaagttgctgaaagaaattaatatgaactaaatgaaaagaaatcacatgttcatggactgaaggacttaatattgttaagatggcaatattccccaaagtgatctatagattcattatattcccaaagtttcaatagctttttttgcagaaatgaaaaagccaaccctaaaattcaaatggaaatataaggaaccctaaatagctgaaacaaccttgaaaaagaacaacaaagttggaggactcacacttctggatttcaaaactcactacaaagcttcagtaatcaaaacagtgaggtactagcacacggacagatagatcaatgaaatataattgagagtgcaggaataaaccccaacatttttggtcatttaattttcaaaaaaattgcccaaaccattcatggaggaaaagaacagtcaattgttcttttctgacatttgttctgacaaatgatgtcagaacaactagatagtcacatataaaagaatgaagatggacccttgccatataccatagacaataactaactcgagatggatcaaggatattaaatgtaaaagctaaaactgtaaaactcttagaagaaaacagagggacaaaccttcatgaccttggatttagcagtggtttcttaaataacgatgccaaaagcatgagcaacaaaagaataaattagacttcaccaaaattaaaaatgtttgcatatgaaagttttacataccaagatagtgcaaagaaaacccacagaatgggacaaagtatctgtaaatcatgtatc

SEQ ID NO: 1092 - DNA, 4001 bp, Homo sapiens
atgggtgccctgtggggagaaatgaatcaagacgtgcccccaccaactcagccaggctttgccttcggaactgggaagagacccgacaaggagaggaaaggtccagcataacacaccacctacaaacgcaggaagggaacagaaagcagggcaataatgcctgaggctgttctacccagatccattcccagacaccccctaaaagaggacacctcctccatctgcagtctgtacatctccataggtgtctgcccatatgaatgtctgttcaagtttctttgtttgctagagggttggtttctgtgagagcgtgtgtcctgtccttgtaaacgcctgcatacatgtactgtgtatagttgtaacgttcgggtggatgaatgcgtgagtgtgtgccgatctgggggaggaatctgtcttcctcagatgtctccgtgtctttgtgtatatgtgtctgtctcagtgtgggggatgtttgtggggatgtctctctctcagtaggtgagtagtctgtctcagtgtctgtgagtgttttacggtgtttgtgtgtcaatttctgtgtgtcagctccatttttggggagggaaggagttcagcaggattcagtcttccttagagtcagacctgggaggcaagaaccaactcccacagaccccagtccctgctgcagtctggacccttggttccctcagccctcttccctcccccaaccccagccctgcccaggatacactgacatcctcatctctcccaaccacctccctcacctcccagcctctcccctgccagtgtcaaataagccccagacagcaacactttcctgagcccaagtagagtgtcagccccctccccccaccgcctctgcccccgcccccgtgagttccccccctctgtatcaagcgggcctgaagctgtatgtggaactccactctccacccagagcctccgtgggcaggggttccaaatccccactagaggcgccgagacacccctcccttcctctagagggggcagccccaggcaggctggagccgtgattcagactcagacccccgaggggctgggctggagtagggggatccccttggcaacatcttcgggaggtgggacccagcttttcgctcaccccctcgcccgaaatccgaaatcccaccctcttcccagccttgcccttaggctggactcaggcgtccggaaccccggcctcagagggcgagggtcggtagggctgccagaagctcaagagaaagcgttcggttccccgttttactcggacctccagccctcgcggccccattgctcggttctcccgcgcagccagaggaaacaacttgggcaaatcaacggcaaactcattctccccagcccctcgttactccgcgccccctcccccagggctctgcgcccggaccgagcccccgcctcgtggcgtccggacccggggactggccgcgggccgcggggcactccagcactctcccaccggggaagcagtgccccggccccggggggaagccgagcgtccgggggtgggctgggggcccttaccttgggagaaagtatcggagagagtgaggatccagacgaggaggctcagcatgctgtccgcccgccgtgcgcccgcccgcggctggggcccggagttggcgagcgagccagaggagcgggctggggaggaggggagcccgggagcccgggagcccgccccccgcccgcccgcgcccgcccctgcacacacacacgcgcgcgcgcacactcacgcgcacaaactcatttccctgccctccgattctctttatctctctttcctcccagacctttttctcctcctggtcgccctccccctttaattatttctcctctcaagctgtatctctctgggtctctttcggtctttgctccccctttctctccccttctcttccttccctctctccctccctgcctccctgcctgcctgcctccctccctccgcctgacgtctactctccctccgacggcgcctccctccacgagccctccccctgcccccccacaacgcgcgcacacacatacccccctcgctggaactgagatggaaggagagcaaagagggaaaggaattgagggcaaaggcaaaagggggtgaaaaatgtgaccgtcgtgggttctggggcaggcacgacgggacccctggccaccccaccccctcctatttatagacgcaatcttggtcgcgggctatggaactaagcagtggaggaggaacatgggctgagggacatcagcctctagctcagaggatgtgatggggagtgtgtgtgtgtgtgtgtgtgtgtgtgtgtttccgtgtgtgtgtctaggagtggggtggggggcagggagttaaataaacataaagacctttctttttaaattccacacccaaagtctagcccctagattccccaaattaagaattctcaattgactaatgaatgcttggataagggaggggcatacatgcctctccccacctataaaacccagaactggagaatgggagctgcctcttggacctgccttgaggccctgccttggcttcacccagtcaaggttgagcacagctaggcgttggaggactcagcggcctggaagaggcacagttgacccttcctttgttcatcttagccttccacccatcccgaaggagaaggtagccaactggatggctttgaagggccaagacctggcctcacctccctgaatgcaagccagaggagaagacagccaccagtcagatctctaagcacgctggagtttgagatcttttggggtagggacatggaggaactaggaaggaagggaattcctgagaatcatgagagcattcaggagggatctccactttcttaagggcccagtttggcaaccagctcctcttctcacccctgaccagatacttctgctcacaggattgctcgggtagccagaggtctggaccctagggaatggacagagaagttgctggaattgcacaattttacagtaatgtgttggtccaaagaggtctccacttctttcctcccagatcccagatctcctgggtctctaacactccccgccaagttttctcaatttctgcccctgaaagtaggtgcgtggctctctggtgccctctgttgatgtgtagcggccacagctcctctttcctccgcagatactaacaccagcctgtggtccagacgcatccacacacaattagaagacagagaaaggcaggaaaacacccaagctcatatgcagaagccccatatgcacagacccagagaattcttcatatattccaaaacacaggcaagcacagcttaagaatagagccatactttggccagagaaataggactgcaatcccaaacgtacacagaaagacaccaacacacagacacataaggcttttcatttgttcattcattaatcatacattccacagatattttttcagctccagactgctattttccagtcaccattctaggctttggggagacaataataataaaaaaaaaaggacaaagtctttccctttaatgttccattctggaggaaagtcagaggcagtagaaaaaaatatgaaatatactaggttatggtaaatgctatgggggacaaataaagcaggataaaagattagggagagggagagagggaggaattactgttcttacaggtaatcaaagaaagctgttctgctacagccacatttgggcacagacctgaaggaactgagggtttagctgctcaggcgtctgagggaagaatgcagcaggaagatggtagcagcaaaggcaaaaaccctgaggtagggagctccggacatgtcagcgagacagccttttctcctttccactccacatgatggtgtatggaggggaaggcgagggtgaccctgacttaggaaagtattatttttggtgtgtgtgtgttttcttttcttttcttttctttcttttttttttttgaaggagttgcactctgtcacccag

SEQ ID NO: 1093 - DNA, 4001 bp, Homo sapiens
accgactaggtgctggtgctgtgctaggtgctaggggtgcacaggtgtgctaagacagagttgctgcccccaagatctcaagtctagcatgagaaattaactcatcagcagatcatttcaaaataacactgtaaatgacataccggatgcatgtgaatccacaaggggatatgggagtccaggggaacccaacctaggaggaccaggcagatttttggcagggggtggcacttgagctgtttctgagcatgaatcgctgaaaggtttacagaaagtgttcccaggacggtgctaaggcgctgaagcaagggcaggggctgagtgcaaagggaacttcaggccctctagctagacaagaggatggagctttgcatggagagaaagctagtgacaaggctgggggaaggggccctgcaggggcttcatcctggaggggtctgagccagacaggaatgtgggtagatgtacatttccggttctctgtgcggaagcagggtggtgggccaggaaggagggcagtgggcttgtgtggttggagggtggtactctttcttccggctcccctttccccccgagtgcctccttcccactgtggatggcacttaccatgtgcgccatgggacaactctgcctgaccccagcacacacacacacaccccccacaccacacacatacaccacacacaccacacatgcacacacacaccacacacatatatacgcacacacccatacacatatacacgcatacacccatacacacacatcatacacacacacatacaccacacacaccacacacatacacccatacacacacatacacatatgccacacacaccacacacgcatacacaccacacacatatacacacatacacctatacacacacatcatgcacacacaccacacacgcacacacaccacacacacatatacacacatacacccatacacacaacatacacacacacatacacacatccatacatacacatcatacacacacatacaccacacataccacacatgcacacacaccacacagatatatacccatacacccgtacacatacactacacaccacagatgcacacacacgccacacacatatacacacatacacccatacacgtacatcatacacacacatacaccacatacaccacacatgcgcacacacatcacacacatatacacacatacacccatacacacatatcacacacacacacacacacacacacacacacacacacagattccactgcccagcccatcggggcacttaacatatatggtagaaatgaattatttggaaaggggccatgagtggccgacctgctgtagacaatttttgtggttccctccaccctggggggtttgtatccagtgagtgacagaaattccaggcatggttggaaagcttctggagtgaagtggcccctagttcttagtgggtaggtagatgcccttggttaggcttgtatttgccatctgtaatttggggggagctgctcagaggagccccattgctctcaagagccccgagcggttccctaggtccatccaagcgtgtctgtggtctctaattccagccacagcatttatttattgcatgtattccttccacagcaagagagagccctcgggatccccagagtgttagcttcacaaataaagtgcgactcagtgtattcgcccaggcatcccaggataatctggccaggctggtaaacaggaaagatcagtgtctccctcccctgcctttgcctgcctggatgcatctgtccgtcttagaacggattccctgctcccctccagagcatccccaggtcagggcagacccccttcccaggggtggacactgcagtgtgcctaccttgcctcagtcctggcctgggcaggagtctggcggagcctctgaggtgacgagaccacctggctgggtgaatgtccagagggtgggcagctgggctcccggtctcaagagttctccccagctccctgatcacatcccttttataaagcccggggtgacgtctccaagcacaggcccactctgccgcccctccctcctcctcagaccctcctgaagagcatggcaccttgggaggcctctgcctccgggctctgtgactggaggcagcctctcctcctgccccacccgagccctccgaggcgggactttctccttcttaccggctctttccatcctccacaccctcttcccacccagaggacccatcctgcccccaaacaacgtggaaatgggctatctgaggagggtggggagaagtgtcagtgtgaaatgtcttgtttcctctccgaagagccacagacacacctagtctgaattagacgtagaaaacgacaggaagaggggaggagaagggcacaggctgacccaggggctcctcacatcccatgctcccagctctgagggaaagccaggtcagcgtgggtctccaggcggctcctagactgcgccctgtgactggcacagggtggtggtggcagagattctctcctttttccttccttcctgcttcccttctttcctcggtcactgagcgcttcctcagcgcagggttttgaggtgaataggctatggactggtcagagaccttaggtaagcaaccagctatgagcaaggaggacgaaatgggagctgcagaaggtggatgcacctgggaagtgccaggggtgcagagaggggacttccaggtggcagcacatccagacagcctgcttgggggccccaccttcttgtctcgtggcacccaccaccatactattttgtgactgctcaggtacagcactttgaggacagggacaggcccccttccccctgtacccttggcacccactccattgctgggcacatacagagagggccctcaatagatatttgctaactgcatgcatcgcaagtgacttttgtctctttcttgagcctgcaataactctctatacccttggacaaggggctctccagggcagagactgtttcttctatcaggctgggagtctctgaaggcaggggctatgtctctaccctcagacaggacgctctcccagcacaagctcaacctggtcgtcccctaatgctggagaagcatgccggcagtctgcaggttagcacccctcacttgtctgatgcttactgttaacaggggattgcaaacatattattatcacacccattagggctgttaaacaccaggacagaaatgatagcctatgaggacagcactgaccctcatagaccaaaacttcgctgtggggatgatgtgtacgttggcctgtcctgaagcaggaggtggtcttaatgggctgaagacgctaacttttttttttttgagacggagtctggctttgtcacccaggctggaatccagtggtgcgatctcagctcactgcaacctccgcctcctgggttcaagcgatcctcctgcctcagccttttgagtagctggaactacaggcacctgccaccacgccccgctaatttttgtatttttagtagagacggggtttcaccatgttggccaggctggtctcgaagttctgacctcaggtgatctgcccacctcagcctcccaaagtgctgggattataggtgtgagccaccgcgcccggccaaagacgccaactctgagccttagacacacgcacaacttgggaatttaatcttcacttttcctcccataaatatagagtgagggtgtgataccagccccagcccagtctccttggggtctgcatctctgcttcctggcagcctcttgagtcgacttggggatttgacgtcagttgctcagctccattccttccttctggacttggggaggtccggatatgtcggggagtgagtcagtgcaggggactgagggggtggttcccattctccctctagccccctcaaccaatgatccaagttcaaggagctcatctctgtttttcagaccatcgagctagtgccttgaagtctccgga

SEQ ID NO: 1094 - DNA, 4001 bp, Homo sapiens
caccatgcccagccttatctgttttatttaccactatatgctcagcaactagcataagacagacatataataggaactaggtaaatgactattgggtgggcacctctggggtgctcagcctctcctccctaactctcagcaatggccctcttgttttcccagtccttcatggcaaattaagttgtctaaacatgccttcaccactactttgccttatgagtctcccaaatttgctctggcctctatctctccacagaaccagctttcataaaggtcaccactgatgacttccatcccactatgaccaagcagcactttccagactcctcgcttgaactctcaggagcttatacgaccactggccacacccttcttagaatgcttggcctctctaacacgcatggccacactttccaagtttttctccttcccttctctcagaccccctccttcacagtttcttttgcagatttccctttccctgctctctctgggcaagcttccccatgccagtggttttgtttctgtttacagtccaactattcctaaatctggaatcttcgctctggcgaagatggctcctgaattttccagctacctattgtttgagtcctttcggatggcccacatgctcttctaatggactatggccaaaattcactagcatctttgcccacctccctcaaacaacaaattaatcttgtccttctcatccttcactctctctcagaaaatgtcactattgtcacccaattgtgcaagcaagaaatctgttactctagatgtctccctcaccacccggggaccaatgattgtggtctctgcctccaaaacatctccacaatctatgatatatttagcttctccatctccactctcacttctgcaggtaggccgccatttgaattctcacctggattatcacaaaagctttctaactgttgccttgaatccagcccacatccaccagggcactcctttgaaaatgcaaatctaattgagacagattatgtttaaactcatcaatggcttcccactgttcttggaataaacaagccctgaatgatctcaatggtgtccctggggccacccttccatcactgtctaggccctggtctttcagttcctcctaagaggaagcatgcagcctgtggtctcagacctgggaacctttcacctgacgggttctttagtcccagaacagagtctcagctgtctcctaagcctcccaaatcgggtcaaacacctctggtatctgctcccacgcgcccctgacttcttcttcatgtaacgctgtacaattccaatcattcagttaacgatttattcatacaattttatatatatctgtttcatggtaaattcatcattgtatttccagggtctgggaaaagcctaccacttagtagggctccaattaacatttttggggttttttttttttttcctgttgtttcctgctcacttcctaacttggtctttgctgtcctgcctactcaagtccctcaccagaaagttgcctagaaccctcttacccgccacgcggccaacacaagctctactgctgggcgaacattgttggaataaacgacgtatgatttacaccctcaatctcacaaccctccctttccaatccctccccagtctcccatccctccctttgcaacccctccccaatctcccatccctccctttgcaacccctccccaatctcccattccttcctttgccacccctcccctcggatttctacccctcgggtttctgcttccctccgcctcacctctcctccaaggcctcccctccccgccgccccctagcctgggcccgcccggcctgccaggggctggcacctgactcacctgggcagcctggtgcgccgcctgccaccggctcagctccccagcctcctgttccatctcagcctgcggtcggccgtacatgaagactgggtggggtctagactctctactgaagagacagggaaccagccaccacggcgtcgcaggcgggtatcggtacatcgccacgccacaatcaccttctatttacctatttacagctgcgccaaggggcggggtcaggccccacccgtcccgccctgcgccgccctcgcagccctgccccaggctgccacccaccctcaccatgccccaaccaaggcagcctcacggacagccagccacttcaggccttgaacgcttcttaaaggaatttggtccgcccacccaaccgacccattccacccctcagtctgagcaactgtttcacccaagtggggactgaggacacccaggtctccaactccagccaggaggaggctggagagagaggcgaggctggagagagaggcaaggttgggtgtagggcctctaccgataggagagcctccaccagcactctctcaggtcgggatcttgccataagctttggaagggctggagcttttctgctacagtctgtgcacctctgtcccttgtctgtacgaactgaagactgggagcttcatggcacaacctgtttattccgcagtgtttactgagtgccccgtgtgtgttgggcactgatctctgaactaggggtaaaatagtaaacaggacagaacaaagtccttgctgtcaatttccatcttatacgggaagacaagaaatgagtaataaagttgttaactattataattttaggtggtggtgagtgctatggaaaaccaaaacagaaatgtgagctgaaaatgaaatgcctgaaaggagccagccataggaagattgaagggctctaaggcaaaaaagagcccaacggtgctagaaggaaattgaaggcaaggtgaccacggtgataccacatggacagtgacacgaggacagagggatagggccttgaagaccatagaaaggaatttggattttattctaagtgtggcgggaagccactgatgcttttaaacaggaatttgatgtgatctgatatatgtttttaaaataaaccatttggctccttatggattataaagggccagaggggtgcagagacaccagttagaaatctaaaggagatgaggctgggcgcagtggttcacgcctgcaacgccagcactttgggaggctgaggcgggcagatcacttgaggtcaggagtttgagaccagcctggccaacatggtgaaaccccgtctctactaaaaataaaaaattagccaggcgtggtggcgcgtgcctgtaatcccagctactcaggaggctgaggcaggagaatcgcttgaatccgggtggtggaggttccagtgtgtcgagatcgcgccattgcactccagcctgggcaacaagagcaaaattccgtctcaaaaaataaaataaaataaaatataaaataaaataaaataaaataaataaaataaaataaaataaaataaaataaataaaaaaggagctgtccaagaaagagatgtcagtgtttggtcatggaggtggtgcccacctgtagtcccagctactcaggaggctgaggcgggagaccacttgagcccaggaggtctgggctgcagtgtgctgtgctgattgggtgtccacactaagttcagcatcagtatggtgagctcccaggagtggggcaccaccaggttgcctaaggagggatgaactggcccaggtcagaaatagagtaggtcaaaactcctatgctgattggtaatgggattactacacctgtgaatggccagtgcactccaaccttggcaacatagtgagatcccatctctaaaaaaaaagaatgaaaaacagaatttgtaatggatcagaagggggtagggagggagggaaagaggaatcaaaaaggctcctagattattggcttgagcaactgcatgatgatcgtgccacttggtatatggaaagataggaagaggagcagatttggaggcaactgaaacaagaattccattttagacactgattttgagatgtctattaattatgctcagagaaggtcagggctgtaaatgtaaac

SEQ ID NO: 1095 - DNA, 4001 bp, Homo sapiens
aagcggaacagcaggaagcgcagcgagccgccggtgacgaagatttccttggcacgcaccgtggccgtgtgcgccagggcgaacgtgtcactggggagcggcggggcaaagtcccagcggtccaggcgggggtcgtaacgctccaccgagttcagacactctccgccgatggcatacaggtgcccgtccagggccaccagccggcagtgcggccgggcctggttcagcgggcacacctcgctccagatccccgtgagcgggttgtagcagaagacgcggctggagggctggtgcccgggcccctggcagccggacaccacgaagagataattgaagagactgcagatggcacagccccgggacacggcctcggggggcatgcgagccagcgggcgccagacatcctgctcatcgtcatagcaacagaggccgccggagtcttccttggggcacacgtcagccaccaccaggtactggcggccccggagccggcgctgcaggatcagctcgcgctctgccccgctcaggcacccgtagatgtccgggctgcgcagcacctgcaggtagttttcgctcatcaccttgtaggccgcctctttcagggcctccaggttctgcctcttggccaaggtcagcacctcatagcaattgcccagatccaggcggacctgtggggctgaagcaggggtgagcgggatatggaagaaattggtcccggccaccggctgcacatggggctcccggctgcttctgcctaagccaggcagggcgcccgggtctgggcagggtggagcggggagccggaagccatctggctgcagctgcagctctgggttctccgctatctgcagaaggctctccttccggctgaagcctcgggtggagggccacggccctgtctgcggggaggcggctctttcggctgcaccctttgtgtcaccggcttggcctcccgaggcagcccctgttcccagggaccctggcggtggcctaggggatggaacctcagtcagggctgctgtcctgggagccagcctgccctggaagatggcctgagaggtagattccacatagtagtcgtacaccttgcccttgagccggggctcaaccccctccgccttctgtatgaaatgctcctccattcggacgcgggctatggatgagaaggtataggaggagttgggggcgccctcctgctgatgcagggtcaggtcaacatcggaggcagcctcgagagccccagcctcttctctgctgacccctatcacacgggtgaagacccagctctggttcatgtcactgctgccttgcaagggagccacgtagtgacagtggggaggttctagttgccccagtcctggatgctcacggggtttactgtcctgccatggagaaggctcaccaccggcacagctgccgtcggctgctgcaatgagtccagctggggagctcttcggttcgctgcccaagcgggggaaatggggagggtcagggttactgccaacagctgttctggtttcctggctggggcagcaaggaggcacctgctcagagtccgagccctgcccgccccgctcctcacctgagccttttctctggggcttcctgtctgtggaagtggcccccgtgaccaggacataggggcctcttggattctcacagctgcagccctgtggtgcttcagcccgcttgctgctcctccgacgtcttggccccctcaggagcaccccaggagaagcctcctgtacagcaggctgccctgagccctctgcttcctccttggcttctgcctggccattcccaccccaccgctgggctggggcaggcctcgacttgtacagcctgtaggccacagtcaccaggagcagggcagcggctgacagcaccaccttgccggtcagctgcatatccaaatgccagtcctgggcctctgctcctctggggaacatgcttctccagccaacctggggctgaggaatgtcaagaatctgattaataattgcccagtagggaccagttcctgggtcctgctgagcggaggggagggagttctgggctggttctggctggccagccgaggagaggagaggagcaaaggtgactttgagctgcagagggtggccgctggggcccagagctggcagatcccagcggctggcctccttccatgcttccctggtggctggggtggggggcccgcccaggggctgagcttgtgatcagccacctaagccagctctgtggtcagcagctaggggatgttaggagtatccagtgggcatacaaaagaggaggaagctcttaaccaaacagtcacccgatgccaggaaatgcatggggttggttattctttatgtgtgtgctttattttctcttttgcaagtccactgggctcagaggcttgggtgtggtgagtcatgggcaggtggagccccagtaggcgtggatggggtcattcttgtgaggtctgctggtcctcacagtggggtcaactttatgctggccaagcagggaacgggaacatggcagtggagtctggagccagggcatgcagccaagccacctgagccggcccttgagtgcctctgccctccttccctgcctgacaagtttattaagaaaaaccagcctttctgagaacagtggagaaagacattgcattagtgctcagatcggggttagatgtggacacatcttctcttttaaaaccagacaatctcctacggtgaaagattgagggaagactcacgtctcccagaccccccctcaccatttcccctcccccatcaccagtgctgtgggtcctggacccagactacctggctctgctacttaccaactatatgaccttaggcaagagacctcaccgctctgtgctttgtctgaaaaaggaggatgacagcatacgcacctcatcagcttgtggggagaactaaatgggctactaggaataaacactggggcagagcccccatcatgaaagcttagtaaatatgaactattctctgcttcttcctccttttcctctttctgatcatcggcaccatcatcgctagtatcaattgtcatcagaggaccttccaaagcacagaactaattctacccttctcctgaccaaggtcctcaaagagtccccaaagtcctgtgcaggggtctcaaactcttgctgcatatggaggctgggtaggtaaagtgaacaagtaaggacgtctgtccgccccaccccagccgatggtatcaggcccagcattgcctcatcctcccactgtcgcaaaaagcttagaatcccagtagtgacataatcactctcaattttaaaatgttggcatctgattcaaaaatgaaactgaaaaacactgtgggccacaggaagcacacgcatgggaggaatttggctctgaaggctttgactctaggagacaatcctgactccctatgccgacgttcacaactctctgtgtaccagcttcggtttactcttccagatgcatctcctgatcactgcctagcaaaccgggctcagggtgacttcttggcagggaaggctggtggacatccctctggcccatcagagttgggtaaaaggctgtgtctgggccttcttccctggtgccttcatccgtccaagatcaccttttcttcctttgggtctcgtgttctctgatgctcctcttttaggcttggccacagctgctgcatcgtaaagtgcattgtgtgcaagatctggtctgctgcattctaagtccttgaggacagaggctgtagctggctcagctgtggaccctaagcctatgtggggccctgcaccatttgggacaatagccagcagggattgtctttacactgagtggattggggtgaacactcgggatgaagctcatctcatctcgtctcatgctcacagcccctttggggagagacacgattgttatccccatttgacagcagcggtaactggacctccaagattatgtcaactggcttgtaaatggggactcaaa

SEQ ID NO: 1096 - DNA, 4001 bp, Homo sapiens
agagaggtgaagcaattagcctcagagcacccagttcaatctgaagctcagccaggacccaaacgctggtctcaggctctgagcctggctctctataaagtgtatcactccccctcatcctggtgctaggctggttattccagtgttcacagtgtcacaccctaatcttggcccttgtcctcaagatgctgggagcccaaagtccagtccagcctctcagccaggcttaatgcctgggctccagccaaaccactctattgcctgatgcccaataggcctttcatttcctgcctccatacttggctttgtgctttctgcttcacatgctccttcctgcttgttgacattctattcatccttcagggcttggcctgaatgccgcctcctccacgccttgcatgatccctgcaggcaagagtcatttttcccgtttctatagaacttcatctataactatgttagcatgataataaccaccactcattattctaaacaccacactacattctttacatattttgtataatttgaacctcataaaaagtcaataataacaataataatcatctttaacaagtatatggtgctcaatatgcgtcatgaactgatcagagtttggtgtgtgtgtgagttgtgtgtgtgtataatttagcctataaagtaggtactattattattgtcattgtacaaaggtgaaaacttagacttagagaggttaaatgacttgcccaaggtcacacagccagaacagggatgtgacatctagcttgcctggccccggaatccccatacctgtctatgtagatattctttcttaccagatggtaagcatcggaaggcaggaaccatgttatgtgccattgctgtcaaagcactttcccttcggagccaagcacagcaatgtgtatgtacatagtaggtagtccataagttttaaaaatcttaattttagacccaggggcatgtgcgcaggtttgtcacaagggtgtatttcgtgttgctgtggtttgggtttctattgatcccgtcacctgtatagtgaacacagtaacctaataggaagtttctcagcccttgtccccctccccccctccctcctttttgagttcccagtgtctattgttcccatcttgatgtccatctgcatccagggtttacctcccacgtttgtaagtgagaatatgcaatatttggttttctgtttgatattccataaagttgagctgaattcggatcagaagccagaagttctggaggttggctgtatgttggtcagtctgtgccctggacagcaatctttggagttaattagctgggttaaaaccagatgggaaggaacctttaacttcaaagctagagaggcccagctgaggagaaaaggcccttggagacccttgtccctcctgacccccatgccagcctgtctacctgggcagccctcctctcacagacaccactgcctgtctccccaccagcaggccctcagaatgccaaggcatcactctgcatagatggattgaaataaaacttacctgactggagggaaaaggatcgacacccggcgatcatctgcaaaagacaaagaaggggaggggccgggagagggtcgagcgggtgttggctctgaggcttgtcctaggagctggctgggaatagagtcggcaaggtccccagggtccccagggcttcctccacaattgatgagtccactgctgctgcctctggctgatcgactgggatgcagccaggcccctatgcacagggcatggggccagccccgccctgaatgcacagaaacttggggtccctgagttccaggaggcgtgacccccctactgagagggcctcagccagctcgtcagagccccagtgtctccgcgcctctccctccacccagtctcagctgcaaaggcccgctctgcgaggagagcgggtgagggggcggacacgctcacacacacagacaataactgccatggaaactaaccaacaaaaagaagatttagggagccggactcctctgccagatgggagagaatggagggaagagagaaaggggctgtcctttgcaacgctgccagttatgcaaagggcaaatgtgcacctcagccctaatccaacaattgcagatttttccctcctcaggggtggggctgtgggtaaaaggcagagaagtgggttgacctttttatatgaaggtcccaaacagccaccccatacctttgcctttctatgcacagaggaggcatcagtgtggtccagcgtgggtgcgagattcccaaggaaatgctcagcaccgctggcaaagcgaaactcgttccacaaagcaacgtgttttaccaggtcaagctgaacctcaggggaatttgatcactttacttgggcagaaggcttgaaggactttcttagatgaaaagcccactgtttaatgggtagcaaaacaaggcttttcttcaagaccaacctttctatccatgatgttaaatctgactgcccgtagtttaaagaaagccggggatggagtgggggctagcatcgatatggctttccttccgatggcctttagttttgtttggggagatttttctctctgggataaaagaaaatctaatgagggaacttaaaaaaaattctctggaggtactgtaagggaaataaggtaatctgagcaccagaaatcctgctctaactctttagctgtgtgacctttggcaagtttcttcgtctgtaaaatgggaccaatggggttgtagagaggattaaatgaggtaatatgtgtaacgtgcttagaacagtacctggctcatagtatttgccattgttatggctattgttgttaatctttctgatcctccctttcctcagctataaaatggagccagtgacaccaatctctcatggattaagtgtgaggatgaatcatgtcgttataactgatggagtggtggttataagggtgtatacatttgtcaaaaaccatcaaactgtgggttttattgtgtgtaatttatacctcaactttttaaaatataggtttatatcaccaggtaaagcagccatgagtgtctagaacataggaaatatttattcccttcttcctccctagccatcttttcaggaagagaggaaagagaaagtgaatgttagaagaaagaagtaaaatagagaattgctgggtgcagtagctcatgcccataatcccagcactttgggaggccaaggtaggaggatcatttgagactagtctgggcaacatggcaaaaccccacctctacaggaaatacaaaacttagccgggtatggtggtgtttacctgtggtcccaggtagttgggaggctgaggtgggaggatcatttgagcctgaggaagtcgaggctgcagtgaactgagatcatgccactgcattccagtctgggtgacagagtaagaccctgtctcaaaaaaaaaaaaaaaaaaagtgaaaaggagcattgcataagaaagaggccatattgattttgtaggtaatgggctatctgttgagactcagttattctggctatttcctgagtcttgaatatcaatctgtcacctgcaaaggcaatacctgggtaaatgagttgcctttcttaaccctctcctaatttcatatcctagtataagaaagtgaactgcactgcagggtgcttcctactcctgttctggaagccttttcatcactattacttctccaccacaactatccctttgtctcccagatgccctgctgggctgcactttggttcctgaacaaggtggcctggggaccattggctgcaaggtgtcacacctaatgaagtgttggccagggcagactgctgtccatcagaacagcccatgatgaactgagttagatatacctggaggagactgctacaacctaattaaagaggaattgtgtgtgtatgtgtgtgtgtgtgtgaagggactgggaggatggagaatagtatgtaattaagaatcaagtaaaagtaatccctgg

SEQ ID NO: 1097 - DNA, 4001 bp, Homo sapiens
ctctataaagtgtatcactccccctcatcctggtgctaggctggttattccagtgttcacagtgtcacaccctaatcttggcccttgtcctcaagatgctgggagcccaaagtccagtccagcctctcagccaggcttaatgcctgggctccagccaaaccactctattgcctgatgcccaataggcctttcatttcctgcctccatacttggctttgtgctttctgcttcacatgctccttcctgcttgttgacattctattcatccttcagggcttggcctgaatgccgcctcctccacgccttgcatgatccctgcaggcaagagtcatttttcccgtttctatagaacttcatctataactatgttagcatgataataaccaccactcattattctaaacaccacactacattctttacatattttgtataatttgaacctcataaaaagtcaataataacaataataatcatctttaacaagtatatggtgctcaatatgcgtcatgaactgatcagagtttggtgtgtgtgtgagttgtgtgtgtgtataatttagcctataaagtaggtactattattattgtcattgtacaaaggtgaaaacttagacttagagaggttaaatgacttgcccaaggtcacacagccagaacagggatgtgacatctagcttgcctggccccggaatccccatacctgtctatgtagatattctttcttaccagatggtaagcatcggaaggcaggaaccatgttatgtgccattgctgtcaaagcactttcccttcggagccaagcacagcaatgtgtatgtacatagtaggtagtccataagttttaaaaatcttaattttagacccaggggcatgtgcgcaggtttgtcacaagggtgtatttcgtgttgctgtggtttgggtttctattgatcccgtcacctgtatagtgaacacagtaacctaataggaagtttctcagcccttgtccccctccccccctccctcctttttgagttcccagtgtctattgttcccatcttgatgtccatctgcatccagggtttacctcccacgtttgtaagtgagaatatgcaatatttggttttctgtttgatattccataaagttgagctgaattcggatcagaagccagaagttctggaggttggctgtatgttggtcagtctgtgccctggacagcaatctttggagttaattagctgggttaaaaccagatgggaaggaacctttaacttcaaagctagagaggcccagctgaggagaaaaggcccttggagacccttgtccctcctgacccccatgccagcctgtctacctgggcagccctcctctcacagacaccactgcctgtctccccaccagcaggccctcagaatgccaaggcatcactctgcatagatggattgaaataaaacttacctgactggagggaaaaggatcgacacccggcgatcatctgcaaaagacaaagaaggggaggggccgggagagggtcgagcgggtgttggctctgaggcttgtcctaggagctggctgggaatagagtcggcaaggtccccagggtccccagggcttcctccacaattgatgagtccactgctgctgcctctggctgatcgactgggatgcagccaggcccctatgcacagggcatggggccagccccgccctgaatgcacagaaacttggggtccctgagttccaggaggcgtgacccccctactgagagggcctcagccagctcgtcagagccccagtgtctccgcgcctctccctccacccagtctcagctgcaaaggcccgctctgcgaggagagcgggtgagggggcggacacgctcacacacacagacaataactgccatggaaactaaccaacaaaaagaagatttagggagccggactcctctgccagatgggagagaatggagggaagagagaaaggggctgtcctttgcaacgctgccagttatgcaaagggcaaatgtgcacctcagccctaatccaacaattgcagatttttccctcctcaggggtggggctgtgggtaaaaggcagagaagtgggttgacctttttatatgaaggtcccaaacagccaccccatacctttgcctttctatgcacagaggaggcatcagtgtggtccagcgtgggtgcgagattcccaaggaaatgctcagcaccgctggcaaagcgaaactcgttccacaaagcaacgtgttttaccaggtcaagctgaacctcaggggaatttgatcactttacttgggcagaaggcttgaaggactttcttagatgaaaagcccactgtttaatgggtagcaaaacaaggcttttcttcaagaccaacctttctatccatgatgttaaatctgactgcccgtagtttaaagaaagccggggatggagtgggggctagcatcgatatggctttccttccgatggcctttagttttgtttggggagatttttctctctgggataaaagaaaatctaatgagggaacttaaaaaaaattctctggaggtactgtaagggaaataaggtaatctgagcaccagaaatcctgctctaactctttagctgtgtgacctttggcaagtttcttcgtctgtaaaatgggaccaatggggttgtagagaggattaaatgaggtaatatgtgtaacgtgcttagaacagtacctggctcatagtatttgccattgttatggctattgttgttaatctttctgatcctccctttcctcagctataaaatggagccagtgacaccaatctctcatggattaagtgtgaggatgaatcatgtcgttataactgatggagtggtggttataagggtgtatacatttgtcaaaaaccatcaaactgtgggttttattgtgtgtaatttatacctcaactttttaaaatataggtttatatcaccaggtaaagcagccatgagtgtctagaacataggaaatatttattcccttcttcctccctagccatcttttcaggaagagaggaaagagaaagtgaatgttagaagaaagaagtaaaatagagaattgctgggtgcagtagctcatgcccataatcccagcactttgggaggccaaggtaggaggatcatttgagactagtctgggcaacatggcaaaaccccacctctacaggaaatacaaaacttagccgggtatggtggtgtttacctgtggtcccaggtagttgggaggctgaggtgggaggatcatttgagcctgaggaagtcgaggctgcagtgaactgagatcatgccactgcattccagtctgggtgacagagtaagaccctgtctcaaaaaaaaaaaaaaaaaaagtgaaaaggagcattgcataagaaagaggccatattgattttgtaggtaatgggctatctgttgagactcagttattctggctatttcctgagtcttgaatatcaatctgtcacctgcaaaggcaatacctgggtaaatgagttgcctttcttaaccctctcctaatttcatatcctagtataagaaagtgaactgcactgcagggtgcttcctactcctgttctggaagccttttcatcactattacttctccaccacaactatccctttgtctcccagatgccctgctgggctgcactttggttcctgaacaaggtggcctggggaccattggctgcaaggtgtcacacctaatgaagtgttggccagggcagactgctgtccatcagaacagcccatgatgaactgagttagatatacctggaggagactgctacaacctaattaaagaggaattgtgtgtgtatgtgtgtgtgtgtgtgaagggactgggaggatggagaatagtatgtaattaagaatcaagtaaaagtaatccctggagatagactacagacctcaagctgacagcttgcctgaaccataactgcttgggtgatagtggagattggagtcatgctgccaagtggtcc

SEQ ID NO: 1098 - DNA, 4001 bp, Homo sapiens
atttactgcccttccccctccccccaaaaatttcagagacaaatcttgagtctcagattgaaatttaataagcatttgaagtgaagcagatagctctggtgataacgctttataggtttgcaacaaagcaaaacaaaacgaggcttagtgatgtgtcttggcactatttagataaagtccaggatgcaaacctgtggactggctgtcctgccatcctcaccaaaacccccaaccaggtaaagctgatcattccaaaggcaggtgcgatggcccatgcgtttcatcccacgatctgcacaggggaagtggaaccacaaaggaggagatgtgcctgttggatacgggcagagggtggttattgaggcagtagcactttgtcattcacagaattcaacatgaccaagggcttgcccattgtttttctgctcacttgatttgtaggcctcttcaaatgcttaatattctgtgtactcctttaactcctgtcaactaatttttcctcctccctaccccatcactccatcctctttctgtagtcttcaggttcccccatcttcccaccttcccccccttcagccattagtctggctctcacgagtatcatagatgtagagatcattgcagatggtgtctctagctctggtcagagtttctccaccaaacagcacagcaaagggcccgaccacagaacatgagtgatgccgtagtccatggggccccttctgggacccctgcccactgctcacaagccttgcaagctgttccatcaaatgaggagcaacaggtggttcctccttggggagaaagaaaggactgtccgaagagacctgggcatcacaattttagcctcttcccatcctaaacaagatgtgtgaggagctaataccttaattttcccatgactccaatgcccagctacttctggttcagctaagttgcaacctccaaagagcaatagctgatgacctggatggggtccaggagtttggagcagggccgcacagtgacctgagcgtgaggctgtgtggcagccttcttgcttgtagctgtggacatgcagaaattcagggctgagtgggttttctggaaaatgtaagtgccaccgcccttgccaaggatggatggagaagaggcatggggcagtgcggtaggtgggataagagggagggtaatactgtagagagctcagctagcttaaacatggtaggttcccctggaaggagggtgctagagtgaggaggtggataaattgcctgagaaatctgcttaggcttttgtttttcgagagtgtggatgagagtgaaaggttttgggcggagggtgccataccaataggtgcgggcgctggggtccagccttaatgtgtagatgcttccatagcgtcgctgagtgtggataccgccctcccggccagccacctgcagctctcggtcagagattcgggtgcaggtgtgactactgaggccggcgggggggcagtcaccaggggtccctgtccacgcctcccacacaccgcgctctgtgtccagtgcggtcactgtggccaagcggcgagacccgtcccagccgcccaccacgcagagccaacgcccgtccacgggtgccgcgtcgtggtgactgcgcggggggctgccccgggctcccaatcgtacggcctggcccctagctgggtcgaaaaccaccgtatcgctgctgggctctctcgctcctcctgctaggagaccacctacgagatagaaccgtccccgcagttcggtgcatgaatggaaagctctagccaaaagcgcgtcccgcgccactggcctccaggcccagcctgagcctgcggcccgacccgggggcacggccaccgccatgggccccggggagagggagggcggtggggtctgcggcttggaacgagcccctacatggcaggccaggcacctcgccttccgcgggcttccccgggaacctccccctaccggacgccagccggggttcccacctcaagtcccggctttctctccgtggtcgcccagcaaccactgcagcggctgcagcgcgaccgctgcaaaccgaaggtcgcaaagcagcagttaccgtggagacaggacacctgggtggctatcgggaaccgtatggtggtgccaccaaggctacgggagctgtatcaggtcaataaaaatcctgcaagattgttaacctcagaaagtcggaggacagtcgggtccttagaataaacccctgtgatctccgctgtgaactgatttgcgattttgacatttgaggtgcaggtgctgctccactagggccgggagggatcatttggcttcagggtttcttactcgggctaaccaccccagggatgagcaaggaaggagaagcaaaagtcagagggtggggaagtgaaagtggactgaccactggcccgagagacaggagacctgggttctagtcccaactatgcccctgaccctcaaaggcattgtttctctctaggccttctcagttttgtcattcatcaaataggctgttcgtttattcccaaaggcttgaaggtcccgattgattgggtgggagagtcctttcagctctggccactagagggtagcagaacccagtctctcaggtgacacacacacacacacacacacacacacacacacacacacagagagagagagagagagagagagagagagagagagagagagagagagatagagagagagagagaacccacgcagccttagaagggtgaagtgggggaagagtgagaaaatgagaaaaacagactcctacccttccctgatatcttttatttaagccagtttccagatattaactctgtcccccaggaccaagtgataactgaagaggcccagatgcaagctttctgctttcagctgaaggaggaaatacagacagaattttcctcccaacacagctggtgtggggcaaaaacaggatctgtgtcctctgggactgggctgtaagtgggaatgatgactgctacttgtggcctttggtttctacacatcaccttgctccccatcatacctgagatactgagaccatagaaagtggccaggcaggagaatcacttgaggccaggagttcaggagttcaagaccagcctgggtaacatagtgagaccctggcgaaagaaagaaagaaaaaaagaaaagaaataaagaaaggaagaaaggagacagtggccagggctgcagtgaggatgggcatgtaatgcagggtctgatagcacagcagggctttcccctcctcttcccaactcttggtcctcagagaacacagcatggggatggcatgggcaggaaaggcacagttacagagattggaagattaccaggacctgttccccacctgtaccttaaagccaagattcaacaatagctttgaaagtctctgccctcccaactatagctttccctgagtatgacaggcagtattctcagttttccaaaatcatggtaagaatctctaaaaaatcactaacttttactgtccttggctgaaatttaaaagtcagtcttttccctcaggcttctttctcactggctaacctcccaacagctggattcagatctgtcatactcctaggattaggcaagggcttgcctcaggggtggggcaattttgcttaaaccttattggcctatatgtccattttaggctcttgcttttgcctaagtcttggctgttctgttagacttactttctgcctttcctggatagaaatgggaactccccaccccacgggcctttccagctcctctctcccagcttcctctctgactctgagtccttagcagtaggcatcttagttagacatagagcttgaacctcacatactccttggctgtaccctctccagttctgtacctagatgcttccagttcctcctaatagctggaagcatctgtccattgctttgccatcccaagaccctgggagaggaactgcctaggactcctaccttcttaggttagtttgaacca

SEQ ID NO: 1099 - DNA, 4001 bp, Homo sapiens
agaactagggcaactgaacatatttaattagctttacaaattaagaacctaagaggcttcctcagacccaaacatacacaagttgagggcactcctatgcctggcatcaccaccaaccactagccactatctagtccatgtaaaagctctctcttcttcctctgaattcctctatcacggagtgtccctaccacttgacatttaatatgatcaatgctgaaatgtaagtagagataaacaatatatgtcttgtaaatcttgacaaggttcttgtctcaaatgataaaccgaaaatataaaatttcttaaaggtgttatattattactatttaatgtccttaagtagataagtatttagagcatacataaaaagaggatcctgctttatatgtatgctttctatcctagaagttgcacaataaatgtttagaatttaatgtaagaaaaagtgtgtattcaacttcaacttagagcaagaaaggccactcagtaaaaataaacttttttctaaagaagtatccaaatgatatgtctgatgacttccaaacatatctggatttcttcttaaaatgaaacttcaggccgggcccaacagctcactcctgtaatcccagcactttaggaggctgaggtgggtgatcagttgaggtcaggagtttgagagcagcctggccaacatggtgaaacctagtctctactaaaaatacaaaaaatagccaggcgtggtgatgcgcgcctataatcctagctaccaagaaggctgaggcccgagaatcacttgaacccaggaggtggaggttgcagtgagccgagatcacaccactgcactccagcctgggcaacagagcgagactctgtctcaaaaaaaaaaaaaaaaaaagaaacttcaattgaggacccattacctacactgaataatggaaaccacgcaagttatcgatggacttacacttgcttaagatattgaagctcttcaacaagagggtattcctactctacatctgtgaatgtccattactgttaaagaatcgatattggaatccaaaactttctgaaatgatccggggggaaggaaatcaaactgtggtctccaaaagtccacaagtcacaattaatctttcaacaggaaaaatgagatcctaaattctcatctacttctgtttgtagttggcattttactctataagcactatagataattcctccaacaactctgcaagacccattttacagaaaagcgggtgattcatcaaagcatatgtttttcaaaaagacttaagtcaacttagttgcaactctaggggtgtaaaaaggtctagaacaaatgtccatttactatgaagacagcccggggggtcttttatcgtttccgtgtcaaaatgacagtaccccggtgcagagtggtcttccttctaggggattcctgcctcaacactccaagtctcagcatatccttcatcctcacccttctgaagtgacctattttctagaactttcgttaacatctgaatggagggattccacttcgggagattcggggcagggaatgggtagtaaactcgggaaagactaaattctagagaaggaaacgaagtccttcctcctaataccaccaggcatatggccgccaccgccaggtggaggtatcggagaggggcagttcagggggagagttgagagggtgaccgaggccagatgccccaccccactgccagccttcctcctctgttgggcatgtctcccattccgccttgcagggagaccaaggatggggggtagggccataacccggagttgacggacaggaagggaagggctgactgccatcacttccgcgcaactcacctccgctcccgaacccacacagccgcaccgggcccgtccccagcctgtggggatggagtgcggcgcggggctagcaggcggctcgggaggagccgaagcgccgcccagacccggaggctctggaggctctggagccgtccgggtctggcccctgcggccgcgcgacgtgatgacgcaatgcagctggagcaccgccctccccccgctccagagtctgcgtcacgtgaggaggtggtgtcacgtgacctgtctgtaccctagcgcggggcttctgtacgctgctaggaagccgaattacaaaaaggtcgggtgggcagggaatggtggctcacgcctataatcccggcactttggcaggccgaggcgagcgaattacctgagctccggagttccagacccgcctggggatcacggcaaaaccccgtttctacaaaaaaaaaaaaaaaaaaaaaattagcccgcaccgcgcctgtagtcccagctactcgagaggctgacaggaggatcacttgagccaggcagcagaggttgcagtgagccaggatcgccactgcactccagcctgggccacagaatgagaccctgtaaaaaaaaaaaaaaaaaaaaaatgtccaggcgtggtggctcacgcctgtaatcccggcactttgggaggccgaggcgggtgtattacttgaggtcaggagttcgagaccagcctggccaacatggtgaaaccctatctctactgaaaatacaaaaaaattagccgggcgttgtggcacgcgcctgtaatcccaactactcaggaggctaatgcaggagaatcgctagaacctgggaggcggaggttgctgagccgagatcgcgccattgcactccgggctgggcgaccgactgagactctgtctcttaaaaaaaaaaaaaaaaggccaggcgaggtggctcacgcctgtaatcccagcactttgggaggccgagacgggtggatcacgaggtcaggagatcgattctggctaacacggtgaaaccccgtctccactaaaaatacaaaaaaattggctgggcgtagtggcgggcgccagtagtcccagctactcgggaagctgaggcaggagaatggcgtgaacccgggaggcggaggttgcagtgagctgagatcgcgccactgtactccagcctgggcgacagagcaagactccgtctcaaaaaaaaaaaaaagaaaaaagaaaaaaaagaaaaaacaaaaaaaaggctggatgttgtggggtccggcagggagcctgggaatgtatctacagctcggcgattggctgagcctgagttcctccctaccgctcactaggcagggcaggcagagagaattccaacgcttaatatgccaagcatctgattgcagcaagtatgttttaccttccaggtactgaggaactttttgacatcgagaaaacccacagaggcctcaaatttattcacgtccattgtccacaatggccttttcgggccgaacaacgctgcggcgagaatcctctgagccttaggatccacagacctcagtatatactctgcatcataatgggccctgtcatcaccactgaattgattctaaggaaattctaattgattcaggaaattctaatttattttggtgcacttagtgactgaaaaggcaaaaagcttaattagttcagcttatctgaatgtctagacaaattgtgtttggtaatactattatgctctgtgagccctttgattcttttttttttttttttttttttttgagacggactcttgctctgtcgccgaggctcgagtgcactggcgcgatctcagctcactgcaacctccgcctcccgggttcaagcaattctcctgcctcagcctctccgagtagctgggagtacaggtgcacaccaccacgcccgactaatttttgtgtttttaatagagacggtgtttcgccatcttggccgggctggtctcgaattcctgacctcgtgatccgcccgccttggcctcctaaagtgctgggattacaggcgtcagccacagcgcctagccctttgattcttaagggtactaaaaccatagccaagtgggtagcattctaaatttacaacgtgtccccatcttccatgtcataccttcctgatctaaaactgtccctgactcacaca

SEQ ID NO: 1100 - DNA, 4001 bp, Homo sapiens
tgggggcaccacccccacggagtccctgaactcggggaaggtcagggtgcaccaggccctcagccacctgcatgccctcctggatgctgtgggagccccccgcggccgcgcctcacccgtgggacatgctgcctgcgggcgtccacgtcgtgtttcacccagctcaggacggctcggtagacctcctcctctgaaggcacgttcaggctgtcgctagagaccagttccagaacctgggagtgggggtcctcagacctgagatctggggagggtcctgtggacccagggagccctgaagatgcctaggagggagggttagcaggtgggggctgagtgttcatactgggaggggccgagcagagtcaggagccacagacgaggctcctggggggcccagatccagaaaggtctcggggacacacagcaggcactaaggattgtgggcagggctgtgtcaggaacaaaacggggtcgggagtcaaagacaaagactggggtggggtggggtggggggcgagggctgggcccgccagctgttacctgtttcaggggcagcagcataaactcctcggtcttggccacgtccacgaagtgctgcagcacgtacctgtgggcggccttgagcaggtcgctgcaggagtgcgcatcggcaaagccccggatacccaggcagttggaggggtcgagctgactcagtagaaacttgcagcaagcgtctcggacgccattcagctgcaggagactggcggctgggagcagagtctacggggcaccgagaggcaggtgagggaggcacagggtcgggggacaccgggatccgggtgagggagccctcacctgcacattgccctcgcccaccacaatctcagccgtgtaggcaaactgcaccagctggtccaaggcctgagggtcgatgtcgtgcagcgtcacgtgggtctggcggctctcgctcatctcatctgcggggacagcgggttacacgagctgacccgagggacccacggagcccccagcgccgcccaggcgggtacttgcttgtgaacatggcgtggaagtaggggctgcaggaggccagcaccactttgtgcgcacggatctccttggcagccacgtgcaggacgatgtcgcacaggaggccgcgctggcgcatgcggctcatggccacgaaggcatcgtggtagtgccgcttggagttgtgggccacgctgtggccctcgcggctcagcagctgcacggctccctccatgggggctgcgggccgagcctgccggggccgcgtgcgctctgcctcggggctgcaggaggcgggcgggtcaggcttcgccccgctggagccgcccgcccgccctggagccgctggggggcccgggcagcccgcggggacccagcccctggtgcgacgggggcgccggcagccctcgcctgacctccgccaaggacccccgccccggagcgcgccgtgtccaggcctccgctgcgcccctgctcccctggggcgtagtcagagccgcgaacagagccccgcgtccggccccgcttcccggcgcccccacgagctcagctcctccgcgtccctagccgccctctcgggaccgcagcgggagtcgcgtcctgggcgcgcggggcgcgggtggggaacctactccgggccgaccccgctccgcacctgagtcccgacctcccccggccctcggaagcggcccccgccccttctgcgagcggacgcgagggcgggggccgcgcaggtcccgaggccgccccccgcgccccgacccccgcccactcacgccggcggctgcggcggtggaggcggcggcgcctcgggcccgggccccgggctgccgtgctccgggctctgcgtcctgccggccgggcgctcgctgcggggctgcattcggctgccggacccaccgccgattcgcggaggacccgcgggcttaacggacgcggagactgccggagggctgctcggcggtggcggcccgctctgtgtcgctcactcccgccgctcccgcccgcagccgctgtttctcggcgccgcccgccccgcctcccgagaggcttcggggactagacgttggacgcggattcttccagcgctgcgccccgggtccgcctcctcctccgagaagcacccccagaccccgccatcctcctcctccgggaagccccccaccaggcctcgccctcctcctcctccgagaagcccccctaggcctcgccatcttccttctccgagaagccccccaggccccgccatcctcctcctctgggaagcccccggcctagccctcctcctcctcctcctccgggaagcccccctaggtctcgccttccttcttccccgggaagccccccacaggcctcgccctcctgtttctccgaagagccctcctaagcctcgccctcctcctcctccaaggagcccccctaagcctcgccctcttcctcctccgaggagccccccaggcctcgccctcctcctcccccggaagccatccccgctcccccgaccccctaacttgctctcctccggggagccccggggccccgcggcaccaagaagtcgaatgggaccccgaggccaatccgcccgtgttcgcctcacgcgccccctcagcgccagggctgggggagccgtgcctgcgccccgcggcgcccttgtcgcggggtctggctgtccaggcccgggggcccgggtgtcaggctggtagcgggaaggaaggcgccggcctccccaccgtcttcgtcccgtgcggcgtccccgggaagagccgcggtcggcacccagagggccatggacggggagcgccctgcgtggtgttcgtggcgctggcccggtctccgcggatcggaggcgaagccagcctggccctcgggtcgcccgtcttttgtcgagctggcgacatcagtgcggttcccactgcccctcgcgttttccactggactccctgctttttattgttgatttgtgggagctctttgcataggagccccgccgttgcagtctggcgtcctcgcaggcgcgtgccttcggagcgccgggtgggctgcgggcgcggcgggactcccggtcttccccggggcggacaccggcgtcaccgcgtcctacggagccgggcgccgagcgggaggcgcatctgggccccaccggggctgcccgcaccgagcacgcgaacgcgccctcccgccctgaggccgccggcgttgcggtcggagaaccatagagccactcggctgggcgtggcgcggcggggcggggaaaggggcggggcctgggcggcggaagtgcgcagccgcgcggcattctggggccggaagtggggtgcacgcttcgggttggtgtcatggcagctgcggggagccgcaagaggtaagccgcgggtccgagggccgatttggcctcccggtgggtgtctgtatccaagggggcttttcttgctcctctcagcggggctggggcgagctgggcgtgcgggcagctgtgactcctgcgtgacccgcaggcgcctggcggagctgacggtggacgagttcctagcttcgggctttgactccgagtccgaatccgagtccgaaaattctccacaagcggagacacgggaagcacgcgaggctgcccggagtccggataagccgggcgggagcccctcggccaggttagtggggacatgcgtgagcagaacctcttgctcgtcctgtcccaccccggttgggttgctgacctcgcctggggtctcagggccaaggcctaaggatcgccgacctctgccccccagtcctttcagcttaacttactctttcatccgatgtttactgagctcctgttccgtgccaaactctgtcctaggcagggagcgtatgttggtgagttgtgcaaaaatctcttcccgatctaggagaactctcacgttcttgggtgaaatcaccgcctgcagttcggtagaagagagataagtgctggggagggaaaggaaggacagaggggctgaagagagagt

SEQ ID NO: 1101 - DNA, 4001 bp, Homo sapiens
ggggtacagagaaggtgaacagctcaaggtcaattgataaaccaataacagatttggataaagatatacattctggttcttgctccaagttctgagttataagtcatattcccattataaaatgtttcttctcttaaaagaactgcagaagttgtttatctttgatgttaaataacaaatgattaaatagagttcaataaatagaaaacaaatgtaaaaaccaaagaaatagaactgggatgattttgtatcataaagattctagtctcatttgttagaacaaaatgagaaaaaacattattaaattctagggttgggagggcctatttattgtctatattttcccagacattgttctatttttctatggactaagttattatgtctaatacctattttagtccttatacaatcttccctacaatgcagctattttaattaacagaacaaatgtatgattgaacatcaaggaaataaccaaaaccataattaggcatgcagtacagtatattataaataattatgattcttacatgggaacagaatcctctacattttatagggaactgaagattataataaatccatatagtatcataatgaacttaatgattatttactgtaaaaaacatgaaaaaaggaaaatttaagtgtttagcactacatacaatccacagcacttttcagaaacaacttctgtattttattctattaaaaagctattaattcttaatattacttttgatttattgtagaacaagactcattagttccaagcagaatttagtaagattgaaactcttttttaaaaatttaaattattacatgctgaattttaatcagtgaaaccaaaggttttcttcctaaatgcctacctgcgcattggctttccttccatgcaccatgaaaagtacccttcaccacactctaaagccgaacctaagacaacagaaaagcaggaacttaataaaagctatttctgatctttacagtaacaatctttatataatcatttcactcatttcgtcagttatcaagagtttcatatcctattataccacaggccttctgcagatgcacaataacttaatctagtacatttaagattaccatccttactctgcatgctaaaacgattaaagtaaaggtgagggaaagtatgctaaatagtcccgactgttaggtcagtcttgtttctcttcaaaaagtgcttggagatatttaactgtgatctcgacatcaagtatatttacagaacaagcaccagatacccacagcagtactaacctgatagatcacatagggtacacgaggctttaataacgaatctgaagattgttaacttgtcccgaagtgacaggaggaggaggcgtctgcatttgcctttacaaacaactccgcttccgacagtccagggagcttgaacagggcagggaaagtatggctccagactaacactctttacaagcatttccttcagtccccgatacaatgttcactacccacgtagcaggatttcgccaggtcccgagggttaaatgggggcgcacgtactttcttccttccctgaattccaaacactgtctggggaagctgtccaggatgcgaaaccccagcaccaccaggcaggacaaagcccggggcctcctctggctcccgagataggctgtcagccagcgagagcgcactctggcgctccgcgaggcccggccccagcgccccaacagtctcttctcggcgccgactgacaggcgaccgacctgaccccatggggcagctcagcaacttgggaccacatatctgcgaagcgagccctggggcgctgtccgctgtcccctgctctaaggtgactggctcacttaccggctctgacactttcttctctgcagcagcctcctccgtctactccgccctccactcctctctgcctcctcctccaccgccgctaacgcaggcaggatgccgctcgtagagctatttcctttcccttcaccggcccatatccagaagcaggaagtagtcctattcttaaatcgttcccgcaggaacccacataatccgccaaggggttccggtgcggctccggaagtagtcgtgccctttgctggggcattcaggtaacctcagaggttgtttatcctcgtgggggttccttgtatcccaagagtaaccatttttagaattcactgcggaactggcagtatttgaatactgaagcctcctcttttcttctttgttttcgccagcaaaggcagtaaagggtagtcacagaaagctaagaatttgtatttctttttagttggtgggtctccttttggcacaatgttcctaattgtggattgaattattgcatgcacacatgggttggcatgtatctgtcaggcctctactatgtgcaaggtgcagaagttagatagacagaccagagatagaccttatcctccagatttcccacggtcaaactttcaggacaccaggattttatccaggctctaaggctgtgttagtctgccctttctacttagtattcaccaccagacacttcaccaaacacatcttctgtggattcactttaatgttaaggagggaagagtatattttcttaaaaaaattttttttcagtagcaagcagagccaaaaaagtatatttttaaaattatcttttcctccagattttcccatagcacacagccacctgatttttaccgtatattaatatttagaaaacaagtgatacaagtgtaaggtggggattacaatttcaggaatatcagagaaagactgttgctgatttcctggtaagtatactaggctaagtattaaccagattttctttagctgttctttatgtagaatctacacaggtgtgtccagttgtttctgaggggaaaggatacctcttgttaattagcttgtagtggaaaatacatggcctttagatccagatatagtggcccagtggattcttcttgcctgctgcccagatacagatgatttatcaaggtatagggattgcaatggagaaagagttttacacaacatcgagtggaaaaatggaagaagttttattattactcaaatcagttatattattactcaaatcggcctcctggagcatttgggggctaggtttcttttcaaaggtagtctggggaaaggggtaggggtggctaggcaatgggtgcttgctgctgactggtgcagtcataggggtatgggagatggtcctcctgcctactgagttgtttctgggtggagccacaggaacagttggtgggtccaggtggagccatcagtagtcaaacatgcaaaaaacttaaaaatatacccaaaaaggccaatcctagattctacaatagtgatgttatctgtaggagtaattggggaagttgcatatcttgtgacctctggaataatggctggcaatcacttatgtctacacttaacagaattcaggctcatctatccccgttgtctggtggtctctcattagctttacaaaggcaattgagttttggggaaggactgtaattatttaaactattaaactaaatgtctcccaaagttatcttggcttaagcccaggaataattaaggacagactgaaagctaaaggcaagatggggtttggctagatcagatctcctccactgctataattttctcactgatagaatttttgcaaagggggtttcagtttgcaaaggcgatttcacggatacacataggtacaaatcctagacctgtaactgactagctttgtgatcttattgaaaatttttactgcatgtgtatatgtgatatatatacatatgcagtaaaatgatttcttttccatattttaaaacttttcataaatggtatcaaagcatatgtattcttttgcaacttccattttccactcaacattctgtttgtaagatttgtccatgttgatcaatgaaggtccaattcagtgattctcaaagtgttgtcctggaccagcagcatcaacatcactt

SEQ ID NO: 1102 - DNA, 4001 bp, Homo sapiens
ctaaggaagctgtggcaacagaatccagcaactgtcccacctgacacctcagagccccactggaactcggagcacgtcccagagtgggctctctcgcgaacatgcaaggctgggcacagcagctgtgacatcccagtccccacctccttgcctgataaccgcctcacacgcctgcctggtgggttctttccttatatagcagtcacagagaccgcccttcctcaccccgacaaaggaggtagcctcgtgtttgaactgggatttatctttaataaaaaccgtagaagcccaaactcaggcggactgggacccgcctaccatgactcggcagtgttttggggtttgggccaagtaactggaagaaaacctcttaacatgtgaccatgtttacaggctccggggagttcagcctaaacaccatgtgaccagagcacagagcctaggtgcaagcccaagggaaccttgtcaccgggtgacaaagagtgagtcagggggcccggtgtggctcagcagggagggagaaattccccggcttgtggggaacagatgcctcaccgggcgtcggcctcctgcccgtccctggattccttaaggagaaaaagaaagcacccattgtgcggggtgaatgccccagtatcttccaaccaagtggggaggcacctcctgggcacggagttggctcagcctggcagccccggccgcacggggcacagagacccacaagcagctacttgtcccggctcacacaaggggcccttcttcaaggttaaaagtatcgcccagagacatgtagtcaccagagccccagcttggactcaggtgcgcccctaggattccaggctctgtgcgcttcccccgcgaatagctgggctcccgtaccggcgaggttcaaccccagagagcctgcccagcccctggcccactcacccgtcacgtagatgtcattgcccagcgccacgatgctgtagcctccgcccaggtggtctgggaactcggccaggtagcgccactgacccgtctgcgggttgtagcagtcgacagtgaccagctcgtcacagtcctggtcgcagccgcccacgagcacgaggatctcggcgagaccggtggacgggcgaggacgcattcggggacagggcccgcggtcgtggcggtcgtagcgcgccgcctggaagtcgcgcgcctcgcgcagcaggcgcaggcagggtgggcagcgcgccaccagcggctcggcctcgacgtgcgccaacaggtagaagcggcgcacgaagggcaggcgcacggcctccagcagctgcggccagtgcgcggcgcggcgcggcgggtcagcgcggacccagcgcagcgccagctggtaggcggcctcctccttgggcacacacagcccgtcgtcccgcaggtagcgcagcaggcgcgccagtggcagccgctccagctgctcggcgcccagctcgcccacgtggcgcagaatgaaccgctgcgccgcgctcgccagtcccgagcagctgaaggcctcagcgaagtcctgcatgtccaggcagttggccaggtcgagctgctgctgcaggaaggccccgcacgcctccttcacggccgggaactgcagcaggtcggcggcgcgcagcagcggctcagcgttgtcgccgcttaccgccacgcggcccgtgtagctgaagtccagcagcagctgcagcatgtcgggaggcactccgtgcaggcgcacccgctcggcgcggctctcgcgcagctgccccgcgaacatggcgcggaagtaggggctggcggcggccagcaccgcacggtgcgccgggaagtcgcgcccgcccgccgcctccagggtcacgtccaggaacttgcgctcggcgcgcagctggctcaggccgcgcagcaggctcagggcgtgcgcggggtccgagaagggaagcacggccaggggcgccggtcgctccatggcgccttcgataggttgtcgaggacgccgcggccggggcctgcggagagacgcggcgcgctaggcaccgctgctataaatagggcggggcgccgcggctctcgaggggcgggatgggcggggagacgtctgcaccgcccccttaacccctctgtgccgggcgccaccgccccccgcgagcgcgggctcgcctgtcccccgcgcggcgcccgcccccggctccgcaggctgagtcaccgctgtccgcggccggctccctccctccgcccttctgcgtctccccgctgacgcccgggccggggacagcgagtgacaagtgccaggtccgagggcggcctcgccgcgcgccgggaccgggggcctcccggggttgcccacgacccacccggcccggctgctgaacccaacccgggagaggcgagctcggccctgaaaccaaagccacccctcctttcacgccagacttcccaagggcgccggcccaggtcccggggcggctgggtacaatggctttttgttttgcttttgagttccactagtttcaagggttgctagttaaccccatcacgggacacactcaaaggataggctttttaccattctggaccaaagcaagaacgcgtataaagtttttcggtgacgtttttttcttggcgcatttataagcgacccggggccggattccaggagtcggccccactcctgtgttcctgaaggagcttctgactcaatcacacaggcgttaactttagtcggcttcacgcgcagttgtagtttccgagtctgcgtcgcagctgcaggctccggggctgcccgccctaggggctcccgggcctccctgaagcagctgctcggactccacgagagggtaactgggtataaagagcgagggctcaaagtcagataggagaccgccttgaaactagatgacgccactaagcacagtcccgccgtcacttgtactgcggtggggaatggtgaaagaaggaatcgcccttattttagttccgatagacacagcaccactttgaatgtcacttgtaggggaaaaagagccctcccttggaggccattttttcctcagtggaaggtaggctttgctcagttttagaaaagacccctatttcaccaccaggactgctgctttgcagagaacacttgggtttgtgctgttttccagcccccctacaccggtgggcctttgagaacgcattcctgaggaaggcgcccgcccacgtgggtcccagagcaggccacgcgcatgggagctggctatcatttcctggttccagcgaggtctagggccgcgtagcgtttccagaagacattttgtttttattccacctctgaaatgagaaccgcaggctttctcttctacttaagagtttcacgtcattttgccataagaatgcatctggtctgaatttcagggtgagcatgggcagcacaggcccaaatcagaaaacattcaggtacccaggcgggccgcctgttgcccatagaaggactgttcacacagctattcaaggcagcggcagcattcctgggcccaggagcagggccaatagcttccttgcacaggctttgtgacaagaaaggctgagtagccaggaagtggaatgtttgtagggaaaagaactcccgtcccctgggtcagcttacccatcttgcgtaagtccagtgattaaatcaataatgtttccatagttgaggattgagtacggtttttctgtattcccaataacagggatttttaaacatcatatttcagtcttactatgtagccttgaagaataatgatgtatttattgaaatggaaagatgtttgagctataaagcgaaaaatcagattactcattgtatgacccaaattgatttatatgtattcatatgcctaaaaaaatttattaagttaacattttcggccaggcgccgtggctcacgcctgtaatcccagcactttgggaggccgaggtgggtggatcacctgaggtagcgagttcgagaccagcctggccaatatggcgaaaccctgtctctactaaaaataaaa

SEQ ID NO: 1103 - DNA, 4001 bp, Homo sapiens
taaaatcctccaatagtttcccattgtaatttgaacaaaatctgatcttcttgcctggacctctaagatcctacaagatctggtctgtcagcttttctggcctcatcagctactcttctctggcctcaggcagttcctgcctttctttctgctccttgaacttgggcagctcattattgcctgagggtttctcttcctgctgttccctctgcctgaaatgctctttctcaagatcttcacgtagttagttctatctgatcattcaggtctctggtcacatgtcccttcagcagagcagctgtccctgaccacattctaaacaggtactcccaaagatactctctacagcactaccctgttttcgtttctttcatagtgcttctctttaactgaaattgtcttatttgttttcttcttccttgtctttttcttctctggaattctcaccctcgcatccctactacctaaaacaatattggtacatagtaatcagattttgttgaacacatgaattctcattttgtgcaacattttgataggacagattggacacaagcctagtatgaagcagtgacgacacatgtcccaaccagtgaccaacacatcatgtgatagcatttctaaatgaaaatttagaatcagaaatattaaaagaactgttctagcactttggggaaaagacactaaggaaggcagaacaaaagacagcatatactgtataaatacatgtgtggcataaaatataccatctatattcagcctagaacagtgttacgccctcaataaattttttgttgagtggatatatgaataattaatgaaaagtctccaaatgatttgaccaaaggtgatagggaaatgatttaaccttgactaactgggatgtttgtattctgaaacagaaattctgctgagatgggaaaaagcaaagttgaatcggagcagacccatgttaaacagaactacctttggcaccataactatgaaagcagagagtgacctctccttccgtcttgttaggtatgggggaagccccagcacctttacgtcacgtgctcagtgagaggtgaacacctcactccactgtcttaggtgctccactggaagagtcaagtaagtcaggcgaccacataaatcttattcccaattactcatataactagtgaacattcaacatgatactttgacgttagcttcatgtttcttgacccttttattctcattagacagcattaactgagttattaaacaaagcggaacaaatgtttttattaaaatgaatattgagactaattcctgttcctaaaaacatagccaatttggggataaaatcaaattcaatttgcattatttttgctttttaacaaatcctaaaccaaaatgatgagggaaaacagaaacctttgtatttaatggctataaaatacctttcctgaaaaagaacagattaaaactcatactatattaaatctatgaaaataaaaatattaaaaaaataaacaaaatagctgtatttaaatatcagagttttcacaagaaaattaacaatttgcagaagtgacgaataataatcattacgagtaataatagttaatataataccaccaacaatagtaatccatctgaaaattcttaccaagccaccaccaatgacagctacttttttcctttgaatgacagatgagtccataactgctgaagtatttttcacaattattgttgcttctgtcactgagtgacactgatttctgtgtctcctacacactgatttctctgagtttttatactgccccaagcctagtgcattcatgagccagcggcaatgtttagtcagggctaatttcccttgacagtattaacccattagttggccaaagtacaatcagctcagctctaagaaaaaataaatccattacaataaccaaattttttaaaaaatccatccaattggagacactctattttttctatcttctgtgtaagacacagaaatttttaagcagtcttgtggcttttcttcttctttttctacagcatatattcttagtttcgttttcattcatgattaaccatgaatggagcccttctcatctgaagtccaaaaacatcttatacctcccttagagagtaagatgacatggtttcataattcatctgtggatcatttttgtggttaagaccaatcaaaaatttcatctaaagggtcctcatggattgtttttaacaggctctaccagggaaaattctctgcaaggtcttaatattctcccgatcaacattttgaattgtgtaactgaccatacttccccttttttttttcagcccagatgctagaaaatttagaatctaattttagaatcgaaaatttagagtctaattaccactaggggagatgactgacacaacgcttctgtaaactcattcccgacttcatattatctattcacttttttgtctttttcactccgttttaaatgttatacttttgtgcatgatttgcgaatggcaattgttttctggaacatgatgtggtgtaatgtaaaataagaacataaatgaagttgtttcttcacttcctgttaagcacataaagaattcagaacgtttttttccctggttaggaactagagttaaatggcattcaatagtgaccccttgtggataagcatgattaggtattttatttattttgaataggtaatacattaacatggcatgaaattaaagacacaaaagagtacacggtgaatagtaatcctgctaaccttgacccttggccacctattcctcctgcccaaagacaacaactgttttggtgtgtgggttaccgtattcttctacacgttgattatgtctttcttgttcttcctctctctccttttctctctctctttctctcactctctcattcccttccttcctttctttttaaacatacatttaaaaactttttccacatcatatttctcactttacaacatatagcttgagaattcttcaatatcaatatgtagagaatatgtatcaattcctcagtatcaatatgtatcattgttaaaaaatcttttaaaaattatgaactataacacaaatgaacagtataataagttactgtaaagcaagtatccatgtaactaccatttaggtgcagagagagaatattgccagaatcccagaagtctaacgtgccccctgttaatcacccctccttcgtagaggtaactgccataccaactttctttgcttttatgtataattgtaccatgatagatgcatccctaaaatagtttagtgttgacttttttgaactttcctataaatgaacttatactgtttatttttttacaacttgcttctttttctcaatattatatctcttaagatccatttgtgttgttgcatgtttttccagttcattcatttttatcgtcatttattatttgtccattgtgctgttgatggacatttggggtgtttccaaatttttaatatcatgaataatggtgttgccataaacactcttgtgtatacaatgtcatgtacatatgtatgagtatctctaggtttcatatgctgtttatgcttttttgtttgttttttgttttttgggtttttttgagatggagtctcactctgtcacccaggctggagtgcaatggtgcaatctcggctcactgcaacctctgcctcccaggttcaactgattctcctgcctcagcctcccgagtagctgggattacaggtgcctgctaccacgcctagctaatttttgtattttttcagtagagatggggtttcaccatgttgactaggctggtcttgaactcggcctcaagtggtccacccgcctcagcctcccaaagtgctggaattacagatgtgagtgactgcgcccagccatgtttatgcatatttttaacctttctgaataaacgaaagttacattccaaagtagtgcattagcttttacttaacacaatgtgtaaaatttgtcttctgct

SEQ ID NO: 1104 - DNA, 4001 bp, Homo sapiens
gatcttccttccccgtggtctgcccctggatggggatggattcttaggctccctgcaggatgagaccaccccaagccccctgattactgagccattccccaaatcaagcctaggttgggaagggaagtccttcttgctatctagtctccatccctgatgctgtctttgctccactgcattcctttaggtctcacatgatctgggctgatttgggcaggagaaaaagaactgggcccttgaaggagaaaatggcagatcttttagggaggtgaggtcccggggagaactggggccatgagaagccccataggattggtggagatggcagcctgtatgtggggagctgagatgaggtgggagctgtgcagaggctgtggggtcttaggggaaatagagggtctttcatgggggctcagggatggagagggagttatttagagatgttggaggctttggggagtcataaaatctctcaagggagatgaacttcccagctctgagctggttcaggcacctttgctgcaggctggattctgccgttctgtagtcatggcaacgcctgcacaacacacacacacacagcagctctaacacagacagctagcgcggtctcacacatgggctcatcccagccacacagtgggtcacagacgagcacacaaagggtctggaacagtccttggcagaggggtctgctggggtcagggagaggcctcacctatggtaggcaggatgtggtccaggttgaaccgagccttcaggaaggggtaggccaagatgaggagccctgagaagagacacagggggttctgtgatggggaggagcctggtgagtgttgaggctgtgggtgggctgggagcctgaggggtggtttgtgagatatgggtgtgcatgggaggagcacagtgtgcagacttgggactgtgagtgtgtaaatgtgagcctgtgggtgtgtgcatctgggttggtgggggcagtgcctgtttggggaagaggctacagactgtgaaggccccacctgcctggctccaccgttcctaagtgaagagcaggttgctggaatgagcctggctgacaccaccactgcgtctctgctgtccccacgcttccccagggcccccagggccggactgggtgcttgtcctcagcatgttcctccccacccagacctggggagcaggagcagtggagccagtcctgccttgcccgcccccgctccatcccccgatgagcatctgtgccagaacccgcaggtgtagatacctaaagccccctagcctgatgcttctggtcctgcctttggcctgggcgggggcggggggtggggtgaggtgaggtgaggtgagggatggcattcagcgtcactgcggggcaatcagtgggcgtggccccacacagatagatggacacagctgctgtggaggcaaacagggaaagaagacgaaaccctttttctgagctggagcctgtcttggctcagagagtcctcaggagctctgtccttttacctgccgccatcaaccccctgttccgcccagataggctgatgaatcccaccacaaatccaggagcctagagcttggggctggagagccagtgggagtagccagaaaagagtgtgacggccagctctccttcttttctcctccctgtggctggaaggagccccagcgcgtcgctcctctcccgcctgtgcccctgatggcggccttgctcacacctctagcttccgttctccccagctgattcctgctgacccagcccttccctgttccttgttcacctgacgatgcccctgcccccacctccagaatctcccttccctatcccagcccagcccctgctcacccagaacagcagcgccaataaagacaccgcccatggcagctgcagccttggatacggagatgccgataatgatgctgccagccaccagcccgagagccacgcaggccagctgcaggccgcggaagtctctgctgctgatggggatgtccatgcaggcccacccggggcactgcctccagccggtgcagtctggccccagaaaagtcctggaagtttctgggctcttggatgtctccttgttggcgctccaacttcagggtaggagtttctgggcagtaagatgataggtggggaaccctgggatttatctgcagtcctattccactgctccactacgggccccccagtcccaccttgaccagggatctgtacgaggtcacccagcttactcttcctctctcaaagccctctgaagctgaagcccacccttgggactcctgtctggctacatttctgctttggctgccagagttctagggagctgggcctgttccataggatccttccctgccagcctccacccaggagagttcaagctcccctgcccaggacatcctgccccagcttcctagagccacttacttgccactgaacctcagcctatgaaaatttaaagcaatgagaggcagggtgaggggggagttggtccagcggccacaggctcctcagagatgtaggcagcagggaggtgctgagttattcatgaggttgcaatgtgagtggctgtctgggtcccagggcccagcgggcagtcagcccaggttccactgctggttcctgaggaggaagaacgagctggtggctttgcatgtcgttcagaagccagggatgtgaggagactcctgatcacatgctcagggcccgctgtaatgtgctctgccctttggcctggaggtgcacctggggtctctgcttggagtctgagatagacacacagcaggaggctcaagagacaggaactgcacctggtatggaaagcggacagggagaggcatccctccaagtctgctccctacccctgcccatcccatccccatcctgtccacctctgggctcccaggtagggctgagggcgtcctagtttgaggcttgatctcaggggactcccttgtcctcaggtgggcttggtacccaccccccttttagtggccagtggaatggagagtgaacccttctagccaccttggggatcccgactgggagtgaaagggaagagcagtggtggtgctggtgtgggcaggaggaaaacacctaaggggtagggtagagaagaggacttggtaggggctaggtgccgggagtgggaggctgggtcatggttggtgccttcccatccgctgaactgagcacctgcacccagcctgtctgagttacttgcaggatgccccaccccaaggctgggcagtggtcaccaatgcagcctagccctgagccctgccccggcccccagttccagcctttatcattcattgcgttatttggccctttatggattggggaccccccagtctcagaatatggccccggcctggccctgcacctgggcacaattcctagggtcccataatcctgctcggagtcccgtcgccagcctccctggcctctctttggatgccccctctctgcactgcatctgcagtctcatattgccaggctcaacttcttgttcctccacctgcctccatggctgccctgttcttgttctatctcctctgtaggctgagagccccttgagggcaggttccaggagtgagctccccagaatgctgtggctgggagggacctgagctaggcttctgaacatgaggacagagttcagggagagggcttggactgcacaaccacctccagtcatcaaagaggagggctgtggacacaagggaacctctgtctctaacaagaggcattccttgtatgtggagaagggggcctgagaaggcccagggtcacctgagttggagcttcggctcatgatgagtctgtagagaggggtgactgcagcacacagatgggccctggactgtgttcctgttccccacagagggaacacccctggagctgggcattccccagccacggtgctgctgccagcatctgctgtgcctcctgcctggatgagatctgattattcctctaattaggcatcaaatca

SEQ ID NO: 1105 - DNA, 4001 bp, Homo sapiens
tctcattttgcttgccccacacacaataattagagttatcaattcactctggactccttcagtttcgttcagaaaaaggatttcaaagtggccgggcatggtggctcacgcttgtaatctcagcactttggaaggcgaggcgggaggatcacgaggtcaggagatcaagaccatcctggctaacacggtgaaaccccgtctccactaaaaatacaaaaaaatacaaaaaaaattatccaggcgtggtggcgggcacctgtagtcccaactactcgggaggctgaggcaggagaatggcgtgaacccgggaaggtggtagttgcagtgagccgagatcgcgccaatgcactccagcctgggcaacagagccagactccgtctcaaaaaaaaaaaaaagatttcataatgggcccacatgcaaaaacaaaaagcaaaacaaaacaaaataaacaaacagaaaacccaaacacatttacaactttgcctagggttaaaagcttttttccccttttctccctgcccaaccactagagggccaggtcatttaaaaaaaaaaacaaaacaaaaaaacaggctggacgcagtggctcacacctgtaatcccagcactttgggaggccgaggcaggcgaatcacttgaggtcaggggttcgagaccagcctggccaacatgacgaaaccctgtctctaccaaaaacacacaaaaatcagccgggcgtggtggtgggtgcctgtaatcccagctactcgggaggctgaggcaggagaatcgcttgaacccgggaggcaggaggttgcagtgagccgagatcgcgtcactgcactccagcctgggcgacagagcaagactctatcaacaacaacaacaaacagcagttacaaactaggcttgggagtgttcaccctggcttagccactgcatgaccttgggtaagttactttacctctctaaagctcagcttccacatctgtaaaatggcaatggtagcatctatttccttaggttgtacaaattaagtaaaacaagacatgtaaagcaatcagaacaatgcccgtacgtagaaagagcttagcaaatttcacaatttttactgctttagaggaattaccactgttggttctgtctctaaatccaaagacttcgccatggtattctctctgaacagaggccttgccagccggagtcccctcagaaagatcaacaggtcgctccttttctccttaccagggccagcccagaaacctaaagtcctcaacctaaagatggccaagaggacttggcctttggtgttctaccatcacaagcgatgccactctgagcccaaccgaaccacactatttccgccttgattccgttctcccggccttcagcggcgcaagctgccctcggcctggctgcccatgcttaccggcctagtgctggctcgcctgacgtcccctcactagaggactccacctcgctacgtaggtaggacttccctgagttcaggggagccactgaatctagtcaagacacgcgttggccaaacacaacccaggagaaagctaccttagcgccgcccaggcctgccgccgggagcccgtcccccagccccagtctgggcgcaggacagagagtaggcccctttctacctcccaggaacacgtgggctcctgcccgaggccaccatgtggggggctccaggcgtgccaaggtgtccccgaaaccagcaccaaaggactgcttccagcacgggccctagctcggcccaaaactggcaagaggggcactcccggcctgacttttcccctcagacctagctagaggggatgcagacatcttccgcagaccggagacaggctctcgccaaatcccaggccccgacactccctgagcccaagaaccctactgcgtggtttcctcactcacccatcgcgggtccgctcgctcactcttggcggcggaggcaacggcggcagcttcagcggcagctttcagtagacaatatggcggatctgtaggacggcagcccgaaagggacaaaccagttaactccaggacgaaacgctttattggcccaatcgcctatcattacaccgaaagtgcgcacttaaagagaccgcagctactaaaggtggggagtggaaatgaaataggaaaggagtggttgggaggagactggaagggatacctaagaaagttaagtgtgtctaggagttcccagctgtttctgctactatttcttttttatagtgagatttctttacccggaactttttctcccagaagcttatccctcctttttttttttttttttttttttttttttttgagacgcagtctcgctcttgtccccccaggctggagtgcgatggcgcgatctcggctcactgcacactctgcctcccgagttcaagcgattctcctgcctcggccccccgagtagctgggattacaggcgcctgccaccacgcctggctaatttttgtatttttactagagacggtgtttcaaccatgttggctaggctggtcttgaactccttacctcaggtgatccgcccgcccccaaagtgctgggattacaggcttgagccaccgctccgggccagtttatcccttcttctaatagttgaaaccaatcggctgggcgctgtggctcacgcctgtaatcccagcactttgggtaggccgaggcgggcggatcacctgagatcaggagttcgagaccagcctgcccatggtctctactaaaaatacaaaaattagctgggtgtggtggcgcatgcctgtaatctacttgggaggctgaggcaggagaattgctttaacccgggaggcagaggttgcagtgagccgagattgtgccactgcattccagcctgggagacaagagcaaaactccgtctctaaaaacaaaaacagcaatcatagaccttgggctgaatatgaacaacgaatcatctagagaggggaagtgccttgctcaatgaggctatggagagaaggaaacaaagaagtaagactaaactcaggttttctgattaggcctacgtaggtagccctagttgaggttgcaatcttattgggagatgagaaatagaaaaatagggctgggtgtggtggttcacgcttgtctataatcctaacactttgggaagctgaggccagagaatcacttgaggccaggagctcaagaccagactgggcaacacagtgagaccccatctccacaaaaaataaattaaaagaaaaaaattagccaggcatggtaatgagcacttgtacttgggcggctgaggcgagaggatcacttgagtccgggaggtcaaggctgcagtgccatgactgtgtcactatactccaggttgggtgatagagtgagaccctgtctctaaaaaaaaaaaaaagagagagagagagagagaaagaaatgggctggacatggtggctcattcctgtaatcccagcattttaggaggctgaggcggcagattgcttgagcccaagagttcgagaccagcctgggcaacatagcaagatcccccgtctctaaaaaaaaaaaagaaaaacaatgagacccatgcagtatagttaacagagtgatttcataatcatttcatttatcctcacagcaagctccttgaaggcaggggtgggttctatattgtttaccaccgtatctccagcacctagcacagaatctggcacattgtgtgtgctccataaataactattgaatgaataaacaaaggaatgaacaaaaaattgagttacacagagcaagggacatgatctccccttttagagatgaggaaattgaggcttttattgttcatatgccttttcaatcacgggacgtatggctagtacatatcaggcctttctttttccatgacatggcagccctcctgtcccccacctcgacacacagagccaggctatatcttcaagacacagagggatctatcttctggaagcagaacaagggcctgtcacaacaaactgccaactttagttgt

SEQ ID NO: 1106 - DNA, 4001 bp, Homo sapiens
attctacataacaagtttctgtataacaaactggagcacattctacgaagcaagtctgaacaggttgtgacgcttcgcactgcacgtaggacacctcagattggcatggagcctggctttgaacagaggaagtttgagattgggatgcagcctggcccttcacctgggtggtcttagactgacattgagcctggcccttcacctgcttggtcttagactggcacttcacctgtgtggtctgagactggcatggagcctggtctgacacctggcaaacttgaactgggcatgatgcagggcagtccacaatttgcatctcacaaggggcttgaaccaccacttggctctgggcaaagggggattgagaggagcagaaggagggacccttgacgcagcactgttggagcggcaggcggcactggatctgctgctggtcacacatggtcctgatgcagccagtcaagagtgacctgagggcaaagagaccagggtcaggagggtgagagttggagagggggtgccaggacctagaggaagacaccctgcatcttccctagcttttcttcctccaccctcaactttcatccaagtgtcctgacttagttcgacccaggattaatctgttagacctgccctgggtctgtcaaagggcacatccagggttgcagatgtccaggatctccctgggggtggacctaccaatgcccagaaaagagggcactgatgacaaaaggattctcctttcgtctccacactttctcacatccaatgtggtctgagcagccctacaggaagtagagataacaacttgctcctaaggctatagcccaaagtggaaactccattcccacaggagcttggatttactcacacatgtgcactggcagtacacataaatgtgcaaacatgtaagaacgtacatatgagaataagcactcagcaccatctgcattcacaaaatgtcaaagcattcactggaaagcgggcagctcaaacccaacattaaatgtttgtttctctatattcaatgtttttagataaattcatttaaacatgatacaatgttttgaaataaattcatttaaacatgacacaatgttttgaaataaattcatttaaacatgacacgtgcaaagtgtgcccatgcaaaacacaccagccttggaaagactctgaccaccatggcaacttgcccagtcaggttgctgttgctaatcacctgaagtgtgacagtctgcaggcctcagaaatgtttttccccagctcttcttagaggcaaggtggagttacctaagatggagtaagccagaaagtccaaggttcttaatcagaagacggacattctgccatacttaaagatctacgcagctggggcattgcaaacataacgtgagggctgcaggcatacaccctgacaccatgcttagctggggagagcacagggcagcctcactcgtctgcttgtgtcagatgcacgtgtttatgtgcaggcagcccactgaccagcaaaacaagatcatttgacaacaggctcatccaacaaaccgtctttcaataagctccccaaatgctcctgatgagggttcaaaccttctattttcaatttgtagagaatacctacatatctatttccctggggaaggtaacccttccacacacaactttgctcataaggtgtaaattgctaatgtggcttttccagaaagatcatgagggaaaatagtacctgaggataaggtcagggttatcaaaggcaaatacactagcttcacagccctagctcatctcgtaaactctgtagctatgcttctgtctcctaaaagctcaccagacttttctcctcaggttaatgcacccctcgccctccctggtgcctagcttctcccttctttgtgcctcacgactgtgaacctgggctctcccctgaacatcacatccaccccgatcccaggatccagttcctagactcaccctcctcacaggcaagcagtccttcaggctgaggcatctgggaagagggctgtctttatataaagggttctgggtctggcttgggccatgagacagctggttggcatccgcctggtgcatcaaccgggctggcattccagcagctggttccctccctgtgtgcctgcccttgccgtcacctacagagtgtgggagtggcttgtcttagtgttgaagcctcaggactatgaatagcagattcttattttcttcctccttcattgccctaacagtttctcctccatccctagaagacctgatggtcgggagatgaggagtgacaaaggtatcttctctcctaaaagatgattgtatctgccaacttccactttgcttcagattcttaccagagtgacataaaagaggaagtgttttctaacctgaagtaatttaagttacttcaaagatagaggcaactctatagaaggatgagcccatggggccaaaggtgagtctaacatcccaggccgtgtacttatagctatgcaacctttataaacaatctgagtatcaaattactcttctgcaaaagagagataattaaatcttccttcctgattgttgtgaggattaaggcaaaaaaccaaacaccgcgtgttctcactcataggtgggaattgaacaatgagaacacacggacacaggaaggggaacatcacacactggggacggttgtggggtggggggaggggggagggatagcattaggagatatacttaatgctaaatgacgagttaatgggtgcagcacaccaacatggcacgtgtatacatatgtaacaaacctgcacgttgtgcatatgtaccctaaaacttaaagtataataaaaaaaaattcatccaagaatgatgtttaaactatcccaaatccactcagggtaaatgctggccataagccacaggcactgctgagtcatgggtgcctgctgcctccccatcctgagctgagcaagtggatgcctgcacaacaggtgctcagtcaatgctgcagagcagtatttgaaggcagcaccaggcaggtagtgctgtggagtagcccttaaaggcagcacagtgcagggcagaaataataatctggtactctgtgagccacatagagtcaaaatggacagctctttatgttttccctcataatactgtcattaattgttagtatttaaaaataggcagattttattaaagattccagaaattcagattttcttctgaaataaaaagatctagcatagttgaacataccttccattatcctgattagcagctgcccaccttagatagggcattgctatagtttgcgtgtttatcccttccaaacctcatgctgaaatttgacccccagtgttggagatggagcctaatagcagaagtttgggttatgggggaggatacctcatgaatagattaatgccctctctggtaggggtggaggttaaggtctctctctatttgttcctgcaagagctggttgttaaaaagagcctggcacctccctcacccctctcgtgcttcttctctcttcatgtgatgtctgcacagcctgctccccttcactttctaccatgagtggaggtggcctgagtccctcactagaagccgatgctgatgccatgcttcttgttcagcctacagaaatgtgagcccaataagcctcttttttttttcttttctaaattatccggcctcacatactcctttatagtggcacatttggactacgacaggtaaatattttgccgttctataattttccgttattcttttctatatctacaatgtaattcagtgtaagtttccttatgttattttacttgtgcttttattttcctttggtaaaattaaaagtgaaataatccttctacctggattatttcacttgtttatatcacccttcaacccctttcaacagaatcttaaaagattctgaccaagcttatgagcggagactttatttggatttagacatattttgggttgaatctgagctctagtaa

SEQ ID NO: 1107 - DNA, 4001 bp, Homo sapiens
gaatcgcttgaacctgggaggcagaggctccagtgagctgggttcacaccactgtactccagcatgggtgacagagcgagactccatctcaaaaaaaaaaaaaaaaagaagcaagtgaaggtaatacatatggaaacaaaacctaacagagagaagtcccggggctactggatggaaagaactctgaagcctgcaaaagggctatgcggagaaagcaagtcctagaggggggcaaagaaatgagggcagccaggcacagtggctcacacctgtaattccagcactctgggaggctgaaataggaggatcacttgagcccaggagttcgagaccagcctgggcaatgtggtgaaaccccatctctacaaaaacttaaaacagtagctgggtgtggtggcactcactggtagtcccagctactggtaagactgaggagggaagattgcttgagaccaggtcaaggcttcagtgatcacatccctgcactccagcctaggcgacagagtaaagccttgtctcaaaaaaaaaaaaaaaaaaaaaagagaaaagattaagggcaaccatgatagatctttgttttaccacatgagggttttacatgagattgcatctgctgtgaatttctgagcacgtggcattccttaagtaatctggccttgacacttaatttgctttataaacttaattctccataaataactgaatcatcaattcttgattacatgagcaattgaacaagaattattccaaacaggaaataatctaacagttattctgatttggtcaggattcctgctgccatagatatttggtgcctctagtatttaggctcttcacaattccctcaaataagtagaattctctaatattgagttaacttcacatcagaactccatagtgaacttggtcctgctgcttcttctggtgggaacaaggaccgcctcccagcgaatagatgcaaaacatcagcccaaatttgcctgttcccctcaaaccttccctgggagctggccagaaggtaccaaagtttcttgctttcaaaggccttctcttccagctccaactccaggagctatacaaggtgcagaatcgaaaagcgtcatctgtcttcagacagcttcagtaaatatatttctccttaacaacctttcacctaagcatctggaaattcaatatcatgtttcaggaggttaaagaggagaaagttcaaatactcaagctccaatattcacttactctcagggaagatctttgcttggaatcctttgccaaagacaagattctccagattattgaaggcctggttgagggagttaaggagtagggtgtgcaacggggacagagctgtgtggggaaggggaagggcacatgcctacgtggcccgccccctccaactgcagggaggatacagtgagcgagaacacgaagagacccgaaccaagcaggccgccctggatggtgagccactcggtggaggccagctgacggctgtacatctgcatcccagcaaagagcagcagggacaggagggaggagagcgccagcgaggtgcccgtacccaccactggaggggatgggagaagggacggagagtcaggctccgccctccctccggcaagctacgggcagatcagccggtccggaagctcggtgggccgaccccctccaagaactcccgggactgcagccacacgccccaactccccacaccgcgcggcaacccctacgtattccccagccccggacaccccgaaccctcccgtccggtggaaatgcccgctcccggtggaacccaggacacgtcagctctgtcgggagaggacgaggaaagcttgtccacccaaaccccgaccccctctaggacttcctggggaccccaccggtcctgttacccatcatgccccgcccgtgagtccaaccggcgcctctggccaagaaaggcgagctgaaccgggtgcggttagctatgcgcatgcgtcagcgcttaccgcggacttgctactcctcgcgttctcctctttcttcctctcagtgcctggacgcagcgccctcttgcgacagggaggaaataatgcgtcgagggggcatcctcggccaccgccctggtcctcaggctttcctcgtacctggtgcgtctgctgccactctgtacaaggtgcacttatctctttaagtcattgggcccatgcctgtggcatctatcccatctctgtcttctttgccatttctttcatctctagtgcacgttcctcaaacctccctgccccatgcctcaacatctcccaacctaaaatttagtgctcccaaccaggaactcattttcctccgaaactaatcccccgctttatatgagtaaaattaggagccaatgaaaaatgagaatgtaagaaatggctcccccgtcaaatacctttccatattccccaaccccccgaccggctttcgagaaccacgtggggagaactatttcccaccccctaccccgacgggcgctgttcgaggctggtcccgggagcatgcgcagtgacacctcaacccccagccctcctcacacccccactgggctcctgcattaagcccggggttcgcagccgcagccgggatcgggcacccaggggcgggcgggcacggtagggccatggcagagggtgaggatatgcagaccttcacttccatcatggacgcactggtccgcatcagtgtgagttaaggtggggtcgagggaaggggagggggcgtatagggttctggggcaagctgggacctggaacaggtggggatccaggaagatgctgggatgtagacagggggctagcgatggcagaaacggctgggagggtcgggatgcaggtatgagagggtaatcccgggagcagcccggaggtgagtgccgtgaaggcgtcggtgtgctggagcgtgaggaggagctaggagcagcccagacgcagcgggtgggctggggtggcctccagcagtgcaccggggctggggcttcaggggaaaggccctgttatgagaagagggacgtgtgagcttggatattttccaagaaaactgaggacaggtgggggatgatgtaggagccgccccacagtgcagttcccaatttggacccctccccaagaccccaccccacgcacccccactcagggctgcttccgagcctgcggttgtcatggcaacccgtgcctggctctcccaggggcggtgccaaccgtgttcccccccaccacttcctccccccctccttgttcctccctcctttgtgtcagctgcgcccctgaccgggatggctgcgaagagagggaccaaggtgaggtgtgggggtggggcatagcctgaggacccccactctcgccaccaagagggggaggggacttccggtggggagggggcgagtaggcggggctcttgattcccccgctagttcggagaagggggtgccgctgaccgggttgcgctgcgggagagggcgggagggcctgatgggggcgaaggggaatgggttggtaagaccgatggggaagtgaaggatggggaatggaggctggagtggccgcaggccggagctgcggcaggaggacgtatggagcgagcaggatggagtgccaacctcgcctggctatcgggaggaatcacggcatgggggtgctgctagagaagggagtgggggtctgcatggagctgcagaatgggcggtgtccttgagaaaaatgccaggggcaagctgcccagagatgggggatggaggcaggtgagggggctgccagctggggctactgcagctggagaaatggggattgggcttgaggctggagcaggcacaagctccaaccgtccctcctctgggcctttagctctgcagcggggaaagagaagcaagggacagaggtctgggaaggtctgtgaaccagcccaaggcaggtgctctggaaaagctgcaggtagcttgtcttgctccttcctcagacccctagggtatccaagggcagccaaggggc

SEQ ID NO: 1108 - DNA, 4001 bp, Homo sapiens
aaaaacactgtatctaattggtctttgaaaatcacagccactgttaaagtaggtacctaccatttgttcaatgaaatcaatgaagaatgaaagacaagcttacaatgatatttgccttgaaatgcagaatgaagcaaaacagttacggaaattgtcataatataattactgtagagtagctcaaaacatctactctctcagaactatcaaaatactacttcacttaaaggcagaacaatgacaagtatacctaaaatgttacatgaagttacacagggaacattaagtgaaagagattccagtagactattttaaaagattttattagaggaaataatctagtagataactttcttacttccacaaaaacaaagtttctcaaggatacaaaccaatggatttatctgtgaactcggtcccagaatagaaactagcaaaaagtcagtacagtactcaaaaaatacttttgtggtatgaaaaaagggcaggtgcagatgtagaactgtaccatcttcagtttctgttcacaattgttttaaaacaattctcatctatccagtctgctctcccacgcctcagatgagggaagccaatggtcaatgctctgtgatagcccaagtaggatccaatctaggtaatccctgtccaccttagctctgtcctctgagggatttgccaggttgcaccacaatagttctccattctctttagtctgaacttatgctgtaaacccaaggcctggcacaggggtatgcaggaaagtttgagtgaatcagtcacaacagctctagtacagtactgcatcgatatgctctggagacctgcagcctatttttcccagagaaataaagtggagtggagatcagaagccatggcttcccccctacctcctctggtcagtgcaggctctggctcaaatactgaagaaacatgttggccagttgcggcaagttctcattgttgggatgcattttagtgtacgaaataaactggcgacgaaggcgactcagttctgccatggtcaagggccgggtaaaccgcaagtgctctgtggtaccaggaagcgtgagcaagtccccggggacagcgctcttctgcgcttccatcaatccggccagtacttgactcgtgacctggtccaactggtgcagaaagctgccggaggcgaggggctgggactgcgtagactgatggggtggtggggcccggttctcaaacagggcagagcggatccccgccaggggcaacggctcctctaggcccaccaaagtgaataaaggccggtcccagcgattccgagaatcgggagcctcaaagcgcagcgttagggcctccaggagttcgggagagtaaaaggcaccggacccatgctttgcagatttctctgaatccggagtcacaagagctggagactccgcagccccggattcttctcgctccagttccttgggtacgtcggcctgggcacttccatttactacagagtccgcagtatgcagttccctgaggacgctgctgcccgccgcctgggctctcccgtcctcctcagcgcgtggccgccaactcacactgacgttccggccagggttctcgttcgcgcccgccacctgaggtcccgcgatcgggccgccgggccgtacgcagtagaccaggcagagcggggtgcgcgccgcccgtgccaggcagtagagctcgtaacggaaacctttgatgtagttaagcgagtccaggatgaccacgtcgtggcgactcaggcgccgttccacggaggctcgcagagctccacgcaatgccttctcacgggcagaatcgccgtacaccgctgggtcctctgcgcccaggacagctgcgtcgtccaccacgtacaccgcgcggccctcggcagccagcgccacgcgcaactcttcagcacgccggctcttgccgctgtacggcagcccgcaaaacaccacgagcggcatcctctcagggagcgaccattggcaaccgcgctgcgccaacttccgggttgtacgcgtctccgacgtaagccggaagtgcaaactgctcttcctgtctcccttgacttttacagaccctcttgtttctatggaaacaggagttctacgccagctaggcccaggttcagctttctcagaaaggagatacagagactataatggcatcagttatttatgccaaatgttataggcctcaggagaatgtgatcttcctgcagcgaaagactgcccgtccattttattaataaggcctaaggggcattaaatattgtaagcaatcagcactatatttagcatatagaaggcaattaataaatgctggttctccttcattcctcctcttaaacctactggctctcagtaaatgtttattcaattaccatttcaatcattcaacatctccaaggttgggaattcagagatgaacataaaacgctttccccacaaaagataaaaggtctgaatgggaaggatcaggcgcctacaatcagagtaataaatactataatggatagatgcaggtgaggttataaaagaacagaagggaaaaacaaactacccagagaaatcactgaagactttatgtagaaatagtcatttgacttagaacttgaaagacaaataggaatttttctccttagtagggttgccagataaaatacaggatgcccagttacatttgaatttcagataaacaccaaaaacatttttaagcttaagtgtgtcccaaatattgcatagacatatttaaaattatttggtgcttatctaaacttcaaatttaactgggcatctttaatttattattattatttattttttcttttttagagatgaggttgtatgttgctaaggctggtctcaaactcctgggctcaagtaattgtgccacctctgcctcccaaagtactgggaatacaggtgtgtgagccaaggtgcctggcctgcatcctttattttattttattattattattttttgagatggagcctcgctctgtcacccagcctggaccacagtggtatgatctcagctccctgcaacctccacctcctgagttcaagcgattctcctgtctcagcctcccaagtagctgggactatgggtgtgcgccaccatatctggctaatttttgtatttttagtagagacggggtttcactatgttggccaggctggtctcaaactcctgaccccaggtgatccactggccttggcttcccaaagtgctggggttaaaggcatgagccactgtgcctggccatccgttatttttatttgctcaatctggcaactctattattgtaggtttgagacccagagccatgaaactgttggatctcttgtataaacagcaagcactataggatggtaggtgcagaaatgtgagtgtgcctgtgcatgtgtgtatattgtagatgcacatatactggggtctttgtatctctcttgtacagtatagtaaaaaacattcaagtcttggctcctccacttactagtgttgtaactactggcaaattatgtaacttttctgtacttcaatttccccttctataaaataacaactgctatttcacaggtttaccaatctgtaggttgttgtgagggttaaataaatgtaaacacaggcccggcatggtggctcgcgcctgtaatcccagcactttgggaggcagagggtagatcacctgaggtcaggagctcgagaccagtctggccaacatggtgaaaccctgtctctactaaaaatactttttaaaaaattagtcgggtggggtagcgtgtgcctgtaatcccattactgaggaggctgaggcaggagaattgcttgaacccgggatgcggaggttgcagtgagcctagatcgcaccactgcactccagcctgggcaataagagcgaaactctgtctcaaacaaaaaaaaagtaaacacagaccagtgcttagctttccctcccctgccctgccttttcctcctccttatgcactgaattgtctgtg

SEQ ID NO: 1109 - DNA, 4001 bp, Homo sapiens
ctggccgaatggcaaaaccccgtctctactaaaaatacaaaaattagccgggtataatggcaggcgcctgtaatcccagctacttgggaggctgagggagtagaatcgcttgaacccaggaggcgtaggttgcagtgagcggagatggcaccattgcactccagcctgggcgacaagagcgaaactccgtctcaaaaaatgaaataccccaccccaaccccacccgcacacttacccgccactaatcctacccctaatccactaaactacttaccaagtctcagcagttcatccgcctctgtaccttcgctgggaagacgaactccgcagagcaggactcgggtctactctaagctgtgccttggtgcctagaattcaagtcaagttcataacaccaaagtttaaggtttatttaatgtagaaaatcaccttatattgaagactgggaaaaaaaagcacttatctatgcatgtgtttgcttaaaaaggcacacacaattagcagagtctggggtgtaagtcgggagagggctgcagggaatgggaggacccagaggtggatctgaggaggccagggaggggccggagagaatggtttcttctttgtgagagttggggtctattattatggaaggcacgctttccttttgcaatttgaacaagaattcgatttgcctaacaatcggaggaaattgaagaaaatgcaaaagttattacttccaaatcaatttttccagtcacataattaaacacttttttttttttttgagacggagtttcgctctgccgcccaggctggagtgtagtggcccgatctcggctcactgcaacctccgcctccccggttcaagcgattctcctgcctcggcctccctagtagctgggactacaggcgcgagccaacacacccggctaattttgtatttttggtagagacggggtttcccaagttggccaggatggtctcgatctcctgacctcgtgatccgcccccgcctcggcctcccaaagtgctggaaaataacacgcccggccctccatctttttttatttgagacagtttcgcccctgttgcccagtctggagcgcaatggcgcgatctcgtctcagtgcaacctctgcctctcgggttcaagcgattctcctgcctcagcctcctgagtagctaggattacaggcatgcgccaccacgcctggctaattttgtatttttagtagagacgaggtttctccatgttggtcaggatggtctcgaactccgacctcaggtgatccgcccgcctcggcttcccaaagtgctgggattacaggcgtgagccactgctcccggcccctccatcctttttctaaagctaggacttgtcaagcaccacctcattttcttgactttattttttcttcacagaactactttcatgtttccaatttggggatagataagtcttaggagagtttttttctcattgcgccacggacagtaagggaaagagcagggagtcaagtgagggggccaactgcctgcccctacccgggccccacgcacgcacccggatcagccttgcctggggcacctcgggcctcacgtacctgggccagccttacccggggcaccccgcgcccttcgcgcctggaccagccttatccggggcaccctggacctcacgctcctggaccagccttacttggggcgctgcggaccccacgcgcctagaccagccttacccggggcaccccggaccccacgcccctggaccagccttacccggggcaccccggaccccacgcgcctggcccagccttacccggcgcgccccggaccccacgcgcctgggccagccttacccagggcacgccgggccccatgcacccgggccagccttacctggcgaaaaaggaatccgcctggacgactgaggagcgaacaaagtgaggatggagccttgtaactaaggactgagaggattcccgatctctggggctggctcctcccctcctggtgtgtcccaaccccctctgtctacatacccgcgcctcctccccggaaatcgcattccgccctaagcaattgctgacttccattgctgccccccgactgagtccaattccctctgtctccaccgtgcctccgcttgaacgagccccacccctcagacccgactccagactcaaatctgaataaaggcaccactaaagcgcctcatcacccaggcctgaaccccaaggtcacctcattccttttcttcaaccctcgcagttaatccattcctaagtccttgaatttgccggcgtctctccaactccacagctccagcccagtccaagcccccgttgtctctcacctggatcactgaaatcacctccaactgctccctggcctctcccacgacccctctgtaatccttctccccctccaatactgttcagtggcttcctgtttcggttaaatttctaccttctcattctatccggactgccccttcaacattgtcttagcactactcttacaacagaaacactctctttctgttcctcaaaaaacacggaactacctgcctcagggcccttgcactggctgtttcctctgcgagttatttttttctttttctttctttctttctttctttttttttttttttgagacagtctctgttgccacagctggagtgcagtggcatgatcttggctcactgcaaccccggcctcctgggttcaagcaattctcctgccttagcctcccaagtagctgggattacaggagcacgccaccactcccggaaaatttttgtattttttttttttctttttgagacagagttttcttatgtcacccaggctggagtgcagtggcgcaatctcggctcactgcaacctctgcctcctggattcaagcgatttctcctgcctcagcctcctgagtagctgagattacaggcccatgccaccacgcctggctagtttttgtatttttagtagaggggggtttcaccatgttggtcaggctggtcttgaacttctgacctggtgatccgcccacctcagcttcccaaagtgatgggattacaggcgtgcgccaccacgcctggccacctctttattttcccagttctttcaggatggcttctgttcatcctcaggtctcaggtccaatgttaactcctctaacaggcctcccagactaccctttctacaggagccaaactccccatatcccaatactctttttttgttttatttttgtttcttaagagagggtcttgctctctaacagagactcaaaggttctgggtggttggactccccaggcctgacttgcaaggctcaggtggaacttgacttgcccaaagtcatgcagctaataagcaaagaagcctcaatatctggtagttcagtcaatacacagcatatgaataaacaaagagaattcggtcttttgcttttaatcccttatttcttcttactgcctaaaatcccagcactttgggaggctgaggtgggaggatcacttgttcatagtttaaaacaaagatgataacagccctttcccgaaacaaaccctggggatttagactgcctttgcagtactaacaaattagccacaggattagaaattatggtttaggagtcatgcagctggaggctacaagactctgactctccccaaatggcttctggggataagaccactactgcaaaacctaagaccagggagatattccacagatattttgcagatcctgcacttgacggatcagctggtaccacccagatcaataaactggctgatatgatcttggtggcccccacccaggaattgattcagcgcaagaagacagctttgactccctatgatttcatctctgatctgaccaatcagcactcccagctcactggcttcccccctcccaccaagttgtccttaaaaactctgatccctgaatgcttggggagattgatttgagtaataaaactctggtctcccacacagcccactctgtgtgaatt

SEQ ID NO: 1110 - DNA, 4001 bp, Homo sapiens
gctcctggttggtggtcactgtactcccctctctcttgcttaaccagcttcccatctcctgtggtcagtggacttagaccattctggctgcgtggggcaggctcagccacatctgtctgtctgacctgctgtcgtcctgattatgtgtttgggtggacttcgagccccacttaggacccaggcctaaaccacagcgacaactcattctctcaccagagctgagcatcagggctttgggggcctgagtctgttctgcctttgtccgggtgtgtggcttcctcggcacctcaggcgagaaggtgaagtgctggcaggacaggattcaggctgtgatatcatcacagcagcacccaagcctcttcctctaaggctggagtggggtgtgaagggggatgagcatcctccaggactattaatacatcctcctcgtcttccactgtgccctgagactccaccccaaaactgagacaaggtccctgcggtaggtttcatatgaccataaattcttgagacagagtctcaccctgttgcccaggctggagtacaatggtgcgatctcagctcactgcgatctcagctcacttcaacctctgcctcccgggttcaagcgattctcctgcctcagcctcccgagtagctgggactacaggcgtccaccaccacgcccggctcatttttgtatttttagtaaagccaaggtttcactatgttggtcaggctagtcttgaactcctgacctcaggtgatccacctgcctcggcctcccaaagtgctgagattacaggcatgagccaccgtgctcagccataagaccataaattctgtcagctccttccaccttcgaagctggctggctttgtgacttgctttggccaaaagaatgaggcggaacaaattgcgacctttctaggctaaaccttaaggggcttactccctgcgaacactgccaccttgtggacaggtctgggatagcggtcttgagagcaggagtccacgctgagggagacaccgcccccctcaacccgacccccaagccgacttgcccagtgcaccagagagagcccaagctagaccagcagcagagctgccagccagcccacagaatcatgggaaataatcacttgctttgtctgaagccagtaggctttggggtggtttgttacttaacaatagataactgacgcagacccaaacaggaaaattacaaaccttagggaggatttctcaacaaccccatgacatgggtttcacagaatagggtggtcccagctagagcctaggctttgctcagcctgggacccaggtaggggctagtgtccacagtggtgctcctcctgctttaattggcaaacaaagggcctggtagttatcactgtcagtggtggctcctttattgggccttgacccgttcaggaaggagaggctccaaggcttggcagctgctgcccctgaacacctgtgagttgttcctattgaggtcttagatacagctgcaggaaggtcttgaaagggggctggagcctggagattccatcatggtggccaaaggcagaggaagggaaacaccgtttgctcttcctttggtgtccttgaattttacccccaaactgggtgtcttgaagaaaccccagtggcatcaggatcctcattttatacacgaggacatcgaggcacagagaggcaacaagactgtcccaaagatgcacagctagtgagagctggactcagaatggagtccagagcttctgagtctaaatcttatggtcctcccctacacactagaatcaggggtggcagctcaaagcccaggaggacccagggggctatggggaggaactcaaggctgtctctgcactcaccggtcttcagcttggggaggtgatactgccacaggaagcagccagtcatgaccactgagagcaggcagaagaagctgcagatggccgggaggagccacttcttcttcactttcagcaagttgggccaccagccatcctgggagagcaaggacataaggtacagtccccttgggggtcagtcagagggaagagagggaccctaaccctggcccctcctaggcctcaagttagccagacatcacaagagcccacagctttggataaatttcacagttgtgaaaccaatgcccttcccagtgtgactctttcaatagttctgccctccaagagcacccacccctttgcttgctgtaccttgttcccctatggacttagtgaaatatcgtaagaccagctgaaatgccacctcctccaggaagctttcctcaactctcctgtattagtctgttctcacgctgctaataaaggcatacccaagactgagtaatttataaaggaaagaggtttagttgactcacagttcaacatggttggggaggcctcagaaaacttgcaagtatggcacatatttcattcttctacttatataaaatgtctagatagacaacccatagagacagaaagtacattacaggttgccaggggatgggggtagcaaggaatgaagagtcactgctaatggctatgagtttttgtgggggtgatgaaaatgttctaaaattgattatggtgctaatggcacaatcttgtaaatatgctataaccactgaattgtacacttaacaatggtgaattttatgtcatatgaattatatctcaatacaattccttgaaaataatagtacctacttgtattcagttgcaaggattaaatgagttaataaattagaacagtagctggcacacggtaacactacatatgtgttagctattattgattgcctcctatgtgctaggcactgagccagatattgaggatatactgatgaacagaaagggactctttcctgccttttggaggtttacagttttacgaggagatgggtgttaaccaaatacattgcattaactcctccttgcctacctccctttctcaaaggcacatcttccacttctgtcctacaaacgtggtatttctcccccttccctcctctgtcctcagtacacacgcaatccctcagtggtgagttaccaaatgagaaatgaaaggagacatcactacagatcttacagagaaatattatgaacaactttgtaccaatccatttgacagtttaaatgtggacaaattccctgaaagacacaatccccaggtgatctcatgcacaaggacaccagccacatgctcatggtttccgattctcttctgcccagctctctcccctctacttcagactcccatttcaactgccttccgagcatttccacctggaagtcctcaagcacctggaactcaacatccaaaacagaaaactcacttgtttcaccccctcctccttctctcttattttcaacatcacctcatggcacctgcctccacttagtcatgcttcagggtctgcctgggcccctctatctccttcaatccctacctccagccagtcatcaagccctcctggcctgttacaattagaaaatatttcaagcttactgaaaaaaatacactgggcccagtggctcactcctattatcctagcactttgggaggccaagatgggaggatcacttgagcccaggagtttgaggccagcctgggcaacatagtaagaccctttctctacaaaaaaattaaacattggctgggtgaagtggctcacacctgtaatcctagcactttgagaggccaaggcgggtggatcacttgagcccaggagttcaaaaccagcctgggcaacatggcaaatcttcgcctctacaaaaaatacaaaaattagccaggtatagtggtgtgtgcctgtaatcccagctactcaagaggctgaggtgggaaaatcacttgagcctgggaggtggaggttgctgtgagccaagatcacaccactgcactccagcctagatgacagagtgagaccctgtctcaaaataaataaatataaaaataaaaattagccaggtgtggtggtatatacctgtggtcccagc

SEQ ID NO: 1111 - DNA, 4001 bp, Homo sapiens
tgcctccccacacacacacacccccccatgcatatccaggcatgctttcagacacaaaatcacatatatcccaccagactatgaacttctgaagaaggagtgtctggtttgtatttttaacccaatgcacagtactgaggtcttcaataaacagttcaactgaacatatgcagactgacaaactcaagactcagcaacataagaaccagctccccacacagatgtgtcatctcttcataggccataaacacacttgtccacaagtatgccacacacacacacacacataagcatacattcataggcacaggtaggcccacatctagaagcaaagacactcccacatcaacccccaggcacactgacccacatgcaaagtccaagaccttgactcctcagccgcaccctcagcatagaccttcctctatagcagcctgggtttcttttccagagcactgagttccctccattcgtggggcttaccttttcccctctctagagcccatgggctgcccacagtgcttcagagcactgtgaggtcttgagggtctggggaggtggccccccagtcccaggcgatgagctgctatggagaggctaagcctgagacaatgaggtagttctggagcccttattaagggagggcaggagcggggtagaggacatactagagcactggaaaaacctgtgaaagatgccttgctggggaaagcctacaggacccaaatggctggagggtctgcacctggcagagatagccctggctcaggaaaggccaagacccaaatgcccacctgggaggagctaagaggctaatatctacctggctagaaagggatcaaaagagcaggctccagctctgggctaccgcaggagcctcagtttccttagggacaagatgggggacgggggcgcccagtggaggaatgaggtgaaaatgctcacagggggccttcttggcagaggtgcagggtcgctccaagagaagtcgctagaggtcaccaatctccatgaggggtgctgccttctgaacacccgccttccccaggcctctcggaccctgatgggatgtccagcaggcaggggtaggatgcctcatccccgaccctttaggagaccagtgtacaagtaaagattgcagcagcacagatggggatggcaactatcttaaggttcccagcccagatgccaccccaaaatgccatgctgagattctgagcgtccttagtgggagacgggtctgcttccctccagtcctcttcactgacccctccaagacggctctccctgctccccctcccaagaggggctgtgggacacctcccaggggtcctctccgccagagacacacgggggcagtgagagaggcttctctcaggaatgaggcttggaggttactcctgaacacctccacaatcccccaaaacgttccttcctgcttccaccttccacagggggggccatatcccagcgggcgtccagactgaggaccagccttcccctaagcaccctgtgtggggcctcaggccccgaggggagaagacccaccctgtaacctcaggggtcccgagtttggccccaatcctgtctcccgcgagtcgcagcaagaccaggatccagcctcagtgtcagggtcccaggcggggaggaggccggtgccccgaggagaggagacccaaaggctccccgccgaccccccgcccctcccggctccctccggcgctcacctggacagcgcggaccagtccttcctgctgacagccatgctgcaggagccccgcgtggccgcccgcgccccgccggccgccgcctcacctggcgcccctccccttccagcccaggtgggatcacatggccgcttatctcacccccgcgcgccccggccgcgctccgatttgccgacccgggaatggcctctgggatgtgggcgtcccagacaaagccgcattgattgcagcccaggccggcccggccgcgaggccgcaagcactgggtggaccgtcggacggatcgcgggaccgaacgacggacgcccggggccggcgtggggctggtcggctgcccggggcgagggcgggagacttcctgctcagaaccagtccgaccagcttggcgctgggacgcctccccgcgctgtgccgcggcccggggtgccgaggagctgggctgggggcggggacccctgccgggaacccgacttagcccggagacgctcaagagcaagaagccgagcggaaaagttagcgcaggtactgtgatctcgggtctagagcgcccgcgccttcggggccccttcgcagggagcgccctccccactccctggcttcggaacccacccgggcccaccgtcccagtaggcctcgctgagatgaatgaggcattgctttctgagctgcacacaaaacatgcccctggtagacccagccccacccaaagggagaatcttagactcaattcagcaaacatttgtgaaagcacaaatatgtcaaaggcactgtccttgctccctgatactggactttgggctagagtggcagggtgtataataagggcagaggaagctcagtttttcttccccaaggaaagattaaacacagatatctaggactcgaattttggagcaccgtgagacagctcaggcacccctgacaccacctggctccctttaggtgcccatctgggctggtgcggggccaggtgctttctatccaggaaccagcctcaggtgggcttgggctaagagagggtcaggcgttgagcatggggaatcttatcttccctgatggatctgaactgcagggtcagcgcacagttgctgttcctgccctgagaggaaggaggcacagccccagcgccaggatgagaatatcaaaagggagcctgagccagagccagaactgccctcatgctcctgggcctcgctgcccagcctcagcctctctttggtgctcatgtcaggccttccagctctgagatctcacggcaaagggcaagctagctgccgggcagaagcctggaaacacagacacagccagcctgttgagattccccctcccgaagtaccccctcctccagggagccttccttcttggcaagggtgggacgaggtccaggacatgagaactggactggtaacttgcacacttgagctctgattctgacatttgtgaactgtgtgacttgggacaaactccttcagtttccttatctgtggagtggatgttacgataccttgctctgcttccttccaggttgtggaaatcatatgagttccctgctagtgacattggagtgcacagatgaatatcgacaaggctccagggagttctgaacagaggccaaggcaggccctggagctgtatgctgcttacaggaaaagagaaagaggggaccccaatagtctaggtccctggatcctctgacccggggcctgacactgtcagggaagctgctgtctccctagggacctactgaatgttcttcccatggctggtcagtgctgacacctcaacacaggaagagaaatactcctatgaagtcatctgaagcctggtcatgccagggacacttcacgaaggcaggaacagtcctgtttctaaaagcccaaaatctaacagcctctctacagatataaaagcccaaagacatggaaagtttgtatgcagacaaccctagaagtaaggaaaagtgaatgacatatatgtcaatgcccagaaagttccttgagatcagacactgtacatttatgggatactttctaagtgccagctactgtacttggtgctggatcagtgcatccatttcccggggctcccgtgatgaagtgccacaaactggatggctttaaacaacagaagtttactctctcacagttctgaaggttagaagtctgccatgaagatgtgagcacagccagcctctctccaaaggctccagaggagaatccttccttgcttcttcccagagctccttggcatacagctgcattactccaagatttg

SEQ ID NO: 1112 - DNA, 4001 bp, Homo sapiens
agggctgactgctgagccattggcagaacattaagaaaggcctgcatttattctgctcctttatcttcaaagctgccccagccatactttgtgagtgcccagctacaattcactggaaaacaggaacttaagccacagtggctctggaaccagcttgagaaaggatgggaaactgtggagagcactcaggaaaccacaaaccaccctcggctgagaataagaagacatttgggagcctttccagagtggcagagaaacttcttccccaaaggcccaaaggaatggggaaatctcacaggtgtccccagtagacaagtattcccaactgaagggactacaggtgacaggtgatgcccacactttggtaaactctccttctccctgtggctgttgcctccctgccatataacagggcctggaaggatgggaaggggtacttaccaaaacacaagaggaagaatggtctcatcttcagccaatggggtgatccccagaaaggacctttcctaggacacagcaaagcaaactgggtacaacagtgcaaacccctagagcacactagccctttttcttttctgtttctagactcaagtatttttcagaagtctttacctagggtcctgatctaggacacttggagcagcagatacatttgtagcttggaaaatgctggagctctagacccttgtctcaagtggcatgtgactcacagggtgccctgggaaaatcccatcccttcccagactccagcttcctcctctaaaatggatgggaaggagtgtggaccctgccctaccccacacagccgtaaggacaacgtggggagcaggaaaaggctggaccctttgcaggagaaaagctgtagaaagggccaagacctagttccagccccaagagagagggctggcttttctcagggcctagaccagcagcctcaacccagccccgcccaaagtgaatgagtcagagtggctgacggcctggaggcaaaccttctcctgtcacgggcatggcctccaataccattcagggccactttgagtttgaggctctgtgcccacaattctgggatgcaacagggagagatgtatggctgtctttaacaagtgagtgagggtttcttctgaaagggaagcaacccaaaatgtcttcaatgatgggctggggctcgacaagaggggtggggctgggaggccacaaagcagggattctgaaggaggctggggaaggatgctcgaaagccaccgtggggtcccagaggcaggcctgccttgtggaaacatgccccacccttgctcatgcagtgacccttctgccttgaattggatgttcactctgttccaatgacagccacaaactcttttggctggggtggagggctgggggcttggcaaggcaggggcggggggggaaattgaggacatttctggcatctttaaattatagatcctaatgcttcaaaatcattccttccaatccctctcctaaaagagtcatgggcccagggagggaacatgtggcctggggtcccacagctaacgatggcctaagagagacccatcttctgactttcatccagtgctttctcagctttcccacccctgactgaaaatccccctgcaagtaggcattctgagccaggccagcccacccttctcacttctcttttgtgctcaaccccggatctgaacctgctttcttctaagccactgaggtgcttatcaaatgtgaaaaagaaatcaaaactgtagcagacattttaacctagctcacctgagtgagctcccaggaagaggaataaatcaggccctgaaaccaggccccaggcatccagagatacagtcctcctcccgcatccggcccgcaccaggcaggtaaagacaggtaacataccttgctgtgtgttctgccgttctttctccagatcgcctgaaagctcctcttgaatgtgggggtctcccctcccggctccaggtttttaaacaacagcctcacctctggagactccctggctgggtgtagccccaccgcagggcgggtctcaggaatctggcagccgtcacacccatctgtcgtcactgcacccccacctcccaggacgggactgggcaagtgggttggtcggtccgtcccagagttcttgtagtgagctccacaatgcccacctgcctgtgggggctgcaaggggcccctcaaacagaaagcacaaggcacatgtaagtgatcatcagagaccagaattcacagggtggggaagggcccttgcatttgtgccaggcaatgaactcagcattttcccaaagccagcaggggtcagcttcttcttgtgacctggaccaccccagacagaagatcaggcagagaacacaaagattagggcttatatagagagttaaagctccagacatatcaccgggctggaaggtgagaagactcaaacatccaggaccctggaaagcaccattcccctccccagtgaaaaaaaaaatgaaaaatcccagcttcttggggcatttggaggatccttaaaaggcaaggttcatcaggaaggattcaaagctcaactcatccaaggaaagcttaagagaaatgagcagagtaactaaatggctcgcctccagctccctccacagggttggcagggagccctgggacaggtagctgcctgtgagtcactcctcccacctgtggggagggttagtctcctagcccctccctccctaggcaggaatgcccgcctggagggccagaaaacagacctgaccacaagtggtggaaggaaaggctgaagcatagcttgactgacaaagtcaaaacagactttccctggcctcctgccaggcctgagaacacagcttcttttgtgggctccttgctcagggatcctgggcttccagccactgtaaatggaagtggcaggtccaaattgagaggctggtctcacaggacactctttcccccaggttagggtcagagagcttttagggaaacctggagggtcagccagtccatatcttggccctggagagcctgcactggcaccgttttggaatgctaggacctcaaagctactatttaaaggagcttcttaactacgattccactttgttagtgtctcctaaacagaaagttctccaccattggagggttatgtccaagaaattggcttgaagacccttaagggggaaatgtagaattttgtggattaaattgggcatttctaaccctcagattcgaattaagcataagttcaggtaggcagaagaaatagtgtaattagcaagtgggcagtgagttgttgatgtaagttgatgcataattgatagtccaataaatgttagagtcttgccccctgtaagcattccagtgaaatctagctcaactcagcaagtaaggtcagtagaagcagtgtcccttcaacacagagagacctccctcaagtcccccaccgagaaaggtcagctctgactctgacacacctgtgttttcagttctcccacctggtggtctctttctctccacttccccaactccctgaactcagagcgctcatgaaactttcgccctctgcccatcaccagaggatgtgacaaagaactcattaataattaactcagcagaagagagcaggtgttgcaatcccagatcctcagaggagaaaaggcagggcaggtgtgcggtgggcctcaccatgagtagctggggccccttaaatcctcctcctcctccctttatctgaggccatgagcccaggtaaatacacattcggtgtctcagacttcacaggcttgggcaggtcctggagtggtttggcttcgcaggagggacatgccaattgctgtgcttggctctcccctacactcccggcaaagtccaggaagctgtttatgcagacccccaagagcagcccagccagcctcactcctgagggacactgatcatttccaagtggggatccagtcccccaagaactccagggctccaggcacaagctctggagc

SEQ ID NO: 1113 - DNA, 4001 bp, Homo sapiens
ccctgttgagggcaaacaaaaagaaaaccaaagttcctataaaaaaagacccagagacaaattagaagaaaagtttgtaaaagccatgactaacaggcaatgttagtcatagctcaaagcatcgtgtttctggatttgatccaacttacatctgagcctctgaccctgctggataagctcaagtcacttcctcatctatctcactgaccatggcacagctcagttcctgccatggcaagaacacagttcggcccacacatcccagcaccaaataacacatgaggctccatacacataaacggccagtgtttggcctatttgcctattcccaagacttgaaagactatcctgcccatgcccaaggactgagaaaagactccgtgtcatctcagagagataagagagaaatgagctatttagttaattctgagtacatttcctcttgcccaaccaacaggtaaattccttagaggcaaggatctggccttatacttttactgcactccccagtccgtgtagtacacagggcttggcctacaccaagtacattctaagtattcagtggacaaatggcagctcacacacccctcccatcccgccttcctccagtcctgggaagtagggcctacctcgccatactgggtgcagtaggtctcaggcttggtcagtccacaggtagatgaagctcggagaaaccgggtcctcccaacaagcaggtccccaacaggtggatagcaggccccacgggagcaggcttgttgggcatgcaggaggccaggcagggctgaaatcacagggatgtgtgatggagcagtccagaaaaaaagggacctcactggccaccccagtatctttcagggaagctgacattagcaagattatatcctttccctcactcaagcttccactcgctgctggcagtaataattgcagtattgatactgttatattttgaaagttgatttcatattccagaactcaaaacttgaaaaggagaagaggagaaacactggcaaccaaaaaccatagatgaccctaaaatatggcttttagaaccagactggagacatagactcggccatcatgacaaggtccgcagctctttccacctgcattgtggcctctgtcagcagcccagaggagggctgactgctgagccattggcagaacattaagaaaggcctgcatttattctgctcctttatcttcaaagctgccccagccatactttgtgagtgcccagctacaattcactggaaaacaggaacttaagccacagtggctctggaaccagcttgagaaaggatgggaaactgtggagagcactcaggaaaccacaaaccaccctcggctgagaataagaagacatttgggagcctttccagagtggcagagaaacttcttccccaaaggcccaaaggaatggggaaatctcacaggtgtccccagtagacaagtattcccaactgaagggactacaggtgacaggtgatgcccacactttggtaaactctccttctccctgtggctgttgcctccctgccatataacagggcctggaaggatgggaaggggtacttaccaaaacacaagaggaagaatggtctcatcttcagccaatggggtgatccccagaaaggacctttcctaggacacagcaaagcaaactgggtacaacagtgcaaacccctagagcacactagccctttttcttttctgtttctagactcaagtatttttcagaagtctttacctagggtcctgatctaggacacttggagcagcagatacatttgtagcttggaaaatgctggagctctagacccttgtctcaagtggcatgtgactcacagggtgccctgggaaaatcccatcccttcccagactccagcttcctcctctaaaatggatgggaaggagtgtggaccctgccctaccccacacagccgtaaggacaacgtggggagcaggaaaaggctggaccctttgcaggagaaaagctgtagaaagggccaagacctagttccagccccaagagagagggctggcttttctcagggcctagaccagcagcctcaacccagccccgcccaaagtgaatgagtcagagtggctgacggcctggaggcaaaccttctcctgtcacgggcatggcctccaataccattcagggccactttgagtttgaggctctgtgcccacaattctgggatgcaacagggagagatgtatggctgtctttaacaagtgagtgagggtttcttctgaaagggaagcaacccaaaatgtcttcaatgatgggctggggctcgacaagaggggtggggctgggaggccacaaagcagggattctgaaggaggctggggaaggatgctcgaaagccaccgtggggtcccagaggcaggcctgccttgtggaaacatgccccacccttgctcatgcagtgacccttctgccttgaattggatgttcactctgttccaatgacagccacaaactcttttggctggggtggagggctgggggcttggcaaggcaggggcggggggggaaattgaggacatttctggcatctttaaattatagatcctaatgcttcaaaatcattccttccaatccctctcctaaaagagtcatgggcccagggagggaacatgtggcctggggtcccacagctaacgatggcctaagagagacccatcttctgactttcatccagtgctttctcagctttcccacccctgactgaaaatccccctgcaagtaggcattctgagccaggccagcccacccttctcacttctcttttgtgctcaaccccggatctgaacctgctttcttctaagccactgaggtgcttatcaaatgtgaaaaagaaatcaaaactgtagcagacattttaacctagctcacctgagtgagctcccaggaagaggaataaatcaggccctgaaaccaggccccaggcatccagagatacagtcctcctcccgcatccggcccgcaccaggcaggtaaagacaggtaacataccttgctgtgtgttctgccgttctttctccagatcgcctgaaagctcctcttgaatgtgggggtctcccctcccggctccaggtttttaaacaacagcctcacctctggagactccctggctgggtgtagccccaccgcagggcgggtctcaggaatctggcagccgtcacacccatctgtcgtcactgcacccccacctcccaggacgggactgggcaagtgggttggtcggtccgtcccagagttcttgtagtgagctccacaatgcccacctgcctgtgggggctgcaaggggcccctcaaacagaaagcacaaggcacatgtaagtgatcatcagagaccagaattcacagggtggggaagggcccttgcatttgtgccaggcaatgaactcagcattttcccaaagccagcaggggtcagcttcttcttgtgacctggaccaccccagacagaagatcaggcagagaacacaaagattagggcttatatagagagttaaagctccagacatatcaccgggctggaaggtgagaagactcaaacatccaggaccctggaaagcaccattcccctccccagtgaaaaaaaaaatgaaaaatcccagcttcttggggcatttggaggatccttaaaaggcaaggttcatcaggaaggattcaaagctcaactcatccaaggaaagcttaagagaaatgagcagagtaactaaatggctcgcctccagctccctccacagggttggcagggagccctgggacaggtagctgcctgtgagtcactcctcccacctgtggggagggttagtctcctagcccctccctccctaggcaggaatgcccgcctggagggccagaaaacagacctgaccacaagtggtggaaggaaaggctgaagcatagcttgactgacaaagtcaaaacagactttccctggcctcctgccaggcctgagaacacagcttct

SEQ ID NO: 1114 - DNA, 4001 bp, Homo sapiens
gaagaggagaaacactggcaaccaaaaaccatagatgaccctaaaatatggcttttagaaccagactggagacatagactcggccatcatgacaaggtccgcagctctttccacctgcattgtggcctctgtcagcagcccagaggagggctgactgctgagccattggcagaacattaagaaaggcctgcatttattctgctcctttatcttcaaagctgccccagccatactttgtgagtgcccagctacaattcactggaaaacaggaacttaagccacagtggctctggaaccagcttgagaaaggatgggaaactgtggagagcactcaggaaaccacaaaccaccctcggctgagaataagaagacatttgggagcctttccagagtggcagagaaacttcttccccaaaggcccaaaggaatggggaaatctcacaggtgtccccagtagacaagtattcccaactgaagggactacaggtgacaggtgatgcccacactttggtaaactctccttctccctgtggctgttgcctccctgccatataacagggcctggaaggatgggaaggggtacttaccaaaacacaagaggaagaatggtctcatcttcagccaatggggtgatccccagaaaggacctttcctaggacacagcaaagcaaactgggtacaacagtgcaaacccctagagcacactagccctttttcttttctgtttctagactcaagtatttttcagaagtctttacctagggtcctgatctaggacacttggagcagcagatacatttgtagcttggaaaatgctggagctctagacccttgtctcaagtggcatgtgactcacagggtgccctgggaaaatcccatcccttcccagactccagcttcctcctctaaaatggatgggaaggagtgtggaccctgccctaccccacacagccgtaaggacaacgtggggagcaggaaaaggctggaccctttgcaggagaaaagctgtagaaagggccaagacctagttccagccccaagagagagggctggcttttctcagggcctagaccagcagcctcaacccagccccgcccaaagtgaatgagtcagagtggctgacggcctggaggcaaaccttctcctgtcacgggcatggcctccaataccattcagggccactttgagtttgaggctctgtgcccacaattctgggatgcaacagggagagatgtatggctgtctttaacaagtgagtgagggtttcttctgaaagggaagcaacccaaaatgtcttcaatgatgggctggggctcgacaagaggggtggggctgggaggccacaaagcagggattctgaaggaggctggggaaggatgctcgaaagccaccgtggggtcccagaggcaggcctgccttgtggaaacatgccccacccttgctcatgcagtgacccttctgccttgaattggatgttcactctgttccaatgacagccacaaactcttttggctggggtggagggctgggggcttggcaaggcaggggcggggggggaaattgaggacatttctggcatctttaaattatagatcctaatgcttcaaaatcattccttccaatccctctcctaaaagagtcatgggcccagggagggaacatgtggcctggggtcccacagctaacgatggcctaagagagacccatcttctgactttcatccagtgctttctcagctttcccacccctgactgaaaatccccctgcaagtaggcattctgagccaggccagcccacccttctcacttctcttttgtgctcaaccccggatctgaacctgctttcttctaagccactgaggtgcttatcaaatgtgaaaaagaaatcaaaactgtagcagacattttaacctagctcacctgagtgagctcccaggaagaggaataaatcaggccctgaaaccaggccccaggcatccagagatacagtcctcctcccgcatccggcccgcaccaggcaggtaaagacaggtaacataccttgctgtgtgttctgccgttctttctccagatcgcctgaaagctcctcttgaatgtgggggtctcccctcccggctccaggtttttaaacaacagcctcacctctggagactccctggctgggtgtagccccaccgcagggcgggtctcaggaatctggcagccgtcacacccatctgtcgtcactgcacccccacctcccaggacgggactgggcaagtgggttggtcggtccgtcccagagttcttgtagtgagctccacaatgcccacctgcctgtgggggctgcaaggggcccctcaaacagaaagcacaaggcacatgtaagtgatcatcagagaccagaattcacagggtggggaagggcccttgcatttgtgccaggcaatgaactcagcattttcccaaagccagcaggggtcagcttcttcttgtgacctggaccaccccagacagaagatcaggcagagaacacaaagattagggcttatatagagagttaaagctccagacatatcaccgggctggaaggtgagaagactcaaacatccaggaccctggaaagcaccattcccctccccagtgaaaaaaaaaatgaaaaatcccagcttcttggggcatttggaggatccttaaaaggcaaggttcatcaggaaggattcaaagctcaactcatccaaggaaagcttaagagaaatgagcagagtaactaaatggctcgcctccagctccctccacagggttggcagggagccctgggacaggtagctgcctgtgagtcactcctcccacctgtggggagggttagtctcctagcccctccctccctaggcaggaatgcccgcctggagggccagaaaacagacctgaccacaagtggtggaaggaaaggctgaagcatagcttgactgacaaagtcaaaacagactttccctggcctcctgccaggcctgagaacacagcttcttttgtgggctccttgctcagggatcctgggcttccagccactgtaaatggaagtggcaggtccaaattgagaggctggtctcacaggacactctttcccccaggttagggtcagagagcttttagggaaacctggagggtcagccagtccatatcttggccctggagagcctgcactggcaccgttttggaatgctaggacctcaaagctactatttaaaggagcttcttaactacgattccactttgttagtgtctcctaaacagaaagttctccaccattggagggttatgtccaagaaattggcttgaagacccttaagggggaaatgtagaattttgtggattaaattgggcatttctaaccctcagattcgaattaagcataagttcaggtaggcagaagaaatagtgtaattagcaagtgggcagtgagttgttgatgtaagttgatgcataattgatagtccaataaatgttagagtcttgccccctgtaagcattccagtgaaatctagctcaactcagcaagtaaggtcagtagaagcagtgtcccttcaacacagagagacctccctcaagtcccccaccgagaaaggtcagctctgactctgacacacctgtgttttcagttctcccacctggtggtctctttctctccacttccccaactccctgaactcagagcgctcatgaaactttcgccctctgcccatcaccagaggatgtgacaaagaactcattaataattaactcagcagaagagagcaggtgttgcaatcccagatcctcagaggagaaaaggcagggcaggtgtgcggtgggcctcaccatgagtagctggggccccttaaatcctcctcctcctccctttatctgaggccatgagcccaggtaaatacacattcggtgtctcagacttcacaggcttgggcaggtcctggagtggtttggcttcgcaggagggacatgccaattgctgtgcttggctctccc

SEQ ID NO: 1115 - DNA, 4001 bp, Homo sapiens
aaattattttcaaaatgtttcatttgtttaatgactcaactgcaaataagatgttaaataattctgcttttctaacacttattccacacacaataatttaatcccacttttcaaagtactttttgttaagtccaattctttctctggaatcctgatacttacataaagtttagtgtaccggagagcagcaaaatcatgatcaaaagaaccatttgcctacaacatgttcctttccaacacccctaagtgatattagccttacaaaattaccctcccttgacagaagaatggcttgaggcagtctgttctctctggaagttcattagtaccagctactggtaataatcaagccttccaaggcaatggggagtgaagtgttaagtcaaacgtgtttctcacacatagattcctctgttaaacacaataatgaaactttctgcctatttacgtatctcaatgatgaagaaaaccttagctagaccgaacattatttttggtgcttccagatacatatgtccatcctcaatccactgccctgccatgaagttttctacacatccctttcctgatttctgaaacatcacttacacgtgtttctacagttgctttgaatgaaagcaaaagggaagacagtaaaggagagcctttttacccagggacaaggctatgcccagcaattacagtgagtgcacttccttttgttcattctgcaccaggattagcagtcaaatcgctttgtggttcttaattaaggctgagcagctataaagaacaataacttcaaaagtgaatttatgttttaattacacataggcaatataggcagcgaaggcatttgctcccctcaaattcccccttaactcaacagagcaatcaccctcagccctggaaggacatctaaacattttaaaggcgaaagtgtttaaggcggaccttcttgtttccgatccaagaatgcgctgtgatgaccttgctagcaaagagaaaagtggggatgggagtttctgattaacgcttcagaaaaaaaagggggaaatcacaatcctaacagccgaaatgcagaataatcagagagccagaatcccgttaagtcagaaagaacaggaaagcagagagactcgtgcggaacatcctggccctcacgggatgttaaaagcagtatctatttaagaagttggagaaaggagtttctgtgtggcccatgccggggaacagagagcaaacacgcggccgtctgcgcccgtgaggccggccactgggacggagccggtccgggagctgggctgctggcgagcagtagcaggggacggggctgtcaccgcttacccaggtgcagcgtgaggttgatggagctggggtactgcaccccggccagcatggtctggctttgccaccaggtggtgtcggcctggttgttgtagtcggtcaggaaggctgccccgtgctgcaggtggggctgcccggcgtcgcacaggtgacaggacttggtgaccccggtcaccccggtctgcacacagtattcctcgggcggagtcccacacgtgttggtggccaccacagtcacgttgaaggcggcgttgacgaactcgggcatgcagcgctgcggccgcccgccctcgtccgtgcactcgtccatggctgcctgggcacagcccgccgcggcggccgccgccagcacggccagcacgggccagagccgcccccggggccgcagggccggcgcggcccgatggctccctctcatcccgccgcccgcacgctgggtcacggcgaaggcaagggcaccggcgcgttcctctcgcctagcggcgtcccccggaggccgcttcgctgcttgagcctgggggcccaggggcctgactccggcgcgggcggtggcggcggctcgcgccggagagactgacgggtgggcgcccctagcgaggaccgcgctgctcgccgaccactgcccccgcgcgccgcctccgcgcttccctcacctaccccgggagcagcctgcactccgcgccgacccccgacttccgagcgcgtgcccgagtgcgcgcccccggggaggaaggagcagggggtggggtcggcagggtggggtggggtctgggcgaggagaaagcccaaccctgtctcctctcagcaactcccgcggcccctggggcaactccccggcccaccgcgccccatggactgcgcgtccgccccggcgactccaggaggcggcgggggcgggagcagcggcgtctcgcgctcgggcccgcggcgcgcgacccggggggaggggcgcgcgaggtgggcggggagccgggggagggggttgggggaggggaggggagaggaggggagaggaggggaggggagaggagaggaggggaggggagggcggctgggtggtgcatgccgggagggaagggcggcctcgcagacccgctccccgcgcgggagtcgctggggtccttgggctccgcggcctgggagactccggattgcgggaggagtcgggggagggcgccttagaggggcgatgccgggtcaggaggtcgctcggggtcgtccctggggcctcgcgccaatttgggctgcggcaagagggtccccgcccggccaggtgtgggtccgaaccgggagcgcccgctgctgcccggggccccgctccagcccctcccgaacagaggtcccggggcgttcatggggccgacacggtccctggagaatcagaagggcctggtcgcagcagccagatgagtttcgtgaagcgatttcctgccgctgatttaaagtgtaaccagtcgttttaccggggcaaggaaggaagtgaaaaggctgggaatggaatgaatttttcccttgggtacgcacgacccactgcgaaattcttccactgtgttgtttgtgttcctcggcttgcctttaaaagactcgaaattatgtggattctgacatcctccttttcgggcctgctgagtcacggaatattctcagtgccagaatgactcagttcacagaacctgagccagaagatcatgagttttagtcccggagcagaacctgggcgcttacccagtgctggatacggcaagcagagaccagggcagggaggcagcagcttgaaacccttggcgtccccaagcagagaggatgcacatagtgaatgacacggatttgttttgttctagcttttcaggaatttaatgataaagtgcggataataagtacaccgcaaaaacaaaacaaaaaaacacatgcataatttcggacccagttgtcccattaagataggcgtaatgggaatctgaaacaaggaaataagtatatgttaggtgactctggatagttagggttagttagacgcagactgctgattaggaaaaccttaaggataatgttctggtaggatgaagaagggaggggaatctagggtcttgttacacggctgagcttacttagcaagttatgttcatcactgttccgtttatttgatgagatgggtggagattatgcatggctaaaggtgcctcattcttggcaccttctctttgggagaattaagttgtggggactaataattttttaatcctttcatacatgagttgaagcgaaataaatacgttcatttacacctagaggggattatatgctctctcagtccttcgttgtacttgaggacaaacgtgggcatataggacaaaaataaggatgttagttgtgaataaagctacagatttgtaataaacttgtttatattttaataaacatattagtgaatttgcattattatacatttttagtactttgttatatagtggccaaagcgtgggtctctatttccaacaatcaaaataaagacaaggagacccccaaaggctgtgaaatcaacataaatgggtttgtcattgctgccttttgagtcctaatgtccaagactaacatcaagatattacttatgcgaattttccgtaacttaattaccagagcttatctgatatttgtaaagcacataaagagacctt

SEQ ID NO: 1116 - DNA, 4001 bp, Homo sapiens
attgatagcatcctatatatttatttttgttccctaatgctaacacacatatatgtactcaactatagccaacaagaaaattgcttaaatgattacttatcatgtataaaagatgtatcttattcctttattacttttataatgtggctcaaaaagctccagcctaagagcccctggatcaagagccagtttcatctctgcctgtgtggccttgagaaacacattttcattttctcatttttcaaatcaagagattccaagtagttgatccataagcagtccctttaaattctaatattcagagactatttttactttggggatgtcttccattaggctgagacttcttatcccagccctaagagaacatacccttcatgaccattttcagaaccttttatttatcactttttaaaactatatatatttaaggtatacaacatgatgtttcgatatacacagtaaaatagtattctagtcaggcaaattaatatgttcattatttcacatacttatctccaccttttttttttttttggtggcaatcatacatggttttgaaaatggtagtcagagatgataggttggaagttaattccaagacttttttagacaaaaaggactgtagcattgcattcaaacacatgctcaaacattattcatgccactcaaatccaattcaggccagcatcacccggaatgcacaataatattgggaatggcttatacaattgcatgtgcatgtgagcattatctcatattcatgcatgcacttgtgtggaaatggctcttggtcttggacctattgaaagaatgattgaaacgccatcagatgcaggatgcaatataaacataaaacatcagggcaattatacaggcatatatccatagaactaagtgacaaggaaaacacccataaaatgttgccatagctgacacatgcttacagttaagagttgctaggttctcacaaagttttgtttacatgaacttaacgtctaacacatgacagccaactaggtgccctagataagatcaaatgatatatgacacaggtgcccagtaagtgcctgttgaatgaatattacatgaaaatactatgaaaagtaacgtgatgcaaaagttaagggtattgctaatactattaaggctcatttttccatccgaaatttgaaacatcaattacaggattattgaagaggttcctttgcaatctttgtggtgttcacagtcatgggaaacattgccaccaaaaccttttaataaaagcacacgctggggaaagaacgtatataacaacacattattgattaaatagcggccccttggtcgaaaaaagacatcaagaaggaacatttttaaggtaaggaagaccctcttttgtcacagcttattgtcttactatttttaaaaagcagatagctttatatattagtctcatttaaaatccgtctctggaggagccccagataggggaggagaagggagctctaacaagtttctggacaaagtgggaatcctcggaggtacgttcagccatcacggtctgcagagaaaggcagattctcagcccagggctgagatgtttccttgtggaagccgactcaccttccctcctggaggtggcccgggctgcgggcaggaggagcgagaagcagaggcagcagcccagccagagcgcaggcatggcggggccgggccgctcagtctctgtctccgctgcaggggtcgctgcccggcgcctcggttggtggttctcactctgcgctccgctgtgccttccttttccttgatcaggtggttttatcgactcttctacctgactcagtcctgacaggaagagagcctgtgtttcagggtgtgactcacctgtgaataaggaggacccagccctccagaggcagacaaacacacagagcacaaaccgggctggaaaatcgctccccgcagccgcccgctccccctcgcagcgaggagggcgcacacctggcccgggccaagggtgtggcacagaggctgcggcccgggagcctttgcctggaatgtgcgagattccccggagccctccttctctcccggggtggtccagggcagattcacagaggtagacagcagcccgccccttcctcaaactgggaggcccaatcttaagagcgctaactcagaaataaggcagcagcccgaatcagctccggcttaaaggacatcaaggaagacaagtcagtcggagagtcacaacagggtcctctccaccctccagtttagggtcaacctctcctttctccaggctgaaccaagggtttctctcctggtccacataacttcctgctcaccagggttagcaactcataaagtaacctattgactggccaacctccctataaagactgagtatcgttttctttttgtttgtttttttgtttgttggttggtttttgtttttgttttcaatggcaccatcatagcgcactgcagcctccaacccctgggctcaagcaatcctcccacctcagcctcttgagtagctagggctacaggcaaatgccaccacacccagctaattttttaattttttgtagagacgaggtcttgctgtgttgggcaggctgaccttgaattcctggcctcaagtaatcctcctgccttggcctcccaaagtgctgggattataggcataaacaccatccctggcccactttatattcctaactataatagtatctagcttgcagttggtgcttaataaatattggcttgaaatgaataagaaagaggatctagataccaaactcttttacatcttagagtgtatttctcagccactctccatgggcactagagaaaatatttgttgagaccaactttgaatgttatctactagcacagtgctagctgaagtgagtaatatctagacaactgcaaatcttggtataaactatattgtctcttctcctaaggaggctagtgacaataattcagagaggtggctgtcaagaaggctttggttcctgctagagatttaaaaattgctagagctttataaatacacaatctgtccaaaacaaccaacccttcttctcaacattgaggcctacaaaggcccccaataaatagctatttgctgactaaatatatgaatattctccagattgttctgtggatgacaacaacataagataatgaacaaatcatccagggcagacataagtgtcaaaggttctaaaaacttcggttcatgcatgtcatggagaccagtgtgggctgactgggatagctagggatggctttgtacagaacgtggagtatgaactgggtgttaggaatagctggggtctgaatacagaacccaagaatggtaggggcaagacaggttgctgcaaactggctgacacctattctaaaatctccagcaataaaacctgaggaatagaaaagaaactccaactttctcatccaaggcttgattctcttctactctgcccaggattcaaacaaattacacaaatattcttctctctcaaaactcagagtctccagctacagctaaggtttcagttcacagagacggtatttagaattttcccttctagtcgctggtgccttgtggaggctgaggtcctgtccctgagtcccatctttgttgtgcaattcaccacggtcctgcaggaacaaggaacagggccctacaaaataaagtcttgaaggaagatttcattttagtgcagattgctatagtttattatatgttaaaagttggaacagatgttttcatctagcatcattttgggacagtgataatagcaatacaaacacataagtaatgcttactatttgccagtcgctgttgtaaatccattatctcattaaacttttaatctttaaaacaactttatgaattaggtgtactgttaatttccccattttacagacaagaaaacacaggcatgcgaaagtcaggtaacatgctcaaagtcacactgctagtaagttgcaaagccaag

SEQ ID NO: 1117 - DNA, 4001 bp, Homo sapiens
ggagagttcaccttctggccaatttgaaaaaaacaaaagtaagttcagcaaacttttactaggtatttattgtatgccaggaaccaagcactgcactccctgcctctctgacctcatctcctactaccctcctccatctcacgtaactccagccataccaaccaaccctgttgatccttgagcaggcataattctgcctcagggccttggtacttgctgttctgtccaaaatattcttccctcagataaccacatggcttgtcccccacctttcttcagatcattgatcaaatgtcaccttttcagtgagactgtccctgacacatacacccaacaaactcatactctttcacttccctgctttctctccattgcattttcaatacctaatatatactatatattttacttattttaaaaaatgtggccaggcacagtgactcacgcctgtaatcccagcactttgggaggccaacgtgggtagatcgcttgagccaggagtttgagaccagcctgggcaacatggcaaaacccagtctctggaaaaatgcaaaaattagcgaggtgtggtggtgcatgtctgtagtcccggctactcaggaggctggggcaggaggatcacctgagcccagggaggtcgaggctgcagtgagccgtgattgtatcactgtgtaagatttattagggctgggggttttgtctttctgtttgctattttttccctagtcctgagaatactgcaaggacctaaatacttgtcgaccgaacagatactaagaagttcacaatctaatggtgacttcccctttctggacttcattttcctttctttgaaagcttaaggggttggactagggtctggagactgccatggttctgtgagtcggtgaaactgggatgacaacactttgtgtttgcacgtcattctactgtttatacccattatttcatctgaccttcacaacaacccatgaggggagcggggagagggaaattattgtcttctccttaaacatgaggtaaggaagctgagagaggttaagcgacttacccaaggttccacaactgataagtggatggctgagaccagaacccaagtcagacctctcaggtccagggatccttcctcaccaccacttgatgaatagggtcctgcctattacaaatgctgctgcagaccaactcttagtaatcttccggagatcctgtccctgcccctccaaccatccaggatggggtccaggtcgcccccttgggatcccctttgggggacaggggaagtctggctcccctctccataccatgcagtccatgaggatgaatttgagattgtcttcattaaacgcttggttcccgttccggtcgtaggcggcccagatgttactggctatggcagcggtgacccgggcgtcagtgtccccgtaaccagagtaggccagcagtgatccctcgttattcagcagcctggtgaggggcggggagggatagcgatgtgctcagagcggggagtaaaacgtctgggtttccatcccaagtcccaccaagggcacatccagcaaggctctggcctgagcgtgtcccggaacatgccctaagcacccagcacaccggcttcccttttcgacaggggacctcccggccggtatccccagccgctgccccctctgccgcttcctcccttcctggtgatccttccccacccctccctcagggagccgcgcgccgccccactgcagcgctcgccgctcgggtccgtggtctgcactcacagggtgctctggacgcctccagtgttggcttggcttagcacctgggtcaaagccttggggcgcagcatgcctacggttcctaaccctgggcttttgcacccagatctccgaggtgcctcccgcgggccgctgcccgctgcttcccgtagtcccgttggcctgctccgggacgccctgggagttgtagtttcttcgcctggctattgtggttccgactcaaccccgccccaccgcggggggctctgggaatcgtagttctttgtggcctcgcgaggcaccctgggaattatagttcgcctttccaagccgaccacgcggttgttggggggcggaaaagaacgggagtgaaaggacagcagcagcgctggaaggacatttaaccccttcggggagaaaggaatcaacgtgtccgcttggcagtccacgattcaataattatactacatcctcatatttgtcaggcacgcctttggttactttcaaaacagttttctccgttatgcacaattctgtgcgatgaggcgagaggtactattattattatcttgaggaaaccaaggctctgaaaggccacgcagccaaaacccagctccctggaaccgttcttaatagaccattcaggccgcgaccctcggggctatagggtcagtcccagagctgagaacctaggtggacgtgcttggtgggaaaacccaacctccaagtcgggaaagtcccctggcctggaagggacttgggcttccaagaaagaccaagttatcacagggaacggagataaagcggcgacacagaaagtcctttgtcccggagccgagttagccgcggagggggcggggaggctttgggctggaggggaccgcggcacggctcgggcgggcagcgttgggtcgcggtctcccggggcagtccgccctcgcccccgcaatgaagggcacgccccttccccctcccagaggccccccaggggcccccgcctggcgagaccctggccgggctccggacctggggcttggccctgggcggaccccgctgcagtggcccccccggtccgcccggggcgctgtggctgcggctggtccggagggggcggtgaagcctcggggaggggaggggaggagagaggaggggaggggaggggaggggagaggtggagagaggggagtgttggaggcgcagaagccgagccgggccggccgggcgggcggggaggaggaggagccgggcgggctggcgggcggccgggtggcggcggcggcatggcggagccgagcggggccgagacgaggccccccattcgggtcaccgtcaagacccccaaggacaaggaggaaattgtgatctgcgatcgagcctcggtcaaggaggtagtacagcaggcggggggcggggggagcgcggaggaggggtctgcgaagagatggggggcctctctgacggtccggcgtcccggagggccccggagaggagggcgggggccggctgggactccgaggagctgaaggcaaggagaggcgggtagggggcgccctgcgaggggagatctgggggagcgtggcgcgtgttgaggggcgggttttgccttgtggcctgggggcgtggtggagagtgaggaggggacaccttgcaccgggaagggggaaggaccctgggtttgaggggagtgtgccggagtgggggcccgggctaggtgctaactgagagaacgggccgggggcaggcggagagcgccggcgcctactctgtgcctcagagaacgcccagtgttctctgagcgacggggctgtcgggggaggatttccctgtgcccagatccttcccactctttcaaatcgacgtggttacatttggttctcagctcttctgagatttacacggtgtgcagtaggtgctcaataaaatcttgttgaatgacggactgttgcctgtgttcgccaccccctgtggccgctccataatttcacataggcggggcttaagataggccatctggttggaagagagggatctggaagcagcctctgcttaacaagtgcactgtttttacttaaagtgtgtgttgtgttttgttttgtgttgtgttttggaggggctggtagaatttgggaagtctaactccatccttgctccctccctaaccacatagaattactaaatttcagaatttaaatactgtatgttccctacaaagctgaatttgaaaacggctctcattgagaggcagtgtgtttagtt

SEQ ID NO: 1118 - DNA, 4001 bp, Homo sapiens
tacaccacccaccttgccgggttgttgtgaaaattaaagataatgtatttagagcctagcagtctcagcatatggcatacattcaataaatggttaacagctgttattatctgaagtcctttctagactcaatttaaaatgattcaaatattatttttagtagagacaactatttattgttataggactgcaaggaacatcttccttcataaataccaactgaaaagtttcaattttctgatactgttatttggagataatctctactctcaaactcagaaagacctggcaaggtaacaggaaataaaagctagaaaataatagcacgctaggctccaagtcaacatcagatgctatgcaattcatcaaatagttggtatgagagatacttacaacccagattaagtccttgtgaatctgtgcacaggactccaacaatggagggattcttcattctaattccaggaacacaagagagttgaagtacataatgggagaaaaaggatttaaataagtacaaacatacaggtgttctatgtaccaggcattaagtgctttaaatcaatatttctcaatcttttttcattgtcacaccctaagaaaaaaattaagttctagggccgggcgcggttgctcacgcctgtaatcccagcactttgggaggcccaggtgggcggatcacctgaggtcgggagttcaagaccagcctgaccaacatggagaaaccccgtctctactaaaaatacaaaattagccaggcgtggtggcgcatgactgtaatcccagctactcgggaggctgaggcaagagaatcgcttgaacctgggaggcggaggttgcagtgagccgagatcacgccattgcactccagcctggaagacgagcgaaattccgtctcaaaaaaagaacacaaaaaatttaagttctagttaattaattgaaataaaccagtttctctctgatgagagaaaaaaatgtgctaagtactgctgagttctggagggccacaaacactgcgtgaaaaacatctaggatgttttcactcttgttaaaaacgcatgttttagtactaactcatttaaaacaactgttgaaaaactcaagttacctcctggagggtaagtggaagctgagggacatcggtgggaggcaggtgtctctctgtaccctttacacttttccagttttgaattttacatagatactgcttgttcgaaaaatttaaagaatgatttttatctacttaagcaccaagtaactgataggttacacacaggagatacgtgtttgtttacactgcagggctcgacactgcacaactggcacaatcttcccaaaagtcaacccgttttctaaaacttccgcagaaccaccctgaccgtaaagacgatttcaacaacgagataggcagttttggcccgtggcctgggcccgggagactcgctcaagagggaatgtgcggtgcccggcaggattttaattccgggtcacccgccccgccctgcggccttgggtagagtttagccccctcatcccgtgtcccgggggtcgcgcgacgtccccgagacgccctggccggtactcgcagctcgcgcctttcgttccgctcaagttcctccgccgcgacctcaggacaggccgaagaggcgcgcactactcacgtgtcttccaagtgctgctccaaggtcgcctccatcccacccaccgaccactccggctcagaacccagcggcacggcacgtccttctccaccacaggcctcagtcacttgacgcgagcggggcgtggaccgtaacggcgcctccaaagggacaaaattgatcacggtgcaacgtccgcgttctttactggaaaacatcactgcgcttccgtcgcacagagcctgacgaaggcttgggctccccgcgcggtgaccgtcgaggtgacctgcacctggctccatggcggaaccggccggcacggattattcccctctcgggagaggtctgcagccgggcctcagtgcttcagttcgtggcctggcattttgtgtcagtgttttttaacctttggaccctagttcaaccgactccgagacctaggggacagatcttaagttttacaataacccaggggtcagacagggtctgatctagcctgtggggcaagtacggggaagacacgggacctcttggagggggtcagtaggcttgtagggggaaagacgcacacagagactaaaggacgagatggagcaaggttcaaccccctagctgagtgttggcagtgtcgggattttaacgaagacattggtgcttattatggtgaggggactcaggacagtttaggggaagagagtggcatttgagtcctaactcgtaaggaagactgggtaggactacttgaaaataacttttaaaaattaattataaagctggtaaaaataggaaaacatctatggccccactgtccaaagacgacttttaacttcttggagaatatcctttcagatagttgtctttgtaaatgtatacttttaatgttttttcgtttgcctttttaaaataaattttttgggggacagggtcttgctctgttacccaggctgtagtgcagtagaacgattatagctcattgcaacccggacgtcctgggttcaagctatcctcacctctcagcctctcgactggctaggaccacagcctcgagccatcatgtctggctaatttttacgtttttttgtagagatgggggtctcgctgtgttgtccaggctggtcttaaactccttgcttcaacagatcctcccactccagcctcccaaaatgtgattacaggctgagtcaccacgcctagcatggttttttttgttttgtttgttttgtaagcaaaattgacatacatactggaggtacaattctgtagctggccttctttacagagtttagaataaatgtctttccatgtcaagttttcacttacatcctttgtagtagttgcaaaatattccattttatagctgtatcttaattgtggattaaggttggagtgcagtggcactatcatggcttagtccagcctcagccttctaggttcaagcgatcttcccacctcagcctcccaagaagctgggactacagggacccgccaccccacctagctaattaaaaaaaaaattgtagagatggagtctcagtgtgtagcccagtctcaagtgaccctccctcgttggcttcccaaagcgctgagattgcaggtgagccactgtacttggacttttttttttttttttgcttttgtttgttttttgttttagctattacaatgctggttgaatatcctcatagctaaatatctgtgcagttttaaaatttccttataagttactagaaatggaatgactgggttaaaggacatgatcattttttaagactcttgatacatacttacaaattgcctcccgaaaaagtggtgctaatttactcaaattggtaagcctcaccccctctgtggatcattccttgcactaagtttcttccaactctgtcacctccagctttttactcacagcctaccttccaatctggggcccagctcccagatcggaagataccagactttggtattgaaccaaagtccaatacactgcactggcattcagagtccctttttattccgcagctgtcatagtgaagcttgcagcttccttgaaattccagtttgtttatttctttatttttttgagacagagtcttgctctatcgcccaggctggagtgcagtggcgccgtctcagctcactgcaacctctgcctcctggttcaagcgattcttctgcctcagcctcccgagtagctgggattacaggcatgcaccaccacacgtggctaatttttgtgcttttagtagagatggggtttcaccatgttggccaggctggtctcaaactcctgacctcaagcgatccgcccacctcagcctcccaaagtgctgggattataggcatgagccattgcacccagcc

SEQ ID NO: 1119 - DNA, 4001 bp, Homo sapiens
catcagaagagcggccaccagggcccacaatccttcgtggcaacaacaagcaaaaacagagaacagctgcagggtgggccaagcaagggctcccggggtcaccgcaggccccatctgccccctgctgtcactcacatggcctgcccagaccctagaggcatcagagttggagacctctgagccagtcaacatcaccttacccctgactttataaaagggaaactgaggcccagagagaggcttgtctgagcccatacagccagttagtggcagggctggggtgaggacccagggacttgctacctgtgaggcgcccctgcatgccacactgtccttctaagaatgtgcatagtctcagagcttgaaggcctaaaatacagggtacagggacactcaaagagtgatttgcttctctcagctcttgcattggcaggagctcggaaggacaacctctgagttcctcctcccaaaactagagtccttgaatctgacaacttgactccaaggatgctgacagcaggtgccatgtctgatgcacaacgaataataaagcactcacctgtgcgtcaggcgtggttctgcatgctttgtatgtatcaactccctgagcctcacaacaaaccctatcagatgggtatgataattcacatccccatttttttaaatgagaaaactgaggctcagagaggttaagtaaattgcccaaggctgcagagctgggaagcagggaagccaggatttgcatgcaggagtctgcatccagaggccgtgggctaaccactgaacagcatcgcccccctgaaggctgggctcttgccacagctctgcctgccctgcctgtgacaggaagcagacgcaggcaggtctgagtttgcagcaacccaccgcagcatgtggatctaggctaattttgaggaagcccttccagactcatgagaaaactgttaaccacaggccctgagtcaccccaggaggaagtcgcttgggtctaggggagatgagtgtggccaggagtttgggagtagggtgggtctaggcaggacagtacaaggacactgaccctcagccaccccaggcagaggggcagccttggcccccgggcactgtgacttgcccaagaccacactgtgagtcaccaggaaaggaggaaccagtgacagccgtgacttcacaagttgcccaacaagagcttgggccggacaagttaccctaatgattagcacaggtctcaagttctctttggtgggcagaaggccgtggtttgactgagctggaagctgagaggacacggcccctgcctccccactggaggcacaaaggggagatccccacttctcatcccctcgagtggcccaggctccctccaggccccaggggaagaatcggggctgtgtctgcggccgacctcacatcccggtcaaacaatcccagcccacgttcctcccaagatccctgccttccaaagcactttcacatctgctgttggctttgcacacaaataaccttccggctgctgctgtgccccatctcacagaggcagaaacggagccagcctcggagtgaacgtcagttacatttgcctggaaagtggattccagctcccttactcctcactcttgcggcatctccccagggtacccccagccatttgacagagaaggaaactgaggcccagagcaggacagggatttgcccagggtcccccagagaggtggagagcaggagttctttcatttgtggggctccgtagatgacgggtcaccgcagacattcacactcacacaagcacgcacgcacacacacccggggcccgcacactcaccacatggtagatggccagggcggtggttgcgatgcggacattgaagcagcagcaggtctggcggacagtggacaagcgggggtccatggtgctgccgtcccctcctctgagacactgaaggggaaagagcctggtgcctggagcagggcagagaaggggaagctgctggctgccctcctcacttccttcctgccccttagacaggcagggacaaggtcgtcacagctggggcggggcagctggggagggggagtggggacagggcagcagcctgcctcagagcaccccactgccctctgccattcccaggagggggttccagagaggacagaccctaacacggtcatcatgcccttctctgcaccagggccagggttccaccgtttcacacagcttgcttactagaagaacactaccaactttggaagccaggactgttaccaagcccatttccagatgaggaaacagctgtccagagaggtcaaggcacttgccccaaatcacacagtagttagcactggtggcagaattcaaacccagatctgtctggctgcaaaaatagctattgtctaggaggcatttcctgcctcttccaggcatgctcctggattcactcctttcatcctcacctcaatcctttgagagaggtactattatgatccccattttacagatgaagaaactgaggcacagagagggggaatgattcgtgcaaggtcacacagctagtcaatgaaggtgcaaggattttaactgaggctgactggtgctagaagcctccctggagctggtgttctctcccacttcctcaccctgagccgcagggagaagcttgttcttcctaagctacgaagaggcgtgcagggctccagacaaggacggaagaataaccaggaagcaaacccatcaactgtgcgccaggccctgggctaggcttctcttctaggtgggtcaataactcttcacagcaatctgtgagacccgaacctcactttcagggcctcaagacccaatccccatactcacacaaaatcagggattgcttttcccccttgatcttgcaaaaagttggaattaataagccacaactcttaggcaagctaccctggaatctctactccctcctcagatgataaattatccatattgcaataaagaaagggaataggaagtacatgcaacatttctggaagaagccctgcttcattccacagctgagcccctttgcaatgccaagcttctagtgcagagcagacaggaactgccatgaagccctgccctcccaggagatcatggagttaggattggacactgctgcagcccatcatttctgccccaggagaggttatagaaagtccctaagctcctcccacttggcaggagttgctctgttagacccacaaaacttgattggtggacttgatcaatccattctccatgtgccaatgagaccaaggggactctgcaagctttgggctcctgggaggcctggcctatcccttcccaacttcattttcaaggctgttcctgttccttcataagccttgctgaggcctgacatcatagaaaggtgacacagtgcagtggttaagaactttggctccacaggcccatggcctgggatcttctggctgggtaggcagaaaaccaagagaagtcctcctttgtctaagagtagcaagaccagaggaactggagatcaggaaaccaggggccaggagggccctgaggccatgctggggagtctgcatttgattgtgcacagaagccatttgacgatttcctaccataataaatgatagccattcataacattgtgatttggtgaaaccaggacaggtgcaaagccaactcccaaagagagggatgaaacacactgacagcatgtggaataattgtacatggtctatgggtaaacatttctcattttttatggtgataaattcattttaatgtgcattataaaaatatacataactagtccatgaatcctgtgattttccatttataggagtaatataaagtctcattttaaaagaaatgcatttaaataaaaaaggcagtaagtcaatttaaagaacatattaaggaagccacagcctaggaggacgcagatgtggcagacagccctggaggtggagtaggtggcatccgtttgggaatcctggggcatggggaa

SEQ ID NO: 1120 - DNA, 4001 bp, Homo sapiens
cagacccggtggctcatgcctgtaatcccagcactttgggagacagaggtgggcggatcacctaaggtagggagttcgagaccagcctgaccaacatgaagaaaccccatctctactaaaaatacaaaaaaaagttagccgcgggtggtggcacatgcctgcaatcccagctactcaggaggctgaagcaggagaatagcttgaacctgggaggtggaggctgcagtgagccgagatcacgccactgcactccagcctgggcgacagagcgagactctgtctaaaaaaataaaaataaaaaaaacaaacaaaacaaaacaaaaaaagtgttgatgactatagttaataaaaatgtgtcatattcttgaaaattgctgagaaattttaagtattctcaccacaaaagaaaattgtgaagtaatgtgtatcttaattagtttaatgtagctattgtacaatgtatacatatttcaaaacaacaggctatcatgataaatatatataattttgatttgccaattagaaataaataaaaataaatgaagaaatagttttggagagatgcttcaggcttctgattcattgctcattgatgctcatatctaccagcaagtgacatgtgtttgccatgataataacatttatttccccaaacgactgcaattttattttattttttgagacagagtttcgcttttgttgcccaggctggagtacaatgacatgacactgcaacctctgtttcccgggttcaagtgattctcctgcctcagcctcctgagtagctgggactacaggagcatgctaccactcccggctaatttttgtatttttagtagaaacggggtttcaccatgttggccaggctggtcttggccaggctggttcaagagtgggggtgatccgccccactcggcctcccaaagtgctggggttacaggtgtgagccaccgcgcccagtcagctgccaatgtttttaaagtttcaactgtggatggatttttaattttgtttgtatgagattgaaagtagtagcagtaattcatacccatgattagttctgtaagattttacgtcctaaggacgtatctttattacatctatcactacattttttattcatgacaagtttttggatctcaaaacacatccttggaaaactcagccttttgtttctgtcatggtgacacctaggaaagactgatgatagggttcagggcctccgagaggtgagaaatccaaccagtctaagcaactagctttaagggccagtgttatcacagtttttcctctaccacaatattttctttctttcctcaataccttcctttccccctagcacccctgagcaaatgcctccaagcctagagtttggtggtttagtagaccgagcctgggtgttgagaggtggcagcactgctgtgtaagaagctcctaagggtggactaggaccttctgcctaaatcagggcagggtggagctcaccaccctgagtcactcacctgtccaggctgcggggagtcacatgcagagtgctggactccaaggtcctccctctgattgtcgaaagggttggagtgacaccatccattgtatcaggaacctttgagatgctctctggcttcagcttctaagtttctcttaatcataatcagttagccagcatgtctaccacttctccccacccccgcaacaaactccctatctcgtgtctacctctgaaacgtcaggccaagttgacccaacatacaaaagcaacaggtttggttctacctggacgtggctaatgcccactgcaggaagtgcgatctcatccggacatggtgcttccaagtgaggtggctcagggagaatctgtggcctctgccttcacgtttctggtggaaacgtgaggggcacagagggggaaactgccaagaggctcaagagaggctccgtgagaagctcgtcttccttcaacacccaaagcagagtgaaaagagcaaaccactttgccagaatggaaacagagagtcagtcaccggaaacgacaccaccaatgtgctaatgaagcacagggcacaggaaactctgctcagctcttaatctgctagaagaaaacatatcttcaacccaccgttcctgggtttgccaggtgctctgtggtctgtgatgagtgtgattaaaaatggggcagggtagtagagaacttgtgattcttcaccctgagtttctgagacacttagagttgtataagtcttcagatttacagtattttctaagcaagtctaaggagcactggaggttgccttttagagtgaaatgcagatctccgggaccctcttctgattcagtgggtggaggctgcagagggggcaggctttggctatcgatgctttccaggtgaatttgatggagctttcaggtgattttgatggagctcatctgtgtttcatgttttgggaacctctgctctgggtactaccttaagaatagaagttatgctgggttagcaggacccctgctcccccaaggcaaccttccacagctcctggctgctggtgatctcctgttctcagggctcttctgaagatcagtcacagtcttacttgtcacacacctgtctcagaagctgaacaagttcatccttaagagctacccaaagtgtttgaagattgttcaaaatttattgctaactcccctcccttcttgagcctactaatctccggaaacactctttgcatcttgggagagtccaaagagaaggggccactaagactgttgtaaggatgtgaagaacctctctgattgcactttccacaaggaaatggattcccagatgaatggaagggcagaccagcagtaccctcctagaaccatgcctccctcccatctcttcccagtggacattgaggtcctcagctttcctgaggtggcagcccctggcctgtctgcatccagactctcacagagtccccaggggctgcagactggccatggctggctttccagggagctttatcattccaggtcctgggccccttccctcccaggagcttcacctggtaggaagcagaaatggctcagaggcagctggtgctggagctggaacctgggtctctgcccacttctcctttggatcaggtctgagtaggaactaggactactcacaagatccatcatgctggtggcaaggactggggtcctgggccattggaaccaataagggactgtgagaatcaggacctcggaaggcagtacacggaaagggcacatggaaccaaacctcagaaccatgactgctaattaaaaaaaaaaaattttttttttttttaaagaacttttccattgcatgtgatcatttcagggcctcacttatcttatctacccaatctgctgcagttagaccaatcttccctctggttgtccaattctctcctgcccccacatctcagggaaatcaccacctcagaggcagctgcccaagttacctgcctcagactgcaggtgagtgccaggattccaggccttggctgtgcccctcatcctgctctcctttccttccccatggggcaaaatccaatcaaactgacaaactaaaacaaaaagtaggtagctgaaatgattcatcataatagcggggaaaaaacaacagcaacaacaaaaaacactcgttcctgggaaatggggtgtattttgttgttgttgttgtttttttgagatagagttttgctcttgttgcccaggctggagtgcaatggcatgatcttggctcaccgaaacctccgcctcccgggttcaagcaattctcctgtctcagcctcccgagtagctggcattacaggcatgcaccgccacacccagctaattttgtatttttagtagagacggggtttctccatgttggtcaggctggtctccaactactgacctcaggtgatccgcccgccttggcctcccaaagtgctgggattacagcatgagccaccgcacctggccaaggagtgtatgttttaaatccg

SEQ ID NO: 1121 - DNA, 4001 bp, Homo sapiens
gagttgcagctgacagtctatctatcccattctccctgatactctctgaagggcaaacaggtttgagaacttaaagaaaattgcttctggagggtgagaggcacattctgggagtagaagttcgaatatctggactccatagattagaaggaaaaacctacccaggtcttcctgtcgccaaggcaagatgtcataaatatttttggctctttgtctggtttgtggcaaagtcagcaagggcatgacggtaactcggaggtaaggaacttgtcctgcaaggcaatgagagagatgggagtcatggcgggggtcagctgcacagagtgaagagactcatgggaatgagatggcccctgaaaatgctccccatccttgccagttctcacaaaaataccctttcagactcaagctacaggaattttcatttgagtgagaggaacaggggacttgatggacagaacgtaaagaggaaactggacacaggggcaccagggcaatgtctttcccaggggaactccatcagcactgggcttttggagccacagttcaggatcttgagtgaggcaatggccaatgtatcgggtaagaactgaggactccccaggccaatagtttatccctggtaaataagctgggctttaaattccagcctagattaataatcctactgtgtctcaactcaggacaaacaagggactcacgcttcttccgtttattccaattccacaagatgcagaaaaccgcaacgaccaggaggatggcgaggagtcccgcaaacccggaaaagatgttggtgatctggtctttatttctagaaaaacaatcgaatgacatgtgctagctgtaggagggtggagaggctggaggagacatttccttttggagttagagcctgaagatttggaatgggagccgagtgaaggaaagcccaggtggggtgtggtggaagagagggttatctctgaatattgactttatggagagaggggacttggacaggggagaagggaactattcctttcaaatgcctaccgggtgccagggattcacatgtgaaacttattaatctctttctttctttctttctttctttctttctttctttctttctttctttctttctttcttccttccttccttccttccttccttccttccttccttccttccttccttccttcctttctctctctctctctctctctttctttctttctttctttttgatggagtctttctctgtcgcccaggctggagtgcagtggcacaatctcagctcgctgcaacctccgcctcctgggttcaagccattctcctgcctcagcctccagagtagctgggattacaggagcgtgccatgaggcccagctaatttttgtatttttaatagaggcggggtttcaccacattggccaggatggtctcaatctcttgaccttgtcatctgcccgccttggcctcccaaagtgctggaattacaggtgtgagccaccgtgcccggcctgtgaaacttatttaatctttaacaatcctatcacactttgtggccaagtaacctgagctttagactcagaaaggtaaagtaacatgtcagagatcacctaggtaggaaggagcagagaaggaatatgaatctaggtctgtttgcgtccaaagaccatgctctttccactctgccacactgtcctccaaacctgcaaagtcaaagtcatttggccttgccccttcttgttccctactcgtgggcttcctggcttgcttggaggagaggattagccaacgtacagttaaggagtggctctgtgacagagtccagcttgcatgaacttgaataacaccccccaccccccgccgcccccccccccgcaccaatttgtggagctggtctccaagcaacacactgctgttgtgtgaagtttaaccaattcatgttctgtgctaccttgcaattccctggcagggctggcgtcactgctcggttttgcttgggtgttgaaatgcatccagatgattacaaccccagatggctatgcctaatgcaacaggaagctgccaactgaagttacagcgggaatcaggaactgacgtgctacccccaattattagaaaccagggcatttaacagggaaggtttttgtccccttgagttttaggcttatttatacaactttctttcttttcttttctttctttccttctttctttctttctttctttctttctttctttctttctttctttttttttgagacagagtctcgctgtgtcgctcaggctggagtgcagtggcatgatcttggctcactgcaacctctgcctcccaggttcaagcgattctcctgcctcagtctcctgagtagccgggactatagacacacgccaccacgcccggctaattttttttgtatttttattagagatgggatttcaccatgttggccaggctggtcttgaactcctggcatcaaatgatccgcctgcctcagtctcccaaagtgctgggattacaggtgtgagccaccgcgcccagcccatccaagtttctagtgagcatttctaactagttgcctaacagacagctcaaaccaaaacagagctcctgttctccccacataaacctgctactccccaggtgtttcccataatctaatggcttagtcaaaaatcttggagccattcttggagctctttttctttcatgccccacttccagtcaaccagcagattctggctgcattaccctgggcatttatcccaaacccaaccacctcttgctcctctgttgccaccactcgggtctaagctgctgtgcatttcacaggaacctttgcaataactttcctggatggtctccttgctttaactcttggcctcaacattcgttgtcttcacacaaaaaccagtgtgataattctaaatggtaaatcagatcacatccctcctctactcatcactctccccggcttcgagtgacttagaataaagtctatagtccttcctcagagaggacttgacggcacgatatgatctggcctctgcttacctctgaccttatttcctaccactttccctctgactttgactgccaggatcccttgcccatgcagagcacagttctgtgtcagacctgccactccctctcccaggaatcctcctctcccagctgtctgcatggctgagtccctctcattcaggtctcttctgaaacgtcaaatgtcatctcctcagacacgtcttccatggccacaccctattacttgcagtccccttgctgtgctccactttttcttcatagcactgatgactgattgatatatctttttttttgagatggagtttcgcttttgtttcccaggctggagcgcaatggcatgatcttggctcaccacaacctccccctcctgggtccaagtgattcttctgcctcagcctcccgagtagctgggactacaggtacgcaccaccacgcctggctaatttttgtatttttagtagagatggggtttcatcatattcgtcaggctggtctcgaactcctgactttgggtgatctgcccaccttggcctcccaaagtgctgggattacaggcgtgagccacctcacccagcccgattgattgatattatacattcatatgcttatctgtttatcatttttttatttaaaaaaaaaaaattttgagacagggtctccatgtgttgctcaggctggttttgaactcctgggctcaattgatcctcctgccttggtctaccaaaggcttggattataggcatgagccaccacgctcagctctgttcattatttgactctcccacttgtctataatcttcaggaggttatggacttgtttatcctgttcacctagtgccttaaacagtgcttggtacttagtagggccctgataaatatttgttaaatgaatgaattaataaacaaatgaattaatatagaaatagttttaagtgtagtacagccattatggaaaacactatggagg

SEQ ID NO: 1122 - DNA, 4001 bp, Homo sapiens
aaacaaacaaaatgaaccggcattcttcttagaagaccattatcttatacacaaatgttccaaaagatgaagccaacaacatgatgtgcacccccactttacacaagatccacacacaattgtcaaacgtgaggatacagtgcaatcacatcctaatatattcccccacaggagtgaaatagccaggatggcacacaaaagccccacatttgttcgtgtcactcactatgcactcacctacaggagtcaagatacacacaggattttcttacaagagatgttttaggcaagtgtgtttgtaaagaaaaattttgttcactgcacccaatgtcctcattcgccataaacaggaaaaacacggagaccctcaggtttttctctattaagccagatgcccgctaacttcagagtcaactggcactgcaatcctcacacattccagctccggtatgttactgtttgtgaacacaacaattctctgctcattaacattacaggggtctccagccatctttccttcacttctccaaattcatctaaacgtggcatagagcaagacgctcgaatgacgttggacagcttccttttcacacctgagccccggtagccccactaggcaaaatgcaaacaggaaccccgggccttgctccgcgccctttgcttcatgaagcaacagaaaggccaccttcctggctgtaaaggcagaagcgccttcttccccataaacatccttgggcagctcatcattcccctcctgctcgttcttctccctcttcccaggcagcctgagaaacaaaacttaaactggacttgttgcctaatctaaattaggatccctctgctcttctccgtagctccatcttctcccacacaccagttactacaatgcgtaactacagatctacacgtgtttacgtgcaaggtccccgggggcctgttcaccctggcactgcccaggcgccgcgcctcgcgctgcaggtgtccacgcgcggaccacggtatctaccgcgccctcgtgtgaacacccgaccgggccccgtaatcactctgggaaagcgccttcaacaaagccctccgaaagcaagtgctttactaagtgccccttgaggctactggcagtgcgaggctggctgtcattagaacatttttctgaaccctcaaaaaggtgaaaaagcaggaccgtgctttagcaggaacacgcacacccgcctaaatacccgatttttgagactgtccgggcgaaggaattcaacgcataggagcgagcagccatgcagtgtgcctggagaatcaccaaaccgcgacgaccacgaccctcaaagccagtgacaagcagcgcgaatctaagcccacctcggccgcagacccttccccgtcccgccaggccgccgcgccctgtcagcctcctactgcaggaccgcggggccgcctgctcatctgtcagacgggcgctcggaggggccgggagccaggctgcggtggggcaggacaaaggcgcccacgaaccctccctgccgccgccgctccacagccgcgccgcgccgccaacatggagggaaacgtccgcagtttaaaacccccagctccatttccgcagcgggcccggctcgggcgagctccagcctcgcccgccgccgccccgaccacccgactgggccagaaaaggcgaggaggggaggagacgaggaggcgaggagaggaggggaaggccgccgcgccaggccccgcgcccagggtccccggcccggccgctgcgccggcctcgggcttcctcccccagcggcccctcgaagaacgcgccgcggggagctgggagcagggcgggggtggaagcactcacctgcgccaggttccggcggtgacacggacggctcccggagaatagtcgcacagcaacccggcggcagatccacgcgcgcgacgctacccggccgcgctctcgcgccccgcagtcccgcaagccgggcgcgcgcctccccggccccgcctcgcggcgcttctcccctcccctcgcctcccctccccaccggcgaggccgcccggggctcccattggctcctcgaccttttgaatcatccccggcgctgtcgattggtcgcgcgccgtggcgcgtccgccccgccccaccctgcctgggggcggggaggccggtgagcgggggaaaccgagtctggcggggcggcccggagcgcgacgtttgccaccgccttatctcagccgcccaggcgccctcgcagcacacggagcccgcgcgctcccgccctttccctcccagcgctcgcagcagtgtttggggtgccaggtggcttggcgaacgagatttttttttaagctacaaagaaaactaatacattcttgaagtgatcaccaaagatccgagctcgaaagcgtttctcggtaaaacactatgagtgccctccttagcgtgttaaaatcccacagaagcccctggaccaagcagcggcatcgaaggcgagcaggggcgcttttgtgtccgcggccgctgaacctgcgtagaagcgaacccggaccgatgctgggaccggcggcgggagggagggggaagaatggccgagggctcctacgacttacgctgcgaggaggggctcggttgttacccgagatgctgtcgagatgcagtagaaaatccccaacaccgcggagcgtggaacaagaagttttatgcgttacacaccgaaacacaacttgacctgcaacctacaagcctggttttaattgaaccccaaaatgctgagtcatgtcattgttgactccgaatctgttacggatcctaagcttttttttttctgctagttttcattatcggttagttgatttccttcctttgaggtcgagagtttaaagcagtccattgaagttccctattttgcagtgtggttttaatcaaagtatttcttaacaccctaactaggtatatttaagtgaattgctattttggaagcattattaaattgtaataatgaatagaacttttcatctatagcctagcttcagctttcattttctcatagaactacaaaacacccaggtttacttcttaaaaaaaaaaaagtgaaaatacatcgagttttctcagtcattcacatgcagtgtgaatgagttcatcagagcctttcctgagaagttctgacatcaaattgtcattgccatcgaatttgcccttggtggagatctgtgcaacagaaatgcacatcgcactccaaagtcagaaaatcttttatttttgacaaacccccaagtctcaattgtcttaacccttgacataagataatattagtcctacctcatagagttttgcagtaaattacacagaaataaaagcgcttatggggacctaagacagatcctatcccaaatagccaagcagtgagtgctacactattcttttctcatatgttctacccagaatcaagatttcactggatttcccttgaggtgcacatttcctggatgatttccacttgtgaaatagaagaagattcgtttcaaaaaaaaaaaaaaaaacacctggccaggcgccgtggctcacgcctataatcccagcactttgggaagccgaggcggttggatcacctgagcaggagttcgagaccaacttggccaacatggtgaaaccccatctctactaaaaaaatacaaaaattagctgggcacggtggcgagcacctgtagtcccagctactcgggaggctgaagcagaagaatcgcttgaacctgggaggtgaaggttgcaatgagctgagatcatgccactgccactcagcctgggcaagaagagcgaaactctgtctcaaaaaataaataaaataaatttttaaaaattttaagaaccttattttaaagatcaggtttataaagtctcatcataacaaaatgaagccaaaactttgtaaattaactagagttagcttagctaacattttacctaataaattactaatgacatttttaaaacaaaactgatttgacatcaggaaaac

SEQ ID NO: 1123 - DNA, 4001 bp, Homo sapiens
atcattcccctcctgctcgttcttctccctcttcccaggcagcctgagaaacaaaacttaaactggacttgttgcctaatctaaattaggatccctctgctcttctccgtagctccatcttctcccacacaccagttactacaatgcgtaactacagatctacacgtgtttacgtgcaaggtccccgggggcctgttcaccctggcactgcccaggcgccgcgcctcgcgctgcaggtgtccacgcgcggaccacggtatctaccgcgccctcgtgtgaacacccgaccgggccccgtaatcactctgggaaagcgccttcaacaaagccctccgaaagcaagtgctttactaagtgccccttgaggctactggcagtgcgaggctggctgtcattagaacatttttctgaaccctcaaaaaggtgaaaaagcaggaccgtgctttagcaggaacacgcacacccgcctaaatacccgatttttgagactgtccgggcgaaggaattcaacgcataggagcgagcagccatgcagtgtgcctggagaatcaccaaaccgcgacgaccacgaccctcaaagccagtgacaagcagcgcgaatctaagcccacctcggccgcagacccttccccgtcccgccaggccgccgcgccctgtcagcctcctactgcaggaccgcggggccgcctgctcatctgtcagacgggcgctcggaggggccgggagccaggctgcggtggggcaggacaaaggcgcccacgaaccctccctgccgccgccgctccacagccgcgccgcgccgccaacatggagggaaacgtccgcagtttaaaacccccagctccatttccgcagcgggcccggctcgggcgagctccagcctcgcccgccgccgccccgaccacccgactgggccagaaaaggcgaggaggggaggagacgaggaggcgaggagaggaggggaaggccgccgcgccaggccccgcgcccagggtccccggcccggccgctgcgccggcctcgggcttcctcccccagcggcccctcgaagaacgcgccgcggggagctgggagcagggcgggggtggaagcactcacctgcgccaggttccggcggtgacacggacggctcccggagaatagtcgcacagcaacccggcggcagatccacgcgcgcgacgctacccggccgcgctctcgcgccccgcagtcccgcaagccgggcgcgcgcctccccggccccgcctcgcggcgcttctcccctcccctcgcctcccctccccaccggcgaggccgcccggggctcccattggctcctcgaccttttgaatcatccccggcgctgtcgattggtcgcgcgccgtggcgcgtccgccccgccccaccctgcctgggggcggggaggccggtgagcgggggaaaccgagtctggcggggcggcccggagcgcgacgtttgccaccgccttatctcagccgcccaggcgccctcgcagcacacggagcccgcgcgctcccgccctttccctcccagcgctcgcagcagtgtttggggtgccaggtggcttggcgaacgagatttttttttaagctacaaagaaaactaatacattcttgaagtgatcaccaaagatccgagctcgaaagcgtttctcggtaaaacactatgagtgccctccttagcgtgttaaaatcccacagaagcccctggaccaagcagcggcatcgaaggcgagcaggggcgcttttgtgtccgcggccgctgaacctgcgtagaagcgaacccggaccgatgctgggaccggcggcgggagggagggggaagaatggccgagggctcctacgacttacgctgcgaggaggggctcggttgttacccgagatgctgtcgagatgcagtagaaaatccccaacaccgcggagcgtggaacaagaagttttatgcgttacacaccgaaacacaacttgacctgcaacctacaagcctggttttaattgaaccccaaaatgctgagtcatgtcattgttgactccgaatctgttacggatcctaagcttttttttttctgctagttttcattatcggttagttgatttccttcctttgaggtcgagagtttaaagcagtccattgaagttccctattttgcagtgtggttttaatcaaagtatttcttaacaccctaactaggtatatttaagtgaattgctattttggaagcattattaaattgtaataatgaatagaacttttcatctatagcctagcttcagctttcattttctcatagaactacaaaacacccaggtttacttcttaaaaaaaaaaaagtgaaaatacatcgagttttctcagtcattcacatgcagtgtgaatgagttcatcagagcctttcctgagaagttctgacatcaaattgtcattgccatcgaatttgcccttggtggagatctgtgcaacagaaatgcacatcgcactccaaagtcagaaaatcttttatttttgacaaacccccaagtctcaattgtcttaacccttgacataagataatattagtcctacctcatagagttttgcagtaaattacacagaaataaaagcgcttatggggacctaagacagatcctatcccaaatagccaagcagtgagtgctacactattcttttctcatatgttctacccagaatcaagatttcactggatttcccttgaggtgcacatttcctggatgatttccacttgtgaaatagaagaagattcgtttcaaaaaaaaaaaaaaaaacacctggccaggcgccgtggctcacgcctataatcccagcactttgggaagccgaggcggttggatcacctgagcaggagttcgagaccaacttggccaacatggtgaaaccccatctctactaaaaaaatacaaaaattagctgggcacggtggcgagcacctgtagtcccagctactcgggaggctgaagcagaagaatcgcttgaacctgggaggtgaaggttgcaatgagctgagatcatgccactgccactcagcctgggcaagaagagcgaaactctgtctcaaaaaataaataaaataaatttttaaaaattttaagaaccttattttaaagatcaggtttataaagtctcatcataacaaaatgaagccaaaactttgtaaattaactagagttagcttagctaacattttacctaataaattactaatgacatttttaaaacaaaactgatttgacatcaggaaaactaagcaataatttttgttcatttctacttcgtggactcaaacataccatgaacaatcagatctatatgtaggctgctttctcaacaaaggaactgtttggtatttttctcttcttttttaagtctactaaaggctgtgtaaacttggaagtggggaattttcagaaagttctcagaaagatgcttgtcactcacaactagcaagttgtgggttttcagaatctataaagtaaaagtcacttaaaagtccgcatcttggcaccattgttgttaatgaggccatgagtggcaaagcccctttccccattcacataacaaaagcaaagcaaaacccttcagtcctgccactaaagccaaccaaaacacacatgcggccaggaagctttcatatataaaatacaggaacccccagcggaatgcattccaatgtggcagttatttggctctggtctccagaggatctcggttcccaggattgaaacatctctttcaggaaagacgtgtaggtaaagtttcacgtggcgtgagatccagttggattcttttggtactgttacataaggaacaaacttctgtatgctgcaaactgcagaaagcctttattcataaggtagaggtacctcaaaagctgtccgataaaaacacatttctactgatgatgtttgatatggtttctattcacacagaaatggagctcacaattaacatgatgcattatgtccatctcaatagcaatttaaaaa

SEQ ID NO: 1124 - DNA, 4001 bp, Homo sapiens
cacaagcaaaataataaaattgacccttatcttataacattaaaaacatttaactcaaaatggatcaaaaaccgaactgagggcctaaaacaataaaagttgtagaagaaaatatacaagaaaatctttatgaccttatgggaaaacacagtcttggctttcatggaactctggtctgagatggctatatagcagctgcccttagggagcacgcagtccaagttggggagagagaaacctggaccttagcgtgtgtctgatcccagctggaacattatttcctttctggggaatggtatcatctgtcactttggccaccagtcagctccatacttattaatatgctagttgaattatttggaggggtcacccaatatgtgcagtgcttgagctccttcttgttactgaagccaaaaggaatatatccctcatctagtctcctggaatagtcaagaagcaggtatatggctgagaatcagtgtactggatgtcccttgggtgactgaccaaagacacagggacatctagaggttgtattaatcagagcatttgtgaggtggacatcacattattcctacatgttcttgctgtctgatctgccagacaccagggggttttcatggattaaaaaataagtgcagggtattgcccacttatccagttcatagtaaaattattgaggcataatacacacaacattaaattaacaattattcaatctcatgtaaaatttgtaattgaaaaaatattgatgaaaaatcaggacttcttcacaaaatatagagacgaaatatttgactggaaagattggacttgggactctgggagagaaaagaaagacattgatttttaacatactgattccttttctacggatttttaagttttttcagatcatatttaccacatgttctatgcatacttgtagttagaatagtctaagattcatggtctgtttgcaggaagtttacatataattttctaatattttttactgaaagagaatgaaatttgggagtgagtgggcagtattgtaaaggggaggaggggtagatggatgaaaggatggggtgcatatctgtctccctgccacaccctggagaccaagtaggaccctgaagaagtccaaagcacaaggctctgtgttcctgaaacaccaggaagatgggcacaggcagagccacgtagtgattcctctgacataaggtgtcaaagtaggagccatagaagtttttctctcccctcctccatatctttagccatgcgactagcacatcttgatttccaaagcttccaggcagcaggaaagtagagagcagtgaaaaaaatattggagacacaaacaggcaaggaacagtccacaataagtggcaagaagatcttttgctttattgtttcacttgaggctgcaggaaatgagctggagagtgagtttgtggcttgggatcccagagtagacaacacagttggtgtcaggggcagcagataggtttgtgggagaagaatcaagtttctggatcccagggcagagggatcctctaggccagagctcagagccttcacgcgggcatctcagccactcttgcaggcccaggaggagacaggtgaggaggaaatgtttgatcactcatttcacccgagtctgctcttctaggtgcagagtccgcttcagcagcagcctccagagtgctggccgctgtcccctccacagcagctggagcctcccgagggctggctgcagcagccagagctctggagtctgtgacggtgggacctgtggcgcctgtggtggctcaggcagcagccacctcccccagagctgcagccgcccccagagctggagccacagcagcctccggagctgacactgcagcaggaagagactggagggcacttagggggacactttggggggcacttaggagtggggcacttgggagggcacttgggggtgcacttgggagggggctggcactgctgctggctctgctggcaggacatctcggcggtgggtgttcaggagctgaaggagagtcaaacagcaagttacagccaggcacagaggccacccttattgcctttttaccatcatttatttttgctacatttttaaaacctgttcaaataagtcagagagaaattatctctaaaattgtttgtcagatgctttcacaatgtgttataggatcatcaggatgtttttataaaatagaaatagactatcttattttaacccagcaatataatgaggacatctgtattaacaaacttgcccaaaattaatgtcctttaagtggaaaaggcaatctgacattcacagaatctgactgaagtctacccttctgcaccacttagaattctgaaaatgtccaatctaggagccagtttaaacctgcagttctgctttttaaaaaataagcaagaagaccctatctctaaaaaaaaattagctgggtatggtggcacgcacctgtagtcccaactacttaggaggctgaggctggaggatcgtttgagcccaggaggccaatgctgcagggagccaaggtcatgccactgcactgcagtctgggcaatagaatgacactttgtctcaaaaataaatgaaataaaataataaaataaaaataaagattcccttttgtaggagcttcccagatggctgtatttggttgacacaaacacacaatatattatagtcagaattgcaaagggtcatcatatgagctggctatcccaaatcatattataaatggagaaatgaggtctaaagctaattgtagcaagctgacacgtgaccctagatttcccggtctggtgaatccatgcctagtgaagctccctcttagaacccacagactcctctatctgccaccctggcaaccataaatttcaacttgttacttgctgttcaacactggagcttctgatatacagatgcccaggcaccactcatgactaactcactcctgatgaaggtgtaagggccatgtatctctgtgtttatcaagctccaaatatgcttcctctggtctccggtctccattatttaagaaccactataatcccagtacaggcttcggggaagagacacagttgagttgctaagatctactctctgaaaggaaagtttgttttaacttatctggaatgggagacactaaaaaaaatacagaactaatttggattagagcatgaagcatagacatacaaatcatccaggtgcttcccatctctcctgccccacagcttgaactccatcagaatttctagacattctccacctcttctaatccagctacccctccccaacaaagccctgcccagccttccctcctgccctggtctgggcatccctctgtggaacccctgctccttttcccagtggacgcttaccgaggtcacaggcagcacagggtccttcagcacctcaggaggtgaatggatggggtgctctggccacgagcccttttatcctggcctgggctctgcctccagctgtgagacagggcctgggaatgaaaggatctgtctcctgacacccacatgggtcctgtgacaaggagtgactggcagctccacatctgcctttctccacggggctcaggggagctgttcctagtgtggaatatgacttagaaatggggtgggagtgaattcctaccaccacctggtaccttattctcttagaggtgcctacctctcagttctcgctcttgaaatgtggtcccccaaatgttctccttcttcctctagcaatgtgaatttatgagctccaggcatccaggtttgaacaaagaaacacagaagcctcttagctttttcacatgtgtcccaccacttagccactgggagttgtttacgtgtgtgggtgcctgtgtgtgtgtgcctgtgtgcatgtttctttttttttttctttctttttttttttttttgagacagagtctcgctctgttgccctggctggagtgcagtggcatgatctcggctcactgcgagct

SEQ ID NO: 1125 - DNA, 4001 bp, Homo sapiens
taaaaaagttttgggaaaatgtttgaaacaaaatagatgtttaggctgggggctgtggctcacgtctgtaatcctagcactttggaaggctgaggtgggcaaataacttgaagtcaggagttcaagaccaacctggccaacatggtgaaaccccatctctactaaaaatacaaaaagtagctgggcgtggtggcacacacctgaaatcccagctacctgggaggctgaggcagtagaaatgcttcaacccaggaagtggttgttgcaatgagccgagatggtgccactgcactgcagcctgagcgacagtgagactccaactcaaaaaagaagtttaactattctctccttcataagtttttaattcaaaggaataaatattaaatttgcaatagagaaagctggcagatcaagtggtcaaagttgtatctccaggaatgggacaattagacatcatgtaaggcttgatatcatgctctaaggacaacatcacttttgtaggatatttgcaaaaatgtgtaatctgagcctggtcaagaagaaacatcagagaaacccaaattgaggggcattctacaaaaccaatagttctttaaaaaggtcaatgtcaaggaagacaaagaaagactgaagagccatttcggtttggaggagactgaagaatcatggcaactatgtcaaggcaatggagatcctggattggattttgaaccaacaaaattgtcttttgttataaaggatattagtaggaagattggctaaatttgaacaaggtctgtagatactaacatcttgggagagcctggagatgaggacagagtatgaaaagcaatgaaaaaataacaatcagtcaaggcaaaaaggaatgcatatttctggttttattgtttcacatcaggctgagctatgcaaaaagacaagctgcaaagggatataggtctgtgctttgggcttcccagagcaaccacacatacgcaaactgaggtcattaaatggcttggctttgggggagaagttttgggcctctgaactccaagacagaagaatcctctatgcttgagttgagccctcaccaagacctctcaacaacatgggcaggcccagaaggagaaggaagacggaagggaaatatttggccatttgtgttcttctaggctcaggatccactttagcagcagcctccagagtgctggccactccctcctccacagcagctggagcccccggagggctggctgcagcagccagagctctggggtctgtggcagtgggacctacggcgcctgtggtggctcaggcagcagccacctcccccagaactgcagcaacccccagagctggagccacagcttcccccagagctggagccacagcagcctccggagctgacactgcagcaggaagagactggaggacacttagggggacactttggggggcatctaggggtgaggcacttgggagggcacttggggatgcacttgggagggggctggcactgctgctggttctgctggcaggacatcttggtgcgggtgttcaggagctgagagagagtcagacagcaagttagacccaggtagaggccaccccggcctattcttgccctttcagcatcatttctaatccctacattttgatgaactgcttagtgtagttgtagctaattaatcacgggaagtttcattgtgtctaatagttggctaaacacacttatagcctctgttttgaacctaatgctttttatatacttataaaatcataaagcattttcaactattttataattagaaaaccgaagccaaaagatattaagaaagtattctcaaaatcaagcatgtagtatgtagaggagacattctgcttcaactacacacctgaatcatgaaaacaatctagaaaggggtttggaaataaaattgtttctcaaggggaaacagtcattctctcttggaagaattttctagattaccttgttgtaaggacatagaagttcagaactgcaaaggaagttggaggaaaaatatcattgaattaagtgagaattgtatacaggtttctgacttagtccagtgctctgacatttttcagcagacaaacacctgtactgaatgctcagcacttatattttgtttgtctaccgtacttgtctcaccaagttaaataccattaaatgtgagtttaagagagtcggttagctgtgatatcctctacactggctgggaaccactgtttccatctcatcttttcaggaaaggacaattatatttttcaaggtaaatctccctttctgaaagcagttacaggtgaacatggcaggcaatgttgcaatgccttcagactagagacccaagaactctagatccatctcatttctccagaacaccaagtcaccatcacaggactcctcattctcatgtccctggtctgtccccattgcctttgctcagttttcttgaggctccctccttcactcatatggataccagcaccaccccagccctggaggctctgcctgccctcccctcctgccctgatctaggcatccctttgtggaagcccctgcttcagtacccagggaacacttactgaggtcacaagcagcacaggaggtgagtggttggagtgctctggccctgagcccttttatcctgtcctttgggctcttcctccagcagtgagacagggcctgggcatgagaggacttgcctcctgacacccacataggtcccgtgacaggtggtaactggcagctctgcacatgtctgccttcgtgggtattcaggagagctgctgccagtatggaatatggccacttagaaatagaggtggggtggggaaatccctaccatcatctcctgccttgatctgcctgaagggcacctgcttttaaggttctcacttctcattcttggagctttgaagttttggccctaatactgcccttcttgcctccccggtgttaatgagcccatgcaacctggttcaaaccaaattgtaatatattccttccaattttattctgtacaggttaccctgatacaatatacactatggattacatggttttaactctatagaaatggcatcatacttaagacactcatttttgacttgttctcttccttaaacattgtttttgctagttactcaagttgatctgtatagccatagtttactcatttttacaacggtgtagtatccatcttatgagtgcatcatgatttgttagcttctctcttttggatagacatttagagtgttttcacttttcactgaatcaatattgcagctaaggaaatttttgtgcgtgtctacttgtgtatttgtgggagagtctcaccaagttatgtacctataagtggaactgttgaattttggatcacacccatctctccaaattgctcatactgatttcagtttgcacctatggtgtataagaatcattcttgctgcacattgttcctaaacttcaataattgccattcgatggatgtgcactggtatctgtcggtagtttaatatgtgttcctctgctttgtagtgatcacagcatcttttaatgtatttttggttaattgaggtttcccttctgtgacttgtctgctttttctcgaaaatgtttttcaatttgtttatctccttttgttagtatttgtaaatgttctttacatattctagttactaatgtactgctattaaatgtgttgtgaatatcttttccaaacaaatatgttcttgtttgcattttaatggtgtcatttgatgaactagtgttttatttttaacatagttgaatttctgcaacaataactatattgtttgcaattttcatgattttaataaatctcaaccatttgtaagtttagaaatcttttccctatctttaaaaagttgaaaattttttctttttaaaaatgaaggtttttattcaatcaagaaaggaatttttgtacattttatatattttaaacatttttctgaatggataaccaattgtc

SEQ ID NO: 1126 - DNA, 4001 bp, Homo sapiens
gcttcaggccagttgacataggacagacagagttgggagcaatggtcccttcccactcctgcccccattaaccccaattcactccagagtgccccactgtcccctgaggttccaaggccaccaactgcagaggacaaggtgaagagaacaagagccactcaaggagaatagggtcctcatagaacaagacactgagcagattccttgttttagtcctttaatcagcagatgcacgctgcaaatgacattgagtaagctaggggcttagacagagcgtgggagggtagccacaaaggtgaggtccaaggccagtgaatggagatccaggagaggatctgagtttctggactccagggaaaagatatgctcttggcaagttcagagctttcccttggacctgtgagcctctcaggcaggcctagtaggagaagggggatgtccttggcagtttgcggtcctggattctgctcttctaggctcagggtccacttcagcagcagcctccagagtgctggccactccccccgccacagcagctggagccccccgagggctggctgcagcagccagagctctggggtctgtggcagtgggacctacggcgcctgtggtggctcaggcagcagccacctcccccagaactgcagcatcccccagagctggagccacagctgcccccagagctggagccacagcagcctccggagctgacactgcagcaggaagagacaggagggcacttagggggacactttgggggacactttggggtggggcacttgggagggcacttgggggtgcacttgggagggggctggcactgctgctggctctgctggcaggacatcttggtggcggattcaggagctgaaagagagtcaaacagcaagtcagacctaggcagaggccacccctgcctattcttgtcctttccacattgtttctatttcctttattttgatgaactgttcaaatgtcatggtaaatcattaatcactgaaaattttgttgtttcttgtagtttggcaaatgctctcacactgtatcttttgagttcacaatttcatcttaagacagtcaagaattactatatcttttacaaagaaggaaactgaggcagtaagccatatgaaaaaatatctgtcaagattaaacatttagtaaattaaaggaagcagtttttctcattgtgtcaaataaaaccctgaaactgtccagtgtggaaacctggggatataaacattttcttggaaaaagataatgaaggattatctcttggagtaacttcctaggagactttgtcttgtaaaaacctgcgcatgtacaattgtaaatggttttggagacaggctggtctcacaggctccctttgttaaggaagatgctggagaacagtatttttggtgcatagaggggatctgaactcaggtgccctggctctaggctggtgcactgccatattcatcacgcaacggcctcacagtaacatgttggcacagtgatcctcagcttgctatgtctaactactttaagagattctcaattccaatttgaatctagagataagtgagtttcaaaaagccctaaaagatccattaattatctctactccactgattgagaactactatctccagctcaaatttgcaaggagtgtcacagttttgctctgaaaagtaagtgtcctatttgaagttgttctagcagagtctatttgcctgggcttcaactccctctgtccttaaaactcaactagctgaagcacaaagacagagacatctaattcttatttgtgttaccagttggccctctccctgcctcctgagcacatcctccttcaatctttctgaggtcttgacttctatccagatggatctcagccctcaaggtcctgcccagcctcccctcctgcctagggctgagcaacactctgtggaagccccagcaactattctcaaagaacacttaccggggtcacaggcagcacagggtccttcagcacctcgggaggtgagtggatggagtgctcaggcccagagcccttttatcctggcctgggctctgcctccagctgtgagacagggcctgggcatgagaggacctgccttctgacacccacatgggttctgaggtgggtggtgactggcagctcctcacttgccttcctccatggggctcagaaaagctgctcccagcttggactatggccacttagaaatagaaatggagtgggaaaatccctaccatcatttcctgtgttgttctccgtggagaatacctaatctgtttagtcttggagcttgagttctctgttttgttaactcccaaatcttacctctgtggctctgggcaacctggcttaactcaagtttcatagaatcctccaaccctcaactatcttatagttgtgtgtgtgtgtgtgtgtgagtgtgagagagagagagagagtgtgtgtgtgtgtgtgtgtgtgtgtgtgcgtgtgcttctgtattaaagccattaggtaactggttaaagagtcagacatagagagaaacctgattctgccacttattacctgcatgaccttatgaaaagcattaatacctcatcgttcttgttctcagtttgtcaactctgtaatagagataatataaaaacaattgtccagggatggctgagagtcaatgaaataatgcaaaggaagtttctggtggagagcttataacatgtcattttctctaaacaaatgccaatgcattaatatttttaaattatagctgctttctaaggagagataatagcctccagctccatccatgtttcttcaaaggacatgatcttattcttttttatggctgcatactattccatggtatatgtgtaccacattttctttatctagtctaccattgatgggtatttgggttgattccatgtctttgctattgtgaatagtgctggagtgaacatacacattcatatgtcattatgatagaacaatttatattcatttggataacgctccttcttcaacatccaggctttattccgtgacctatgcatttctaaaacagtgccattcaactgtaacttctttatgagtcttaattttcaaatatgactacagtaaactatccttgattctgcagctttgttcttatatttatgtacccctcaacagtttctacaacagaggtggactccataggtaagcaatttaaaaatgaattgattactattagcatcatctttactttgtgtatgacttaagccatcatcattggaattctcactctgagacatttacattacagtatactagccttatcaccctgcagaagtctgccactgaattacctggctatggctcatgttgttccaaagaatgtatttaataatagagtagtcaagatattgattactcagcttacattggcagttctgatccagaagcccagcccattcattccaaggatgatgaggattagaagctattctgtccatgactctgataccacaaagggtagcacccaaactgtcaattaatctgacatggattgggttaataaggtagcaatatgatgtaacatcatgaggattgtttccttatgtttggtgttagatttcaatagcatttgaaatttattgaatttggtaccattttaatgctaacaatatgcactagcaaaggagtgattttctgaaaatacatttctatgttgtcaggctctcatatcacaagagattggtgggaagaatgctgagacacagtaaaaattaacttagacttagtggattttactctgtgtcccagagccagcaccacacatgactgatttttaatttgcttccttcctctgcaacccctgcatagagcagtaacaataaactgatactccaaaattattagaagaatatacagactatctaattatttctttataagtaattggataaaatatttaagcatgaaaaaacttgataaatctcatcacatagtgaaaggaatactatatgtc

SEQ ID NO: 1127 - DNA, 4001 bp, Homo sapiens
ggagattgttagtggaaggagtggggaacgaggaacacaagagtgaagaggtgacagtgagaaggaggatgaagtcggcctcctggccatgcctgagggatgcggttacataggtgaaaggaaccagaatttgaaagaaaaatatttctcaatgctatttcagtcccttggtttaaaaggaaaacacagaaagaagaaaaaacacaaaacacacagaaatgcaagctttttcctcctgaccccttccccatcctctgtccaccaaggcctcagcagccaccagcagacacaggggagcagaacaaggatgacacaaacaggaaaatcaagcaggctggtagcaaattggggagcagattctggattttatttcttcagttcaggcagcacagaatacagtagcgtgagctggggaggaagtaggtgtgtgctttggagttcccagggcagccatggatctgcagaagaaagtctctaaatgccattaaggagaaagattttgggtttcctgacaccagagcagagggattctccaggcaagacttcaagcttttgctggaacctctcagctattcaggcagaatcagaaggaagaggaagtcaaggtccacttcagcagcagcctccagagtgctggctgctgcccccaccgcagcagctggagccccccgagggctggctgcagcagtcagagctctggggtctgcgacggtgggacctgtggcgcctgtggtggctcaggcagcagccaccacccccagagctgcagcagcccccagagttggagccacagccgcccccagagctggagccacagcagcctccggagctgacactgcagcaggaagagactggagggcacttagggggacatttaggggcggggcacttgggagtgcacttgggagtgcacttgggagggggctggcactgctgctggctctgctggcaggacatctcggtggtgggtgttcaggagctgagggagagtcaaataacaagtcagacccaggcagaggccacctctgcccctgtgacactcttagcacctctcaagtttaaaagcatcatcttcagtagttttatttccaataatttcctcaaaatctcacatcatctttttcaagatatctttggatgtcagacaactgtaaactaagactaaacaatattgcaaaatgcatctaagattctgatgtgttgtcagtggaggaagaaattattacaaatatatcttaagactgaaattgtctaatttatgagtcatttaagagaaaattatttttaaaggagaagaagcagtcattctctctggtcataatttgcaagacgattttactttggaaggtcagcattgtgcaggatcttggagactactaggtcagtaaactcacttcaatagagacagataaacttagcagtttctgcagactagtacttgaaccctgaccccctgatctcaggttggagctcagacttcctcactcaccacctgctcaggctgatgggatgacacggtgggtctcaggcttggtgtgtcctaaccaagctgggaagtttgtgaacaaatctcagacccatgaaaatgtggggttcataaaccccaaagagtctttagtcccatgtccacagctccagttcttcccttgcaggcagagacagggttgtatcttcagaggtgggcttccctcctgtgggctgccagagtggagcaggtctctgtgcttcaaagttcccactctggaacacccacctcatcccagagcagtttgtttcctctagagttcaaaggcacatggcacagcccgccagctcttttcctcttttccttcctgctcccagttagtgccagaccccttttggcccccgccccttcagtcttttctaaactctccacctctgacaacatggccctagccccggaggccctgcccctccttccctcctgctctgttctgagcatccctgctctgttcttaccggagtcacaggcagcacagggttctttagcacctcaggaggtgagtggatggggtggtctggccctgagcccttttatcctggcctgggctctgccccagctgtgagacagggcctgggcatgagaggaccttccttctgacacccacgtgggtcttgtgatggttggtgactgacagctcctcacctgcctctctccccaggctcaaggcagccactcccaggtaggaaagtgcctacttgaaacggggttccaggatgactcctaccatcacctacctcattcacttgaaggctgcttgccctgagagcctctcagttctcagtcttagaacttaggacctatctcatttctgtctcttccgaagtacctgatgctccgtgcagcctgggttgaagttgaagtactaatccctgaggtttccatgcatgtttatttctgtccctgtgcaccaccaaactgtgtggctgtgggtgcagtgtagacatctacacaagtaaaaccctggaagtataacccggcccaggaccaggccctgcgagatgggactgttgaaactatttagcctgtaccattttttaaaccataaagctggaagatgaaaaagaattagttacagaagaattagttggttgtgaaagtcaataaagtaacacaaaaaagagaaaatgtgcctgacagagagactgaaacattgtaggctctgaataagtgaaacattcataacttgctgaatacagaatgaagatactgatctttgtttaacaaacgaagcacagcttttttctaatgagagtgagtctggctgtttggtgatctgtttgcttttaaatagcccttttcttctggtggggtccttgatgtgtcagcactgagatgtgaacaaggaagcagctcattagagaaacaagaagcagcagctctgctctttgtattggtgtgagaatttggacttttctgggttcacactgggagcaccggatgatggtcacagatgagaaacaggaagaaaagagacatggttgtgagacattataagtctacgcttccatgtggggtcaaatggctggcagaaccccgtcctggaccataaggggacgggtgccttttaagaacaagagtccttaatatttaatgtgaatgtgtttatgctgctactttggaagcccctctcctctctctccactagaatcactagctttctacatgtccacaggatttatatgaatggagtgttctgaatttatacatttttaggatattaatgaaatgggctgctgttcattctaggacacactagtcactaagacagccatgactgcaaggttatccacaaattaaactatttcttcagaggaagaccaagaaaagccagattaaaccatatgagggacaagtcctcttcttcccagcccctgacagactctggatatgcccagaacttgggaatgatatctaggtcaaaatggacatggtgaccctaaccaaaacgtggtggagatacatgtatatttataaacacatatacagagcatacatattgagagagatgtatatgtgtgtgtaccacctgtctcagagcatcaattattacagctgcccagactcctgtgataacgtagtatctccaaacactgtagtgtgtctttgattctgttcttttatgacatccaagaaaacatcttccatccctgtacataattaacactaaatcattagtaaagtcttgttcatgattgcacactgtataagggtaaatgtccaaattccttcagtgaaataagactctgtgttctccctttagtttaagcctttgtcatctactctcagaaatgttctgaaactgaactggattatattctgtactttgattatgcttctccctgcagtgcatgccgtggcctctacccttccaggacagtgtggctcaatcccacttttttatttatccttcatgtggcatatcactctaatgagataacagtaaatgctttgatggcctgccttgggtgtttcatac

SEQ ID NO: 1128 - DNA, 4001 bp, Homo sapiens
gagtccagggagattgttagtggaaggagtggggaacgaggaacacaagaatgaagaggtgatagtgggaaggaggatgaagtcggcctcctggccatgcctgagggatgcggttacataggtgaaaggaaccagaatttgaaagaaaaatatttctcaatgctatttcagtcccttggtttaaaaggaaaacaccgaaagaagaaaaaacacaaaacacacagaaatgcaagctttttcctcctgacccctttccccatcctctgtccaccaaggcctcagcagccaccagcagacacaggggagcagaacaaggatgacacaaacaggaaaatcaagcaggctggtagcaagttggggggcagattctggattttatttcttcagttcaggcagcacagaatacagcagcgtgagctggggaggaagtaggtgtgtgctttggagttcccagggcagccatggatctgcagaagaaagtctctaaatgccattaaggagaaagattttgggtttcctgacaccagagcagagggattctccaggcaagacttcaagcttttgctggaacctctcagctattcaggcagaatcagaaggaagaggaagtcaaggtccacttcagcagcagcctccagagtgctggccgctgccccctccacagcagctggagccccctgagggctggctgcagcagtcagagctctggggtctgtgacggtgggacctgtggtgcctgtggtggctcaggcagcagccacctcccccagagctgcagcagcccccagagctggagccacagctgcccccagagctggagccacagcagcctccggagctgacactgcagcaggaagagactggagggcacttagggggacactttggagggcatttgggggtgggacacttgggagggcacttgggagtgcacttgggagggggctggcactgctgctggctctgctggcaggacatctcggcagtaggtacttaggagctgagggagagtcagacagaaaatcagacctaggcagaggccacctctgcccctctgacactcttagcatgacttgtaattatggaaacatcatgtccagtagtttcacttccaatactttccccaaattctctcatcatctctttgcaagctcaggatacccttgtgtgttatctgctacacaaaattgtaaactaagaccaaacaatattacaaaatgcatctgacagtccaaagtgttataagtgaaggaggaaattattccaaatatgtcttcacaccctgaaattatatgatttataggtcatttagggaaaattatttcttaaagagaaaaagtaatcactaccttttgtaacttgcaaggtagttttactctgcaatatccatactacaaaagatcttggatattactggctcagtaaacttactttgttgaagcagagacagacaaacccataaattcctgcagccctggaatttgaaccctggcctcctgatcttaggctggagctcagatttcctcagcttaccacctgctcaggctgatgggtgggcatggtgagtctcaggtttggtgtgtcctaatcaacctgggaaatttgtgaacaaatcccagacccataaaagtgtcggttccataagcccaaaggagcctctggtcccctgtccatggctccagctcttccttgcagacagggacaaggttgtattttcagaggtgggcttccttcctgtggtctgtcagagtgccccaggtctctgtgctttaaggtttcccatcctgagaggactgctccaccctacagcagttttttttggagcccaaaggcacagccaaccagttattctttctgtcccagttgttaccagtctcctcccccatggaagccctgcccaccactcctcctaacctgatctgagcatccctctgtggaatcccctgcttctgttcccagaggacacataccaaagtcacaggcagcacagggtccttcggcacctcaggaagtgagtgaatggggtgctctggccctgagcccttttatcccagcctgggtttctgcctcctgtggtgagacagggcctgggcatgagaggacttgccccctgatacccacgtgggtcctgtgataggtggtgactagcagctcctcacctgcctccctccccaggctgagggcacctgctgctagataggagtagggctgcttagaaacaaagggtggggacagtttatacaggaccttctgccccattcttcctggtaaatcccagccttgaccgctttttagttctcgtttttgcacactggcctgcaattcctttgttctttcttgttgcccatggaactcattggcttctggcagctgagtttggactgtaattcagagattctttcacattttccctcttaagtctaaataatcctccaggctactgggggtcagctaacttctgtctgcagcccaaatctgcctgctgtctgatttggatagcctccaaggtttttaatgcgtttaaattgttgagaaaagaaagcaaaagaggaaaatattttacaacatataaaaattatattaaattcaaatttcaggcttcataaagttttatttctctgacttagataatgagccacatttattattttattgattgtgtctgtggtacttttcacactaaaatggagagctgagtaactgggatagagatgctatggttcccaaagcctaaaacatttaatctcttagagttttaaaaaaaaaaaaaatgctgacccctgatgcattccattatatttaagagcttgcagtcagacaggctagaaaactgccctggttctgccacctagtagctgtgtatacttgtgaaaattacttaacttgactccttttcagtttgttgttcttgtttcttcctcagtttaaaagtacagatagtgatacagatatctcacagggtattgagccagccagtaaaataatataaggaaaaagtctggtagaaggtccgtgacatgatagacccttaaaaaatgtgatgcctacatatgcgtcaataaacgaataggtattttgaagtcatagctgctttccaagatggggggtggggtggggtataaatctgggatttggggttgtttggtttttgtcgattgtttccttttttagtgtttaagacccctttgttctgctaagtatattgatgtctttgactatgaagtaggaatgactgtgaatgtgaatagggaagggatttgtgtggagtagaactctagaactctacatcgctccacgtagagtgaaaaatcccggaatttccaaggaccctttgttgggaaggaggtaagggcacacatggggagatggaaggggagagggggacttggcggaaggccaggcctgaggtgcaggacactgtccaagaaatggtgggagagcctctagaagcttttgcacctcagcagctccctcctcctaggtttccccctattgtctctgcttgaaaagtgttttctttccctctactttcagtagatgaagggaaggggcaagagttcctctctggttcaagtttgtgtacaacaatatggtgagcttttccaacataaaactaattcatgaattagaaaaaggtgtactaaagccagaataaacatgtgaggaaaaaccctctctttcctgtcagtggtagaaatactgggggagcatctaaaattctccagagcctggaccaatataatgcattagtgatatctaggtcacaaggggaagagtgaagctagttcacaagtagttgcaaaatataaatatgtttgtgcatgtgtattgaggtatccaaataatatatacactaaatgtgtgtgtttatataaacatacacacacatcatatattttatagtgactctgtgtgtacatattttcttagctgtttctctgcctttcaccttcttagtttctctctctagctcttcttcattagaactgttctagaaataa

SEQ ID NO: 1129 - DNA, 4001 bp, Homo sapiens
ttgtagtgttaaaatagtgtgaaagtagaggacatattaggcaagcttcctggaaatggaggaggctgactgatattgatccagaatccaaacctcaggaccgacaatcagaaggacttctagaagcacagaggcagggtgtctttcacagagttggacattgtttccaagctcttgacaccagggatgaacacttgtgtgtttgtatgtgtgtgtgtttgggtgtgtgtgtgtttgcatgtgtgtgtctgtaatttatgactccatttgtataggcaatggcaagaacagaaactctttgaggtccatttgcagaagtgagcttaaaggtttatttgtactagagcagtctgcatttttaaagtataagctacatggagtcattttgctatgtttgctgaaggaggggcatggtaaaattctttgggagaatagatggggagagagtgagggtatcaggaagaaggagggtgacagctgagtaggataatgtctgtcttccttaataaccagggttattaagtcaccatcgctccactttggtcctcccttccacatctggccttatgatggagggttgggactgccaatctcatttctctttgctggaggtttcctgaagtctccgccagtaggcggagctagagagaacttgggagactggcagagtgacaaggaccaggcttccttagattcccttagaattctccaagtcaccccaatattacttctcaccccagcaggagcaatttatccctttagcaacagtggttccagtgtgcagtttttcccgctcacaaaaccaaccttgttgggttctcatggagacagaccctagggccagcaccagcttgtgcccctcctcagaagcctgagtccagacacacagggcccctcctctgagctcagggaccccggcacccatgagaagggcccctttcctagaggcctgagtttcaattcgtgggccactgctccaagtttctaagttttgatagtttcaagacactccctttacctgccattggtagcatggtggcaatgacagttaccgcctccatgaactctttttgtcctctattggtcttgtcagttctctgatgccaagtaagcaaatttttatgtaaacttctgtctattaaagtacatctcataattctctttcctgacttgaccctggctgaggcactgaggggcgagggtcagctctggtgaggaccaggagttgaaggagttaagcaagccatgctgcttcaaggcccagataaccgggtgatggagctgagataagacatgcttatccctctgttcacatttacaagcaagagtaatgcagtctagaaaaaggtgatgagcagattatttgttttattgtttcatgcacaatggagattgccaaggaaatcaggggaatgaggcaaggacttctatttggtattcccaggccaggcgcacagatggaatcagaggtcagaagaggaattcttgtgagagggcagatttctggattctaggtcggaggaatcttccaggacagagtttgaaatctttactaaaatgtcccagcaacacagtcagtcccaaggaagatgaagttgcccctttcatgcctctaaatctgctcttttaggcacagggtccacttcagcagcagcctccagagtgctggccactgccccctccgcagcagctggagcccgctgagggctggctgcagcagtcagagctctggggtctgtggcggtgggacctacgccgtctgtggtggctcaggcaacagccgcctcccccagagctgcagcagccaccacccccagagctgcagcagcccccagagctggagccacagcagcctccggagctgacgctgcagcaggaagagacaggagggcacttagggggacactttggggggcacttcggtgtggggcacttgggagggcacttgggagtgcacttgggagggggctggcactgctgctggctctgctggcaagacatctcggtggcgggtgttcaggagctgaaggagggtcagacagcaagttagatggaggcagaggacacccctgcctattcttgtcctttctgcattatttctagatccttcattttgaaagccttatatcaaacataggaaaatcacctctaatgtttttatcactctcaatgtttaccaagtgctttcattcatggattctcatttcaaaccttatttgagatgttgtcatgcaatatataatctccaaatatgtaaataaagtttctgctcattaaaagctcctaagtgtgggagagaagtccaggaaataaattggctccgggccagcattcattctatcacatcaccaagaattctgaaaatgttcaatgttgagaccagtttagagatgaaaatctctttaaggaaaaatcaaaataaatttctattggaagaactgatatatttcagtttgcagaaatagagaaaactataaccgcaaaggatgttggagtcaatttgttccaaccaactcaatatataaataaagaaactgaagccaaaagaggtaacttcactggcccaaagttattcattaacagtcacatttgttccggggtcccctggttcccatcctgggctctgccctttagcacatcctgcctccccaggcctgtccccaggcactgtcacatggcttttaaactccagtgtgcactcagttttccactacagatcttcttgttggcatctaacaagatccacaggtgtctttgatcctttcttcctctaagtagcagtgttctcagcatatcttttctaaaagtgagtatgtctgtatttccaaaattatattcccactatgcagcccactctagcaacatccagtggccaatgtgtttattctctaaaaccagagaaacacactgagcaactgaaaacaatttggttcctctaaatctgtgtcatacagcccttcagatcttaccagttcttcttaatctctctcactccaccccacccctctacctcctctttccaattttctgcccccaccccattccttgccaatcacaattccaggcccctgaggccctgcctagactctactcctgccctggtctgagtatccatcccctccttccctggcctgggcatccctctgtggaagcccctgctcctttttccagggcacacttaccaggatcacaggcagcacagggttcttcagcaccgcaggaggtgagtggatgggatgctctggccctgagcccttttattctgtccttgggtgctgcctccagcggtgagacagagcctgggcatgagaggacctgcctcccgacacccacataggtcttgtgacgagtggtgactggcagttctgcatataccgtccttcattggtgttcaggggagctgctgtcagctaggaaagagcttggtggaaatgggggcttgtggtgggtgaaaatggacatcatggttcctggagtcctccgtggcctatttcctatgaagatggctctcttcacagtcttgtagtcacacttatgaattctgcacaaacaactcatttttccttctattctagatactaattttccatctagacctttgggtccatatagcttggttaaaaatccacatgcctgcattatggggtttgtccatgtgcacatgggcatgtgtgtgcatcatagaagtcgagaaaagaggccttggagaccctggcaaagtattcaatatttttggccattggctttctgatgttttaaatgaagataataagagaaatatcttttctgcaggatttacaaattaattaagataacaaaggggaagtagctgagatagtatgtggcatgtggttataattaggaaatggatgaataggtagatagatagatagatagatagatagatagatagatagaaagaaaaatagaggcaaacctgagattttaatggacattgggaatttttaaagtcacaggtgccttttaagttaggtggctct

SEQ ID NO: 1130 - DNA, 4001 bp, Homo sapiens
ccgtcctaaaattcttttaatatgagtgctgagctgaggagacctgaacctaaggagggctagacccaggctgggctacatgcagcttattttacagctacataagagtggtttttcttttttgtttattttggtttatgttttgtttcatatatattgtttgagagtggtatttctcataattctccttcacaccctccaggcctgatcctttgcagtgaggcaggcgtagcaataaaagtgggacatggcccggacccctgttccatactctgcttcacttagccatggattgagtcacaggaactgagcaggcccatactgaggtgttccttcagccttacactgcttacgtatttatttaacagttgtttcgtggagaggctggaacatgaaagaaagcaagaactggacagactcttcctccctggagagtagttaagtggcaatgagttgtcatttaaacttgcccctaagggttctgattctcataccaagcattttaaatcagatgaaaagaattctgttaaatatacctttttgcttggagtaccaaagatttttctagctttgtcatcatggtatgaagagaaaatgaaaataagttacattcagcatggtgagttaaactgagcaagcagcacatggccagcggttctcagccctggggctgtcagtcccttcaggcccctgcctgggctgagagggtccacatctcacagtctccaagtgcacacaggcagtcccattgagaagccctactgtgaggctgctctttcaggattgaccctctggagactgcttccagcatacctctttctcacactccactcctaccaaagcatccttaaaagtgtacggctggggcactggactttaagggatttgaaaagaatagaagaattgacaatggccagggtacttcacgaagaggcaaaagagctttattgttgtatgaggtaaagtgggaaggtaagatcaggatccaggatgggctcttgggccatgacaacagacaaaacacctcacaaggtgtgtcagcccaaggaaaggagaaaaaggggcaggagaagcatcactctgggacaggtcctggttgcaagtttctccataagggttgctctgtgatgttcgaggtctggtcagcagcagtccccagagctgtggcagcagccagagcccccagaaggttcacactcacaacaatcggggctctggtgccggtgccggtggaagagacggggcctgtggtggctcaggcagcagccgccacccccagagctgcagcagcccccagagctggagccgcagcagcccccagagctgggaccacagcaggaagagactggaggtgggcatggggctgggcactgaggtcggcactttggaggacacttgggtgggcattttggggggcacttgggagggggctggcactgctgctggttttgctggcaggacatctcagtgcgactttttcaacctgaaattcgaaatagtcaaaccctttagctgtgaaaaaccaaggatggcaattttatctcttttaaaactaaatcatatggtgatggtgaataatactcagtgtgtgtatatatatacacatacacacatatatatcaacaagtgaaagaaaacaaatcctgctgaatgaaaatatatacttgaaaatcagatataataagaagcttcttattcttttagaagataggcagtattttctaatcttcatgagcttgaataaagtattcatacccaacaaagtatccatttttgaaatataagaataagcccttgatgaaactgtcagatacacatttctcacagcccaaggcaagatttccagaaactcaagtcagactgtatctcttttctgcatataatagcacagaatcaaagaaataactctctgaagcctcccttaatcttcccattcccctgtgccctctggctcccaggttgccactcaccctggtcacacacaggagcacagacacgtcctggggaagtcagagcagatgaggtgctggagctgaatatgtcttttataggctcaggcttggctctgggaagagcgggaagtggctcttgcacaaccaggcacgtgctgggtcattcctcacattcccctgcctccttgtccctacaatccaaggaagcactgggagctcccaagacctccctctgggaagggggtctaaaggagctttaaccagtcacagccccccccaggctggtccccgtggagctgccaggggattcttaaggagcttgtgcctggacaaaggctcaaagagtgacttctgagaacaccagagatccttgccatagctttcctgtggaagtatgctattccagcttcttcccatccccaagtatagttttccaagccctgcttccacagctaggcaggtttctttgtggcattgagtcagagaccatttccttcctaggatacactcctccccttctgctcagccctcattcctgaccccatgttgctgtgtggcctgcagaaccctgctaggaggattaataagtgaatcaagatggtttcctcagatttggtggtgatgatcattgtgactaaacttcttcacttagaaattaaaatgtctactgtgtaacaaggcagtttttaaaataagccaatagttttttgaattggaatcagaagagctctgtgtttatgagcccagtgacctcaaagactatatatagacaatctaaatcctcaactgtaaaacaggcctattagcaccttcctctctgaattgttggttccatcaagtgaggcttttgcacatgataaggcacaaggaagacacttaaacaatgtcattttttaaaagaacgagggcagtgtgtgagacagaaaaatggacaatattcagtccctgtctttgaaaattttatttaaaaatataggtaggctagcgaaggctctcttaggaatgtacagtgtacattcaggattttgagaagtctaattatttcttgtcaagaaggtgatgggaatcaaatgatttatttaatcttcttagtgaatgacaggagagtaaggaatctgatacaattttggattagatacattcatccattaatcaatttatttcatccatccatccaacatttactgaaaacctactgtatggcataagttagaatacagcttttgaaaaagatagtcccttctttcatatacccttggtctagaaggtaggagtatatggtctttacatttctgtcatactaagagatgccccatctccaatagttttcttttctagtctcagatgtagttccctacccttgagagtgttcaggtcaagagtgaaaaatgttgatatccaaacatagcagttaatcaagaagatactgctttgtcagctcctaggtattcagtgattttctatccaaacacttaggtttatagaggcaaacactgtgtgtgttttgtgacctctaggaattcacaattcagtggatattctgaagacctctgtgaaatttatgtgcataccaaatgagtctattttccaatgagattgttgggacactggatcacctgataatgcctgagggaatgtcatgctaggttcctcattctccttgacaaagatgatagtaaccatgaaggaagagaatgggatgggctgtgcctttatgaatgtgtgtgtatgtgtgtgtgggcagcatgggcatgaaggtgtgcttgcaagtccagggacaagcacagcagcgtggccaagggttggagagaagactccaaagctgatatgtgcctcgttcacaggaagccagtctcagcagacaaaatgtccttccatattttttatgataaaatatggtcagtcactgttagagatcaggcttacagcctttgacaccagtaagaattctagacaatcttggctctatgtccacggatattaagtcaccagagcatgagctcagaatcaggtcttacccattgtttcttttcctggggagtctagcag

SEQ ID NO: 1131 - DNA, 4001 bp, Homo sapiens
aaccatcctggcacttctcccccctcacatctgagggtggctggacaaagaaggttagtattgaaggaggaaacgtctaatcttccctacagtgtcgtgtaccataaattcgttgtattttcaaagtgggacctccatgttttttctaataaatatctccatcactcatcactcacctgcccaacacataggccaagtggcaggacagcatcctgggactcagatctaacactttgaggaactgaagctaggtgtctgaggcagcaagtcaatgggctgatcttaaccagactcaccctccctgagaaggagttcagtgactgtgggctgtactttgcagaaggaagggtctcaacatgcatttcaagcattttatccgactattgattctaacagcagggaagttttgcttcatagagatgtgttcttctccctagagaagaacaagtctacagagcttcccaaccttcccaatgtctggaatacacagaaaattagaacatgtgtctggcttagtggagagaaaggcaaagctgccatagccagaggtgaccctcttcgagctccatccaccctgcatttgagggaatcagttccttggagcagcttttcatgtatcacctactcaggtcctgtccttgacccatgaagagaatttctctgaggccctgacctttggacgacgtttgaaatctcagaagagaagagaacgaccaagacaatttgtgagtcagaaatcagagctttattataacatgaggtaaaggaggaaaacaaaacctgcaattgaggtgctccatcaagtgcaaagttctcccagggaagccccatgagtctttgtggtcgctgtccacccatgaatggaatgagaggaaatggaaagggttaagcatcaggctgtaggaggttcttaaacattctgtccaaagagttcttcttagcccaggtcagcagcagcccccagagctgtggcagcagccagagcccccagaaggttcactctcacagcagtcggggctctggtgccggcgccggtggaagagacggggcctgtggtggctcaggcagcagccaccagccccagagttgcagcagcccccagagctgggaccacagcagcccccagagatgggaccacagcaagaagagactgcaggggaacatggagctgggcactggggcaggcatttagggggacacttaggtggacattttggggtacacttgggaggacacttgggagggggctggcactgctgctggttttgctggcaagacatcctggcagagtttagtcaacctgaaagataataatgaaactctttaaatatttcaaaccaaggatcatattatacctcttctaaaatcaatgcatgtgtagaagaagaatgatatttagatcatacagtcacatcagtaacctgaaagaaacaacttgaatctttcctctaaataaaagcacatacattaaaaaaccaaccgaatgagcttcgtattcttcctttcaggggaagctgagattactctatcctcacaagcctgaatagagtattcacactccatgaagtaccgattcccttaatacaagccctaaggaccagctgcgtgttgcaggacacaccaggaggtcctctggaaaaagattttgcaatgaaacctccagataaaagagcctggcttgaagtatttgccagtttccatggtgtaaatatgcccaacacagcagttttgaagttaccaacatgaagtcactgaacacagaattggaaaagatgtgcacagttagctttccccacctatacgacctccggtaggcctcacagcctcaacagattcgaggcagactgagtcccattcctcctcagtatggcagaacacaagcacacaactctttctccagcctacctccatcctccccatccctctgccttgctcatacccctctggtatcccaggttgccactcaccctggtcacacgcaggagcacagacacgtccctggggagtcagagcagatgaggtgctgaagctggatgtgtcttttatagggcccaggcttggctctggaaagaggaggaggtggcttttgcacaaccaggcacgtgctgggtcattcctgacattctcctgcctcctagtccctgcaatccaaagaggcctcaggagcttccaggactcctctctggggctgcggtctagagaagctttagccagtcagagcctccaccaggtgggaaccctaatgagttaacttaggttacccaagggacccatgcctggacaagatcctgttccctgcatcttttgtattcgtgtcctctgaggaaacatcagttctgagccacagctttccctgaccttgtggaaatgttccattatgactccctccaccctgagcagtttctcttccatgtcctgctgtggatccagccatcccagggggcttctacagccttggctttttctaggcatccctcccttgcctaggctctcagcccttcctcctggcctctgtgtttctgcttttcctccaactcaccatggccagcagattcagtggattaaatctgagttgattctgtggtctagagcaaagaatatgattgagaataaacaattccctctaaaatcaaaacattgcccttagtcggaggaattgtattgaatgtgctactggaatcagaaaacttgcatatgataactgagtgatctctggaaattgctacaacaattatcaacaattgctagagtgtcactatgatactcacaatgagtatcaattctcatatgtaatggccgttataaaccaggtatacttatctcactgagctgtttttaatattaaatgagaagtaagaaagagcttagtgtgacactatgtgcttgatagacccttaataaatatgtgtttaaaagaaaaactaatgccatgtattggatacttacccaggtcttatgtggcattcattgtccatatagaacccttacaagacagtttatttgaaaactcccttaggaagtagacatcatttattgtggcttctgtggagagggaattcctttcctatcatgaagtagagggtcagaaaggggtctacttactcagagttctgattcagggttgcactagacagagttacccattcatttattcacttattttaaacagatatatggaggatgaactttgaaaaccttacgctaaatggaagaagccaaccacaaaagactgcatttcttatgatcctatttatatgaaatgtgtagagtaggcaaatctgtagaactagaaagggaatgaggctttagccagttacagcctctctcaggctggacgcctgaagagctgacttagggcatctgaggaaccagagcctggacaagattctgttccctgtatcgccttttacttttgtgcacatcctctgaggaaatatcagtggcttccaggtactttagcaggctgggagaaattagaaaattacaacaaatggatataggttttctttgtggagtaatgaaaatgttctaaaatttggtggtgattgtccaactctatgaatatattgaaacccactgaattaacactttaaataaatgagctgtataataagtgaattatggctcaatgaagatgttgaaattagaattgaaaaagatagttattcacacctctgattaaaacagaaacagaccgtgccttgacattgcctaatgtttacttggtggtggagggtggttaggtagaaagcatagtttcccattgtctgcttctacctgagggattctattcacctatttacacagtcctattttcagacccgagtcctgttctcagagagcttttacctcaaggataaactaagtccacagtgtgattagagcagtgaattcaaaaggcattctttgaaagcctacaacattcttggagcatgtatgtccaaacatagggatatagaggtgaacaataagtagcccatgacctcaaagactgtagaatt

SEQ ID NO: 1132 - DNA, 4001 bp, Homo sapiens
gatgccccacccatcctggcgcttctcccccctcacattctgagggtggcttggcaaaaaagataagtattgaaggaggaaaggtctattctttcatacagcgttttgtattctttgtattcttatgttccttatattctttgtatcttctaagcaacacttccatgttttttcacttaatatctccatcactcatcactcccctgcccagcacgtgagccaagtggcaggacagcatcctgggactcagatctaacactgtgaggaactgaagccaggtgtccaaggcagcaagtcaaaaggctgatcttaaccagactcatgaaaagaagctgagtgaccatgggctgtactttacaggaggaagggtctcaacatctgtttcaagcattttatccaactattgattctaagggcaggaaagttttgcttcatagggatgtgttcttctccctagagaagaacaagtctgcagagcttcccaaccttcccaacgtctggattacacagaaaattagaacatgtgtctggcttagtggagagaaaggcaaagctaccatagccagaggtgaccctcttggagctccattcactcagcatctgggggaatcagttcctcagagcagcttttcatgtatcacctactcatgtcctgtcctagcctcatgaagaaaattactctgaggccctgacctttggaggacatttgaaatctcagaagagaagagaatgaccaagacatttagtgagtcagagatcagagctttattataacatgaggtaaaggaggaaaagaagacttgcaattggggtgttacatcaagcacgaagttcttccaggaaagccccatgagtctttgtggtctctgccaaccaatgaatggaatgagaggaagtggaaagagtatccatcaggccgtagcaggttcttggccattcagtcccaagagctcttctgtagcccaggtcagcagcagcccccagagctgtggcagcagccagagcccccagaaggttcactctcacagcagtcggggctctggtgccggcgccggtggaagagacggggcctgtggtggctcagggagcagccaccagccccagagctgcagcagcccccagagctgggaccacagcagctcccagagctgggaccacagcaagaagagactgcagggaaacatggagctgggcactgtggtgggcatttggggggacacttaggtggacattttggggtacacttgggaggacacttgggagggggctggcactgctgctggttttgctggcaagacatgctggcaggagtttagtcaacctgaaagataataatgaaactctttaaatatttcaaaccaaggatcatattatacctcttctaaaatcaatgcatgtgtagaagaagaatgatatttagataatacaatcacatcagtaacctgaaagaaacaacttgaatctttcctctagataaaagtacgtagataaaaaatcaacagaatgagcttcttactcttcctttcaggggaaactgcgattgctctatcctcacaagcccgaatagagtattcacagctccctgaagtacctattcctttaatacaagccctaaggacaagctgggtgttgcaggacataccaaggggtcctctggaaaatattttgcaatgaaacctccagataaaagagcctggcttgaagtatttgccagtttccatggtgtaaatatgcccaacacagcagttttgaagttaccaacatgaagtcactgaacacagaattggaaaagatgtgcacagttagctttccccacctatatgagctccggtaggcctcagagcctcaacagattcgaggcaggctgagtcccattcctgctcagtatggcagaacacaagcacacaactctttctccagcctacctccatcctccccatccctctgccttgctcatacccctctggtatcccaggttgccactcaccctggtcacacgcaggagcacagacacgtccctggggagtcagagcagatgagatgctgaagctggatgtgtcttttatagggcccaggcttggctctggaaagagcaggaggtggctcttgcacaaccaggcacacgctgggtcattcctgacattctcctgcctcttagtccctgcaatccaaagaggcctcaggagcttccaggactcctctctggggctgcagtctagagaggctgtagccagtcagagcctccaccaggtgggaaccctaaagagttaacttagggtacccaagggacccacacctggacaagattctgttccctgcatttttttaatgcatgtcctctgaggaaacatcagttctgagccacagctttccctgaccttgtggaaatgttccattatgactccctccaccctgagcagtttctcttccatgtcctgctgtggatccagccatcccagagggcttctacagccttggctttttctaggcatccctcccttgcctaggctctcagcccttcctcctggcctctgtgtttctgcttttcctccgactcaccatggcaagcagattcggtggattaaatctgagttgattctgtcacctaaagcaaggagaatgattgagaataaacaattccctctaaaatctaaacatttccttcagtcagaggacttgtattgaatgtgctactggaatcagaaaacttgcatatgataactgggtaatctctgaaagttgctgtaacaattatcaataattgctagagtattactatgatactcactgtgagtatcagttctcacatataatgcccattataaacctatcagtgagatatacctatctcactgagctgtttgtaatataaagtgagaagcaagaaagagctaagtatgacattttgtgcctgatagacccttaataaatatatgtttaatagaaaaactaatgccatgtattggatacttgccccggtcttatgtgtcattaattgcccatatagagcccttaccctcagagagcttaactccaccagacacttagattatttgaaacctgtcttgggaagtagacatcatttcttggggctcctatgcagagggaactcctttcctaccaggaagtagagggtcagccaggaatctagttattcagagttctgattcagggttgcactagacagagttacccagtcatttattcatttagtttaaacagatacattgagtgtgaaccttgaaaacattacactacgtgaaagaagccagtcacaaaagactgcatattgtatgatgttatttatatgaaatgtgtagagtaggcaaatctctggaaatagaaaggggatgaggctttagccagttacagcctctcccaggctggacccctgaagagctgactcagggcatccgaggaacaagagcctggatgagattctgttccctgtatctccttttatgtttatgcctgtcctctgagaaatatcagtggcttccaggtgctttagcgggctgggagatattgagaagttactgccaatggatacaggttttctttgtgaagtaatgaaaatgttctaaaattatggtggtgattgtccaactctgtgaatatactgaaaaccattgaatttacactttaaacaaatgaactacaaatatgttaattacatctcaataaaggtgttaaaaattagaattgaaaaaaatagatattcacacctctgattaaaacagaaacagactgtgccttcacattgcctaatgcctacttagtgggggaggggaggatgcggagaaagcatagtttcccattgtcagcttctaactgagggattctgttctcctagttatgcaatcctattatcagatctgattcctgctctcaggaagcttttacctgaaggataaagtaagtcaacagtgtggtcagagcagtgaattcaaaaggcattctttgaaagcctacaacgttcttgaatcatgtatgtccaaata

SEQ ID NO: 1133 - DNA, 4001 bp, Homo sapiens
gcatcaagtcaaataaactgactcagtgcagtgggtgatttaaaatgcggagagtacagaatctcagactggttaaacagctgggtgtttgtcttagcagcagtaaggatgaggaggcagatgaacatcttaataagagactccacctctgacagaatctctctgcactgaatccatcatcttcatgtagacacctgtcagcctgaacctaagaagcactagtccttatttccccctgctgtgtcccttttcccttcacactgagaggaagagacgccaggtgtctgagagagcaagtcaagaagtgaatcttaaccagactcaccctcctgggaagggagttcactgaccatgggctgtactttgcaggaggaggggtctcaacattcgtttcaagcattttattcaactattgattcgaacagcagggaagttttgcttcatagagatgtgttcttctccctagagaagaacaagtctacagagcttcccaaccttcccaatgtctggaatacacagaaaattagaacatatgtctggcttagtggggacaaagtcaaagctgccgttgccagaggtgatcatcttggagctccatctaccctgcagttggggtaatcagttcctcggagcagcctttcatgtatcacttgctcatgtcctgtccttgcctcatgaagagaatttctctggggccctgaccgttagaagacattagaaatctcagaagagaagagtatgaccaagacatttaaagagtcagaaatcagagctttattacaatatgaggtaaaggagaaaaagaaggcttccatctggggtgctccatcaagcacaaagttctggggaagccccatgagtctttgtggtccctgtccacccatgagtggaatgaaaggaaggggaaatagttaagcatcaggctgtagcaggtttttgaccattcagtaccagagctcttctgcagcccaggtcagcagcagcccccagagctgtggcagcagccagaggccccagaaggttcactctcacagcaatcggggctctggtgccggcgccggtggaagagacggggcctgtggtggctcaggcagcagccaccacccccagagctgcagcagcccccagagctgggaccacagcagctcccagagctgggaccacagcaggaagagactgcaggggaacatggagctgggcactgtggtgggcatttggggggacacttaggtggacattttggggtacacttgggaggacatttgggagggggctggcactgctgctggttttgctggcaagacatcctggcaggagtttagtcaacctaaaagataataatgaaactctttaaatatttcaaaccaaaggtcataattatgcctcctctaaaatcaatgcatgtgtagaagaagaatgatatttaggtaatacagtcacatcagtaacctgaaagaaacaacttgaatctttcttccagataaaagtacatagattaaaaaatcaacagaatgagcttcatattcttcctttcagagggaagctgggattgctctatcttcacaagcctgaatagagtattcacagctccatgaagtacctgttctcttaatacaagccccagcgcccagatgggtgctgtagacacaccagggatcctctggaaaatgtttagccatgaaaactccaggtaaaagggcctggcctgaagcatttgacaatttccatggtgcaaatctgcccaagatggccaacatgaagtcattgaagacagagttgggaaagatgggcacagttagctattcccttctacgtgagctccagcaagtcccagagcttctagagatttgaggcaaactgagtcctattcctgctcagtatgggagaacacaagcgcacaactatctttctccagcctacctccatcctccccatccctctaccttgctaatacccttctggtatcccaggttgccactcaccctggtcacatgcaaaagcacagacacgtccctggggagtcagagcagatgaggtgctgaagctggatgtgtcttttataggactcagacttggctctgggaagagcaggaggtggctcttgcacaaccaggcacgtgctgggtcattcctgacattctcctgtctcctagtccctgcacccaaagaggcctcgggagcttctaggactcctctctggggctgtggtctagagaggctttagccagtcagagcctccagcaggtgggagccctaaagagttaacttagggaacccaaggcacccatgcctggacatggttctgttccttgcatcttttttattcctgtcctctgaggttacatcagctctgagccacagcattccctgaccttgtggaaatgttccattatgactccctgcaccttgagcagtttgtcttccatgtcctgctgtgcatccagccatcccagggggcttctacagccttggctctttctaggcatccctcccttgactaggctcacagtccttcctctcggcctctgagtttctgcttttcctcagactcatcatgacaagctttcactgaattaaatctgagttgattctgtctcctagagcaaggagaatgattgagaataagcaattccctctaaaatctaaacgtttcctttagtcgaagcaattgtattgaatccattgccggaatcaggaaacttgcatatgataacttggtaacctatagaagtagctagaacaattatcaacaattgctagagtgtcattatgatactcactatgagtatcagttctcatatgtaatggccattataaaccagatatacctatctcactgagctgttttgaatattaaataagaagtaagaaaaaacttggtacaacactatatgcctgatagacccttaataaatatgtgtttcaaagaaaactaatgccatgtgttgggtacttgcccaggtcttatgtgtcattaattgcctgtatagagtccttaccctcagagggtttaattcaatcagacactgagattatttgaaacctctcttgggaagtacacatcatttcttggggctcctatgcagagggaactcctttcctaccaggaagtagagggtcagccaggggtctagttattcagagttctgattcagggttgcactagacagagttacccagtcatttattcatttagtttaaacagatacattgagtgtgaaccttgaaaacattacactaagtgaaagaagccagtcataaaagactgcatattgtatgatgttatttatatgaaatgtgtagagtaggcaaatctctggaaatgaaaggggatgaggctttagccagttacagcctctcccaggctggacccctgaagagctgactcaggacatccgaggaatgggagcctggacgagattctgttccctgtatctccttttatgtttatgcctgtcctctgagaaatatcagtggcttccaggtgctttagcgggctgggagaaattgggaagttactgccaatgaatacaggttttctttgtggagtaatgacaatgttctaaaattgtggtggtgattgtccaactctgtgaatatactgaaaaccattgaatttacactttaaacaagtgaactatacaatatgtgaattacgtctcaataaagatgttaaaattagaattgaaaaaaatattcacacctctgattaaaacagaaacagaccgcgccttcacattgcctaatgcctacttatgggggaggggaggatgcggagaaagtatagtttcccattgtcagcttctaactgagggattctattctcctagttatccaatcctattatcagatctgattcctgctctcagggagcttttacctgaaggataaagtaagtcaacagtgtgaccagggcagtgaattcaaaaggcattctttgaaagcctacaacattcttggatcatgtatgtccaaacatacggatatagaggtgaataata

SEQ ID NO: 1134 - DNA, 4001 bp, Homo sapiens
cttcatttcctccctctgccaggaaaccttctgcccagggactcctggctcttgggtcccattagttcctcttagtcactttagctaggccatcacaggaccatcaaaggtcattttgcaggccagaaacctcacccaacacccacaaatgatactagtgacaatgtctggacacttcactcttgtcagggaaacagggggttaccatccaaaggataagtcccatggacttcccacacacttatgtaacagtccatatcattccagctcataagtggattgctgacttgtcagtcggcatctcaaggatgggaatcatatttcacacatttctgagtcctttgtgtcaacatatatctgaactgtgtcctcaattcctgttgtttgaatgaattaattaatgaataaaatagtatagacaattagttttcaacagtcttgataatcaaggccagatatttgggtgttacagggacttcctggttcccttctatcagaaaacatctgggcatctactgaataattattgaatttcctactgaggggctagagtttgaagagctgttacttggagtagagtccatcactatcatcactctccatgtcccatctcctttttttctgattctaaatcaaagtaggaggagaaaataccttgatcagcaaacattctgagccaattcatccctgcccaaggccctgtttccctgctgcccttaggttagcaaaaacgtgagcttagggtcatagggtcagggtctgagaaagacggtgagggacaaggggagacagataggtagatagagatagatagatagatagatagatagatagatagatagatagatagatagatagaaaacaatgatttactttttcatttcttccagggatcactgagctgagatgtcctgaaaggaaaaactaacagcactgtcagccccctcccaagtgcctaaccctcaagtatccttttggttgtttgctgccagtctatttctgttgtggttccagctctgcaggaagctgctaccggagtcaccatgggcccacagatcccactgacatgcccaacagagcattctggaggctccagttgctgccacagctctgggggctgctgtggtcctgggtcatgaagactacagagtatcagagttggaggaaccagaggaccaaggacctgctcccatctggagcttctcttcttctctgccatctagggctgagctaccaaagtgttttcggaaggatctgaacgggcccagtaagctcattccctttgttttccagagctctgtgtttatttccaactcatgcttctgtccttgaccttgtgaaagactgctcacctcattcccacactaatatacaacccccctaaaagggttttgtgagttgaggggtgtatgacccacttgtgtctgttcctaagataggcctatgtacccaatgtggggcagcccctgtaaggcaaagacgggaacgcactggacagagcttgcaacgagaaagcacagctttattcttcacagcacagggatattaaagaaggagggaaaacactaagaccagcaggataaatcccctgggggagtacttgaaactcatcaaggaacatctcagtaggaaagaggagacaggagcaaagaagcaccaggctagggctggttccagtcattttggcactttcttttctcaaatatttttacttaatctcgtggctcaggtcagcagcagcccgcagaactgtggccacagctggagctcccgccttgctgaccacttcccctgtcacaggagttggagctctggcaacggcaacggtgagacctgcggcatctgtggtgactcaggcagcagctgcgctcggagctgggcccacagcccccagagcttggggcacagctggaggaagctggaggcagacactgtgctgggctctttgcagggcacttgggcggaggctggcactgctgctggttctgctggcaggacatctaggcaggaggtcagggagcctgggcaaaataaaagcaaagcaaaatacgtgtcaatgcaggtttcaggccagggcctcctcatgctttggtttaattgtggatcccttcccctaaactcagtctgccctccagctaagacctggggaaggggaatgcaaacggatctgaagttaaaccggcctgatactgccccttcctccggccctctcccctgcctgggaggcagctgacactcctgggtgggcctctggggctcctgcgcacgccctgcggggcctgtcacacctccggacccgatgcgaacagctccccctgcaggcgtcccgtgaacacaacgcccatgaccctccagggtggcgtctctctggacgcctgtgagcgcagggtgtgaggaggcaacgcatctctgcgcacatgaggaaaagggggttcagaggtcgcagcatcgcggagcccctgaagtggctcgcagacttgtctgtcttcctcactatcccgcccatctcccatcccagtcccagccggccacccaccacagcctctctgccgcctccaccgtgtctgcctcctcccctctccttgttgaagcacagacgtgtttgcgcagccctttcagcccaggtcctctcgccagctggacgctcacctggtttggtggaggcaggagaaggttcttcctgaggtgattgtggactgaggaacccagggcctcagcccttttatcctgggtattatgatgcacagcccaactatgtgtcctcctttgctccccaaagggaggggaagcaccacacactcccaaggaccaggctttcagcatattcttaaggcgcatattttgaggaatgacaaaagggaagcaggaaatctcgatgacggtccaattatccaccgttcaggccctctggctgctgttccacttttttttcttcattcagctcacatgctctgaagccagggtacgtcctttgtggggcctggtaatatggggacaaacagaacacatttctccccttgactagctcacagcttttcagaaggccagatggacaactgagcaattaaatcacatcctatgtgctaagcgacgcagcacaagtgtgcacaaacatggcaggctggggtcactgcctttgggtgtcagtccccattgctttgtggattcctttacataggtgatggaatcagcccctgtgtcctgagatgttggctgcactgagctcactggacctgggttgagtaaggggtggaagaatggagctggggccatggcttgagaggtagtgtcttcagggaatatcatggcatcttaaaggtggcattgggcactgtgggggcagaggggtagagtggagggaggtgcagatggtataaaaatgtgacctccatctgtgggatcaacagaaatcacacttaatgggaaaaaaggggcatccgtttttggctgtctgtgaaatgtgcaaggctgaatttaatcctatatattatgttagtaattcattaaaatttctttgaatttgttgataatgatgaggttgatggggttgtatgcatttcacttaatgaatacctgtgataatgcttgaagtttgtatatgatgaattcataaaaatggaatattatttactatttggttttagttatatcagtgataaatttatcagtgaattcatctctaataatacaatacaatatgccatagcctctaaataaaaaccactgtaatgaattttaaaataatctttattatactatatattcttccaaggaaaataatcacaattgagacaatattaagtttctaataatcatgaatttaaattatattgtaattttaagcaaaatgttattttgatcagagtatatgaaagcctgaagatgcttgttctttggtacaaaatacactgctagaggatattagttccttcttcccctttgcctatcactccactttgaacaaactgcaataccatgcattcttttaagagttctatgag

SEQ ID NO: 1135 - DNA, 4001 bp, Homo sapiens
gtctgttattggtgtataagaatgcttgtgatttttgcacattgattttgtatcctgagactttgctgaagttgcctatcagcttaaggagattttgggctgagacaatggggttttctagatatacaatcatgtcatctgcaaacagggacaatttgactccctcttttgctaattgaatacactttatttccttctcctgcctgattaccctggccagaacttccaacactatgttgaataggagtggtgagagagggcatctctgtcttgtgccagttttcaaagggaatgcttccagtttttgcccattcggtatgatattggctgtgggtttgtcatagatagctcttagattattttgagatacgtcccatcgatacctaatttattgagagtttttagcatgaagtattgttgaattttgtcaaaggccttttctgcatctattgagataatcatatggtttttgtcattggttctgtttatatgctggattatgtttgttgatttgtgtgtgttgaaccagccttgcatcccagggatgaagcccacttgatcatggtggataagctttttgatgtgctgctgggtttggtttgccagtattttattgaggatttttgcatcgatgttcatcagggatattggtctaaaattctcttttttgttgttgttgttgtgtctctgccagactttggtatcaggatgatgctggcctcataaaatgagttagggaggattccctctttttctattgattggaatagtttcagaaggaatggtaccagctcctccttgtacctctggtagaatttggctgtgaatccttctggtcctggacttttttgggttggtaagctattaattattgcctcaattttagagtctgttattggtctattcagagattcaacttcttcctggtttagtcttgggagggtgtatgtgtccagaaattcatccatttcttctagattttctagtttatttgtgtagaggtgtttatagtattctctgatggtagtttgtatttctgtgggatctgtggtgatatcccctttatcattttttattgtgtctatttgattcttctctcttttcttctttattagtcttgctagcggtctaccaattttgttgatcttttctaaaaaccagctcctggattcattgattttttgaagggttttttgtgtctctatttccttcagttctgctctgatcttaggccttttttaagagattttcaccaacctctctcaacacctcccctttctcctacacttctatactcaaatctcccacagggactccctgcatgaagaaaaatatgaacgtttaattttccagccacaagccagtattattctctatgcagggtgtgctagaccttcaggagctgagggaggggagacccactgagcagccttctgtggagcagagtgaaagacaagttagatgcaggtgctgttcagaagctttatttctctgtataatcagacacaagtgataacattgtcaggaggaaaggaggcttccacgatcttggaaaacacatgggtggagccttttggaaaaagcacaattcttccccatgaatgaatggttaattagcatgtctaagaaaggatctaacaagttggggcttttcctttttccttgagatacttgtttcctctaaagtcgcttgtctcagcatcaggaattaggtcagcagcagcctccagagccatagccacagtcggaggcaccatcttgctgaccactgcctctgtcacaggagttggagctctggcgccggcatcggtgggacctgcagcacctgtggtggctcaggcagcagccgccctcagagctggggccaccacagcacccaggtcttggagcacagcaggaggaggctggaggcagacactgtgctgagctctttggggggcacttgggtgaggggcacttgggcagaggctggcactgctgctggttctgctggcaggacatcttggcaggaggtgacagcctggatagataaaaggaaaaggtcaacgcaaaagctccaggctaatgtctcctctacaaatggttttatgaagcccttactcctaataccagttgcttcctgagatatgcacttcaggaataaaaacagaaactgatctcaagtaaaactggcctggtaagacatttccttccatttttccctcttccagaaaagaatgctggtgtcttctaactgggtcccaagtcctcctgtcttcacaaaaacactgatgcaaaagcacctaattgagtaatgattctcagagaatatcactgggcatgtatgcatctcccaggaaaagagtggagagaatgctgagagccagggctctggtgagtcacagactcccatgcaccccaaagaggttccttgctcactgccccttcccctaccctcagctgccctctgaagtcctcttcctgctgtctgtacatctgacacctctgcttcccccttccctagtaaaatctgggcttatcttccccagacacccccagctgagggtcccctgctagatacttgccagatacagaagatgctgaagaggagaaggctgttctctaggaggctgtggatgaggagcccaagataagaggctttttatcttgtgcagggttagagatgcacagaccaggcatgctgctttcacaacaaggggaggtggcagagccaaacactcccatcccaggcctccagcatcttgcttcatgcttgccaagatgcctggcaagagggaaccaggaagtcttgatgacagatctccacgtgtgttggggacctgtcatttcttctcctttcactcattcagtttggatgctttagtttgagctctgcctcttgcactttgagggagaatgtaaagatgcatatgacacatttcctgaccttgagcctttcaaagttaactggactaacatcagagatgtaaacttatgtgtctgatatgatatcatgtgattcgtcctgggtatcccaggatgtctttttttggacatcacttccctattcctctgcatattccccaggggcatggtttgttgagatgtaattggctcctgactcttggggatgttgggtgatctgagactattggaccctgggagtgagatgtattaggtaatgaatggagaatgggacacaagccctgtctggggctgttggggcccttaagagaattaaggtaggattatatgaataagcagacaaaatcattaaggaatatacaatagttgagatcacaagactcatacttaatatgaaaaaggtcaatttgcccatatttagcttcccatgggatatatgatactgattataagcaaataaaatggtccatgagcataaaatatgtaagatagttggtgtgagtcatgaacatgattcgttcaatgtattgttgatgatgaggttagtgatggtagtaacatcatgtgcatcaaatttaatggaacaaaccttataaattctaaggtttctgtaggatgacatataaagtctgatttgtatttttcccatttgattgtataatagttttagacatgaatttttcactgaattcatctctattattataatacctgaactttgctatttgtttctaaaaagttaaagtcagaactataacagaacattaaatttaagttaaatggtaattttaaataacacatgtttatggtaaatgcctgttattgctccctgtacttgatagtttatggcttttagacaacaaactccttatcagagtatgcactttacaacttaccctctttaaaacatggtgggaggtggggggcagaattccatgatttattttgagatatttaagagaaagtgaattgtctctaggaatgtggcttgggaatggaggaagaggaaaaggatcagacctgtcattgactcccctctctgatattcttctgcctgcagaagcctcttgctgaagggatatttttgggcttagccc

SEQ ID NO: 1136 - DNA, 4001 bp, Homo sapiens
ggaaagtacaacaattggagtgccaagagtcacagtaagcacattacaaaaggcatgaccttccatcaaaatccagggaatgtgtgctctttatttgaagaccatgaaaacacagagggaggagtcgttcatctgcttggactcgaaatgaagttctgcaagcatgcatgataatggatgggcttgatgaagatgactttggtatgtgttgctgcttttgaggttgatggtagtgctgggtgcatctcatgtaatggagctgacctgatcatgtctatattttgggtacggagaattgatgcaaactgaatgctattttctctgcgaatttcattttaattgtagataaatttctcattcaattaatctctaatattaaaataagtacctttttctagatatttttcaagataaatcagtcaggctgtaatcaaactttatacatatttaaattaaattataattgtcaacaaaaattaaattatgttcactattggggttataatttttgtcttcttattctgcctgacagcccaccctagcaaactgaaatagtgatgcctgtgggagcataaaggcactgggccgtaggaaagagggtggctctgaatgtggactggggagagggtaggtttaggtattgatattctcagcagcattttcctgcctccagcacatgacccctgtctctgtcttggaagtattttcaggaattatcccttgaactactcttgggtggccactttactcttaatgttaagggtcccttcagtggcctctgtcctgcaaagagacatttaaaagagatagaccaagcactttctcatggtagccagattgtggggctgaatatagctgagtgaccacttttgcttcttaggagtaaaatctgtagtcattgggatacaacaacagaggagtaagttctgaagtttcagaacaccccagaactgtaatggggggccctttctgttcctatggaatgcagcagatgtccacaaatgagtttctccacagccccaaccctgatgcctggcttgggaggctccatacccatcctggtgatggtgcccatcaacctttcctcccctccatgaggggctcccaattcctcgctcctctgtttgtcatcagagcaaaaactacacaggtctgaggctgagcaggtgtcctgtgatgacagagggttggctgggagaacacagcccagttacttgcccgagcatgaggtcagctctctggggtcacctctaccaggggtaacacacttaaatctctggctttctaaggtcctgcgagttcgggtgacaggagaacctggcctggatggataaatcctggatagtttcctaacaagtgagacaccgtggtaatgagaacaagaagctttattttttggcagggttaggcacagggaactgccaatccttggcaggggcagggatgagggaactgtgagatcctatacaccagacaggaagcaccttctggggacagcttggatactcaacaggaacacccccagctcagcttgtgaaagccagaacaaggtatctggaaaagcatgcatcaggatggagcttttcctgggcctttgggatccttgtttcctccaaagatcacttgtctcatcatcaggatccaggtcagcagcagcccccagagccatggccacggcaggagcccccgccttgctgaccactgcccctgtcacaggagttggatctctggcgccggcattgatgggacctgaagtgcctgtggtggctcaggcagcagccactttcagaactggggccacagcccccggagcttagagcacagtcagaagagggtggaggcagacactgtgctgggctctttgggggacacttgggtgagggacaactgggagggggctggcactgctgctggttttgctggcaggacatctttgcaggaatgcaggaattttaccttgaacagaataatagaaacatttgagcacagaaccctcagaccatctccttatttttgggtttgtcacacactgacccccttgatgaagccactttctaagccaagatctgtaggagagaaatgggaatgtagtagagggaaccctacacatgcatttggataaagcaaccttaaaaatataaaatggatctatgtgcattcctgacaacatgctccaaacaagaatgtgaaggaatcctaaggtcctgcgggttttgcagctcacgggtccctgacatgtgctttagaggctccttattctccatcacctcccccactgctgcccactgtgggcttctttctgatggttccatttcagttctgggcctctctttcccaaacactcccagctgaggatctgtcccctgctggccactcaccagatgcagaggaggtaggagaagaaggctgctcctaaggatgctgtggatgagaagcccagggtaggagcccttttatcccgtgcagtgtacacgatgatgcacaacctgagtatgctgctgttttcacaaccagggaggtgacagcaccagacacttcccagttgcctgctgcctcagcatgtgcctaaaggtgtaataagatgacccctgtgtcttcctgggcacatgcctaaagatttaataagatggaagcaggatgtcctcgtgactgcagaagtacttcccactctggtccaccctgtacctcctgcccacctctgcttgttcattccaagctctgttcgttttacttctttcaacagtagtagtatggagatgtatcggacatatttcttccattgagcaccttacagcctaaatggactatcactcagaaaagtaaatatatttgatctgacagaataagcactatcacagaagtgtttaaaaagacttcaagcctaagaccacagcctttgtaagtcagtcctctattgcactgatggtcccaaagggtgatggttttcaggtgttctccaggaatgacagctggacacacttaccattttttgtaataagaccactcaaagtctactcttttagaaattttcaaaaatacaatacattgttatagtcatcatgctgtacaataaatctcctgaatttattactccggtcttattgaaattttgtatcctttgaccaacatctccccagttcttccccactccccaacccaacccctgataatgatcatttctacttccacgcactcgactttttaggattccacataaaagtgagatcacgaatatttgtctttctatatctggcttattttacttagcataatatctttcaggtttatacatgttgtcacaaattagaaacttccctttttatataaggctgagttgtattccattacacttatataacatgttttttaatccatttacccactaaaggacacttaggttgattctatatcttgactgtagtaaacaatgctgcaataaatttgggagtgcagatatctcttcaaaatactgatttcatttcctttagctatatacccagtagtgggattgttgaatcacatagtagtttcatttttaattttttaaggaaacttcacactgttttccacaatggccatactactttactttcccactaatactgtaaaaaggttcccttttctccaaatctttgccaatacttgttatttcttgtcttttgataatagccattctagcagatgtgaggtgatattgtgtttttaacttgcatttccctgattattagcgatgttgagcacatttttatatatactgtaggccatttgtatggcttcttttgggaaactccctgtgcccacttttttgattggtttatgtgttttcttgctactgagttgtttgagtttctaaaatattttgaatattaactccttatcagatgtgtagttcacagatattttatcacatactgtatgttgtctcttcactccattaactgtttgctttattttgcagaagctttttactttgatgcaaccacatttgtctattttttatt

SEQ ID NO: 1137 - DNA, 4001 bp, Homo sapiens
tcactcttgttgcccaggctggagtgcagtggtacaacaggctcactgcaacctctgcctcccaggttcaagcaattctcctgcctcagcctcctgagtagctgggattacaggcatctgccactatgccaagctattttttttttttgtatttttagtagagactaaccatataacatgtggtttcatcatgttggtcaggcagtctcaaactcctgacctcaggtaatccacttgcctcagcctcccaaagtgctaggattacagacagctgaggccatgtttttctttacccatcttttaattgtagtctaaaggttttcagccttgcaattattggacttcttggggcagataattctccactgtggggctgttctatgcttagtaggaggcttagctgcatccctggcctctacccactagatgccagaaattctctttctacctctaagttttgacaacaaaaaatgtcccttggagagtcaaatttacccctttagaagaaatgctaattctgcctatttttttgataattgcctgctacatcttcactgttttgtaatagagatgtcagaaacatctagtagctagctcctcctacgactggggagtccattatgagaggacaatcacatttcagtcattcttttctgacagttagaggcctcactacaacccctctcatcacatcctgtcccccactgccgcacaattccagcagaaaaggactcgacagattcctgaattttgcagacctagagctagaattctgcatcttccctgtggtggtgctggatgtcaggggcagacaggagggcacacttccagccccacctagggagagacagagtgaaatgccaagggagacaccagtggtaatgaggacaaggagctttattttttgatgaggtcaggcacaagcactgccaatccttcacaggtacaggggtaagggaacatgtgacatcctggacatcagacaggaagtgccttctggggagagctcagaccttccacaggaaaacccctagctcagcctgtgaaagccagaagagggtatctgggaactcatgcatcaagatggggttttcctgggcccttgggattcttgtttcctccaaaatcgcttgtctcagcatcaggatccaggtcagcagcagcctccagagccatggccgcagccagagcccccgccttgctgaccactgcccctgtcacaggagttgggcctctggcgccggcatcggtggtggcgcctgtggtggttcaggaagcagccgccctcggagctagggccacagcccccagagcttggggcacagccagaggaagctggaggcagacactgtactgggctctttgggggacacttgggtgagggacacttgggtgggggttggcactgctgctggttctgctggcaggacatcttggcaggagttgagttgtcctggacaaaacaaagccatttgttagtccaaaatctacagtccaatgtctctaagaccagcggcctcctgaggcaagagctgcaggaaggtgagggaagctgatgtggagttggtgggacatgccagatgcctctcactttgttctccaccagggacagattgctgtgagtctaagtgggcatccatgtttctgtttctccaaagagcctctaggaatgtacccttttgacaaaaggcattctggagaatggagatcataggaaacatgtgccagcctgagtagaaagaggatgggaaggaatcataagcttctgtggcctttgcaggtcatggaattgctgtcagttcctgcagggtctccctcctggccccagttcccacattggtaccctctctgccatcctctctccgggcttttgtttcagatctctccatttccctctcctgctatgaccttagttttctgttccaacatcccaagttgagtcccatcccctgctggacactcaccaggtgcagaggaggcaggagaaggctgttcctgaggagacggtggatgaggagcccagggcaggagtgcttttatcttgtgcacggtgtgtgatgcacagcctgggcatgctgctgctttcacaaccaggggaggtgtcaacaaggcacacgcccaagactaggtttgtagctttggcacttccataatatccaaccaatgacattgaacctggaagcaggatcactgtccacatacctctcacctgggaggctaccactgcttcttttcttcctcccttcttccttgtttcaactcacgtgctgtggagcacagtctgtcctttacaatttcctgggaattagtatgacataattctttcttgagtcatgactggagaaataatagtcatttcaacaaatagagatgaaataattggacgtccatatgtaaaagaaatcatacctaatgctagatataaaaattaatagatcataatttaaaaaattaaactatgaaacttctgcaataaaacataataaatctttgtgactttgggttatgcaaaatttttcagatatgccaaaaaggtacaattcaaaaaagaaatataggacttcatcaaaattaaaaacttctgcttttcaaaaggcactgctaggcaaatgcaaagaaaattcacagacttggagacaatattgtaaaacacaaatcttaccaaggacttggttcaagaattttttttttatttttattttttgagacggagtcttgctctgtcgtccagactgaagtgcagtggcgcgatcttggctcactgcaagctctgcctcccgggttctcgccattctccctgctcagcctcccaagcagctgggtctacaggcgcctgccaccacacccagctaatttttttgtatttttagtagagatggggtttcactgtgttagccaggatggtctctatctcctgacctgtgatccacccgcctcggcctcccaaagtggtgggattacagagccactgtgcccggccaatgttttttaaattctcaaaaataggtaataacacagaaaatatgggcaaagtatttgaagagtcattttaacaaagaagatatatgggtggcagttaagcacatgaaaagatactcaacctaatcagtcattagagaaatgcaatttaaaagcaaagtgagataccactctatacacattggaatggctaaaatgaaataaatgacaatatcaagtaatatgagggatgtagaacaacaagaagcccaagtcattgctggtagaaatgcaaaattacattagttggcagtctatcaaaaaaattaaacatacaacttacaatttgccccagaaatcctattcttagatatttagccaaaagaaatatagttgtatgttcacagaaaaacctgtagcccaacatttatagtggctttattcataactgccctgaatttgaagaaccccacaagatcttcaactgatgaatagagttttaaaaatggtatatttatgcaatggaaggctacttagcaataaaaaaggaatcaactactgatatataaaacaacagggatgaatctcaaatgcaaaagaagtcagactttacatactacatattatataattttaattatagggcattcttgaaaaggcaaaattataagaactgaaaataggtcagtggttgccaagggctggtatgagggagaggctgatttaataagcagatgagggaatattttgaggtgatagaactgttgtatgtcttagttgttgtggggtttacctgactatatatgttagttaaagctcatagaattggataattaaatggatgatattttggtatacaaaatctcaagaaatgaaacttaaaatagaaaaaacaattaaaataacaatttttagaaataaaaaataatgaaatataccaaaagggaagcaaagaatgatgaatacaagatttaggatcatggttatattagatgggacaggcagggacatgggtgaaggctgaattacacaggtgcatataa

SEQ ID NO: 1138 - DNA, 4001 bp, Homo sapiens
tccacctgctctacttagccctcacatcaacttctcttagtatttgtaatttgactgtagctctacgtgacacttctctggttttctggtagtcaaagtgagatgttactcttagttcacataaaaaaacattccttcaaccccaggagcatctcagtctcacaatttaggccaaaacatgtgactccattgaagttgtaacttccatgtgttgatgtcaaggtcgtgtagttacaaaattaataatttgttgcttctttggtatatctatttataattccaggaacacttctcattttctgcctttttctttttcctaaaattctcattttgcacattccaataatctcattgagtaaactcccagccacatctctgctccattatctcattaatttaagcacctctctcagctttcatctctctccctggattttcagtcactgagttatacttcttcccaaggcttacatctcttccctccatcttttgattctgcttctcttctgcctattttctgcttttttgccttttgatttccggtttcttagttagcactccagaaacagctcatcaaaacaaactagtggtcttctgtcatacactggaaattccccaattgtattaatgtcctctcagattttacaggaaaagtcaatttttgcactgataccctctttgagtttgaggttgagtttcagggcctcaaaccagcacaacctgtgtcgttctctccctcccactacaacataaaactctccccttcccttccatcagtggagcggggtcggatccactatgttttcctggtgcagagataaggtttggctcctgagctgggttgtactgaccaaagagctgaggagagagactgtgaaatgcccagtgggacgctggtggtaatgaggacaaggaactttatcttttttacgaggttgggcacaagcactgccaatccttggcaggtacaggggtagggggacatatgacatcctgtacataaaacaagaagtgccttctggggagagctcagatcccccacaggaaaacctccagctcagcctgtgaaagtcagaagagggtatatgggaaggcatgcgtcagatggggctgttcttggcctcttgggattcttgtttcctccaaagatcgcttgtctcagcatcaggatctggatcagcagcagcccccagaaccgtggcagcagccagagcccccgccttgctgaccactgcccctgtcacaggagttggacctctggcgccggcatcggtggtggcgcctgtggtggttcaggaagcagccgccctcggagctagggccacagcccccagagcttggggcacagccagaggaagctggaggcagacactgtactgggttctttgggggacacttgggtgaggggcacttgggtgggggttggcactgcttctggttctgctggcaggacatcttggcaggagttgagatgtcctggagaaaacgaagccacttcttagttcaaaatctacagtccaacgtctctaagaccagctgcctcctgaggcaagagctgcaagagggtgagggaagctgatgtggagctggtgggatatgccagatacttctcacattgctctccacccgggacagattgctgtgagtctaagtgggcacgtgtgtttctgtttctccaaagaacccctagggaatgcacccttttgggaaaaagaattctgtagaatggatgttacaggaaatgtgcctgcctgagtagaaagaggatgggagggaattgtgagctctgtggcctttgcaggtcatggaattgctgtcagttcctgcagggtctccctcctgcccccttcccccattgctgccctctcacagtcctgtatctgggtctttgtttcaaacctctctgtttccatctcttctgctatggccttagctttctgttctaacatcccatatcaagccctgtcccctgctgaatacttaccaggtgcagagaggcaggagaaggctgttcctgaggagactgtggaggagcccagggcaggagtgcttttatcctgtgcagggtgtgtgatgcacaggctgggcatgctgctgctttcacaaccaggggaggtgacagccaggcacacccttgagactatccattcatcaccttcctgtgtactcaccaagatgcctgacaagagggaaccaggaaggtctgacgcctgtttaccttcacctcattcaggcctgctgggggttgcaatcctaccttccttgaagcaattgtttttatcaccactcattagtagtcactccttattccacattgcccctctggcaactagtaatcaattttttgcctgtatggacttgcctattctggacacttcatataaatagaatcatataatatatggcattttgcattagcttctttcacttaatatattgtttaagatttatccatgctgtagcatgtgtcagaactccattcttctttatggttgagtaatatttcactttatgaatttagcacgttttatttaaccattcatcaagtgatggacatttgagttagctccaatttttggttattgtgaataatgcagctacaaacttaatctttattatttccttcctcctgctttatgtttagtttcttctttttttcagtgttttaaggcagaaggttaggtaattgatttgagatttttcttcttccttaatgtaggcatttgcagccatgtatttccctgtaagcatttcctttgctgtatcccataatttttggtatgttgtatttttattttcattcatctcaaagtattttctaattctccttgtgatttctttctgaactcattggttgcttaagacatttctgaattttccagttttccttctgttattgatttctagtttcattctcctgtggttacggatgatactttgtatgatttcagtgttttaaaatttaatgatacttcttttatgacccaacaaatggtctaccctgcagaatgttccatgtgcaattgagaaaaatgtgtattctgctattgtggttggagtgttcaacaagatgtctgttagatttaattggtttatagtgttgttaaagtcttcagtttgttgattttcttcctagttgttcttccattaatgaaagtggagtatgaaagcttcaagtattattgttaaattgtttatgagttgtctgtttctcccttcaattttgttagtctttgttacatgtaatatgggactccattgttaggtgcatatatatgtataataattatttctttaatagatatggatccttttgtcattataaaatgtcctctttgtctctgccattaatttcgtcttaaagtctatttcgtccagtattgtatagccactccagatctcttgattaccattgcatggtgtatgtttttctaccttttactttgaatctattttgtctttgagcctaaaatgtgtgtcttatagatagcatatagttagttcatgctattttatccattttgccagtcttagccttttgattggggtatttaatctattcacaattaatgtaattactattaaggtagaatttatgtctaccatttactatttatttcctatatatttcataactttctttgcccctctttttcttcactatggctttgttttttattgaacaggcattttctagtatacccttttaatttcaatgttatatattttagtatattttttgagttattttcttagtggtttccttgggagttcttattaacatcttaacttacagtgattataactcagatcaataccaacttaattttgatagcacgcaaagctttgctcctgtgtaggtttgttccctcccccttctgtatactgttattgtcatataaatcatatctttacattagaaggccatcaatgcagttctataagtatttctttatgcagttgtctttcagatcaaattggagaaaaaagacttaaaagca

SEQ ID NO: 1139 - DNA, 4001 bp, Homo sapiens
ccacaccagcccctgacttccaaagccaccagcctccaccctttcccccatcctaatacatcattctggggactagtggaccagaatttcaaagagtgatcttggagctgtcacacgtgggtgctctctgtgacagtacagcaaggatgacagttttgtttccagtgctctcctgagccagcacagccatttggcaagtcctacgtcctgccccaaattcttccagatctctgggtaatccctaagtaccacttttacttattcagcccctccaagacttttctaacaaattccctgcattaaatctttctgtgtttaaactagctagaatgtggctagaatggtctctgttttcatgaccagacactgacatcctgaagcacatacattatatacattacatataataaatagtttatagtataatcttcttcagggataaggtgagaggcatttaacaatcaaagggaaataaatatgtaatttcaattagtagtaagtgcaagaacaacagcaggaacaacaacaaaccaagtttatttcaacagcagtctgcaaaggcccaagggtgcatgctagtgcccacctcagtctgcactttctcccaatgaaattgtttgaacttcctgcatgaccacaaggctaagacaggtctgcaacttgtgacctaccattaccaatgtgtctgcctcagagaaagtcctaagtcagcagagctctgtaacaagaggctccttacctttgggacacagtggagaggacaagggaaatagtacttcattgaattccaattctgacttttggatactgtaaataggcttcttaaagaaagaaacctgggtttcaatagaactttatttaaccagactcttgcatgtgcacaacacaattaataagaacagctacaaaaattattacacttttctacatggttcccaagtggatgtgatgctattctgctttcttaatattaatcctttaaacacacacacacacacacacacacacacacacacacacacacacacacacagagagagagagacagagagaaagagaatattgctttagaaaatgtatggagcagtaagtacatttttttaacttaagtaaattagatttttctgtccaaacaactttactgacttggctatttcaccactaatttttttttaaatttaagttaggtttatcttggaattctaatcaatccttatttattgttttcacaaatactgcagaattttagattttcgtgaaggtatgtgtacacaaataagtaattcattaaagtttaattggttgatttttctctatttcagtaaaagctataaatctatctttctatctaggaaaaggattgggatttaggtaaaagtgaagaaaagtggaataaaaaccaccatcaaactgggactagaaaattacttgaaagtaaatttactgttgcaaagcacatcagaaaatttttcaataatctgagaaatataaatattgacataaagctaaaataatgcaaatccaaggcctgaagttgatgagacgcaaacctgcatgtttattcaattgatggggctacagaaaggaaaggcaagagagtgaaggaggtaaaacaccaggctgcaatgggtccttcgcccactaattcctttggtgctgctcctggtccaggtcagcaacagccccctccagagcagcagccagaacccccagactgctggccactgccactgccatagcaattggagctcttgggtctgtggcagtgggacctatggtgtctgtggtggctcaggcagcagccacctccctcagagctgcagcaaccacagcccccagagctggagccacagcaggaagagattggaggtgggcatgaggatgcacactttgagggacattttgggggatacttggggataggacacttgggagggggctggcactgctgttggttctgctggcaggacatcttggtgggatttcgataaacctgaatgacaaaatagaaacatatacagaaacttaatatcaagagccattacatttttttttattttaaaatcctcccccaaggtgatgaagaggaatatctaaaatatggacatgtatagaaacctctttcagacaaagagtatatcttcattacttttgtacccctagagctttcaaaaattcttagtatttgttaggtggttaataagtgacttctgagctaataaagccagcaaaatttgaatgccatctcaaagacatgttaaatacattgcaattctacccacatgaatttatctagaaatggaattcagaaattcgtagaaaatctgtttaataaataataataaatttgagatctgcacggttagagaaaagcttccttcagagcaatgggcttaggaccagcaggccaaccattggtagggatgtagcaatcccaggtcattcatcatcttcctgtctgatcacagggataatccttcccaggttggttcctgctttgtccagagccaactactacttctggccttctggccttgtccaccatgtcatcctcctcctactccacgcttcactgttcgacttccagaattactctccatctccatcttcatcccgctagcgtccccctctggattcctatagaaacactcaccgtgggttcagacgcagcaacagatacgtcccttaggaagcagagcagatgagaagccagcagcaggaacacactttgtatggatcctggggctgggcctcggatgagccatgctaatggcaggagcaggacgtggctgttgcacaagtgtggggtcatgcctgacattctcctgcctcctggtttcatctcttcctgagctggatgatgagcttcccagatagcctcttcggcactagtgggagagggggtgactatatgagactttctgtaaatcagacccttttcccaggctaaggtctcaatgtacagcaaacagaggggtttaaggctatgggtacttacctttcaagcctccctctgaacacgctttgctcagtccctcaggaagaactttggcaccaaaggctccaagactgccccacatttagcccctaacatattccagccaaatttcagccagaggctctgggcctttcccaggtcagtcaatcctgagaggctggtttggtgccataggcctccttactcttttagagagtatctcccatgcttttagaccaggccaagtccccagtcctaactgtggagagagatgcccctcggtcagccactcttctctttagaatttctcttctatgaacccttcagcctggaattcaaaggctatcatatttgactacttctatttgggttaccaaggaatgtgtcaccatcaaggggccttttgagtaggagtttctgagtttttctgttgtgtgttgtgtatgtgattctgctgcatttaagtagctcatgagcacagatcagagacttgagacttttaccaattcaggaaccttttgtggaagtatctgtctgtcaactacacacacacacacacacacaagttgcatttattgcaaccattttttaaaaaaaggactgattttttttcttcaacaaacatataagaagatcattatgaggaaaatatttttcccatcatagaaaaaactcttcccttttacccatcaaaacactctaaaccaacaagaaaaagaaatttggtgtgtgttgctctaattctcaaaaggtttatataggatacaactcttcatgcaacccattaagattgatttatttctccttatgtatatcatatatgttatacgtatatacacatataatcacgaggtacttctggaaatacctactatgcaaaatagatgtctaacaatgacaaaagttagctgatattaatgaacatgaagacattgataatgatgacaaggaagatgactaaacccccagcctatatttcctctctgtaaagacagaaattacctacttttatagtaatttctgc

SEQ ID NO: 1140 - DNA, 4001 bp, Homo sapiens
cactgcacacacacacacacacacacacacacacacacacacgtacgtcccaaccacatagagacagtctttgcaaagaagggtgtctttctcagttctttacccagattcaaatccaggatttcagcatgcagggaaaatgtgctcagacgtttcatatctgcctccaaaactcactcactgcccacccagctctccctctagccaactgatggaaacacctgagcttataataatcagaaaagtaaagagtgtccatttattagagcccaggatgagcacttcaggcaatcttattccccatgaatggggacaagcaatttttcaaactgtgacccatgcttgaaggaaaccctctcagaacctgaaccttttgagtacaaccatcctcttctcttcaaacccattcctggctctcctcatacaatcttgtgtctggcgtaatggtctcagacattattctttccttcaagcttaaagttccagaatccagtgcatagaaggaaatattgttttccagaggcctaagtagcttcactgccaaaatgtgcttcctaaacaagtttgtaaagtgttcgcttgcatttaagagaagggaagggaagatggcttgatgcagcaggtagggagtgggagaggcaaacaatgaaatcaggaggcagtgatatcaggaataaaaagctttattgttacagagaaaatagcttcataactgaattacaacacctagttctccaaagagctatgtctgagagggaaagccaggccagaaaatatcacaagctagacttcaaccctacaatggagtgaacatgggcaggataaagaggggaacttaaggcatttccgaagtccttccatgggaaatgagagaaaagaagcctcaggctgacacacatcttcagcacctgggatctgccagtccttctcctccgtgctcctcatggcccaggtcagcagcagcctccagagctgtggcagcagccagagcccccagagctgtggcagcagctggagcccccagactgctggccactgccactgccacagcagctggaactctgaggtcggcgtcggagggactggcggggcctgtggtggctcaggcagcagccaccaccctcagagctgcagcagcccccagagctggaaccacagcaggaagagactggaggtgggcatggggctgaacactggggagggcattttgggggacacttgggaggacacttaggagtacacttgggagggcatttaggggtacatttgggaggaggctggcactgctgctggctctgctggcaggacatctctgtagaagctgaataaagctgaaagacaatacaagcccaaggtcacttccttgcccttaaaattgaactataatttcacaagattttatctctaagatgaccagaatttattattatgattattattattatttgggatggagtctcactctgtcactcaggctggagtgcagtggtgctatctcggctcactgcaacctccacctcccggattcaagtgattctcctgcctcagacaggtgtgcaccaccacacccagctaatttttgtgtttttagtagagacgggatttcagcatgttggtcagtctcgaactcctgacctcttgacccgcccacctcagcctcccaaagtgctgggattacaggcatgagccactactcctggcctaagatgaaccagattttaaaaacccagtctcccaagaccagtaacaagaatgatacaaatgatttccacctagtaactccatattttcaaatgaataacttggaacttcagaaaggcatcagtccttcattccttttacctaccttccaccctccccttccagaagaaccttcccctccaaaatccttctttatccttgtctttcttcaagaatggcctcaacctccacccaggggctctttctgcccaaaacaccagcaccaagagttcatcctggtcctgagaagcactctacctggttcaggcactgcagcagatcactcaggagacaggtagactgaggtgctgtcagaagcttctgccttttatacaattcagtcctgacctagcatcaggaggtgcagaccatgtgcgggacgctagaagcatctttcataaaggcatgggtgactccctcccctcgcatcccagggacccagttcctccctgcataagcatctcaagtattaacccacaggaagatcccctgagaactgcaggcctctaggatggtgagggagctctgtgaattgcacatggcacctatctatctcacaggcagctctgctatgccttctattttctgagctgggccaatacggctctacacctctggaatgaacagaagttctgttttctctttggtataggaactgaaggagaaaattcccaagatggaaattaaatggccctttttagaataataatagagatccaaaataaaattgtaggcccaagcaaataatctaacatgatttttttttcatttctagatgatgccataaccagaacaaggaaggtttgatatctcagtgatgttattttaggcagatctaatgctgacagtgtgggtggttgggcttctctccttgcctgaatttgatgctccaaaactgctcacaaacagtaccgattcagcactaacaatgcctttaaaagggcagaagtctaggaatggcttatttactcgtgttaaagaaggtgcccttggccagctcgaggtgaggcagcaaagaccaggtgtatactgagggtggagcaaaagctctccactcatctggaggtttccagaagtgaggcaccagttctggtcattcataagagaagagcatccaacctgggaaggacctcaggagaagattaatctttggatggagaggtgaagaggaggagtatataggttttaaaagcccatggtgggatccaaaacattttctcagcaaacaatattctgagggaaagttgggtccccaggatagttatcaaaattgacttagctggaaagggtggccaaaatatggcatattcacaatgaaagctgcagtgagagaaaataagactgggagaaaaaggcagtaccttagctccatgctctttgaaatgggctgcagtgagaagcatcagcccagttataacacagaccctggagagggacatccagcatcagttcccacccttgctctctccacctgtgcaacctctggcaagttacttaaccatcactggaaaagggggctgaaaacattcctaatccactgaataaagaaatacagatgaagttcttagcacagttcctagaactgcaagtttaaaaaagaaaaaactaatcactatggctatccttatttccatgagaaaatatatgctaaatttcaaattactgacctgccaattttgaaaccaaaactaatttttatgatatcagaacttagactcgatgttttcttacagcaaaatattaagagtatttgcttgtcactagggaatgagattataaagaaagcatactcattatttaaaaacaccaaaaaataggaagaattttaaaatcacctataatcccatccctaaaatatggttactattttgctattttccttcccgtcatttttttctatatatagtggttttgttgttgttgttgttatttgagttttgtttgtattttacatagtctttctcatagtacttacatgagtttactttactaacttttcacttaacattttaacatcaacatttcccatgttattcgttgtttggaagcattatttttggtagccataagaacatttcatgaagggcacagaatctatttataagtggttgggagcgtgagttctttttttttttttttgagactgagtcttgctctgtcacccaggctcgagtgcagtggtgcgatcgatctctgctcactgcaagctctgccacctggatacacgccattcttctgcctcagcctcccaagtagctggg

SEQ ID NO: 1141 - DNA, 4001 bp, Homo sapiens
atttatgtcatgcttccctcatctcagactactagacttggggtttgggcccagacttttcccagaggtatgatcttttggtagctggtgtttgatacctaaagctcagtaaactcagctggtttgaattatcatgaagacttggggttatgaactgtgtcatatctctcatctcacacctggcactccagccaaattgaaatacacaccattggcaagtaccacccttgttatgcatttgtttatgctggatcttccacctggatgaactttcctcttcactgcacctcctagcaccaaagtctgctatctttagaggtctgggagcctcttctccccactcccaagtgggatactctctttccttccaaggcctaggaaaccacatttgatccacaccatcagaatggttctcctctctctgctgtctttgacctaaggtactttttaaatttctgctttaagttcttttgaacacaaatgagagataaaaatgagtaaattaatcagcttaaaatgatatttactaatccacttgtttctatctgaagtgtccattgcatctcctactggattataagctttctagagcagggacaaatttcccacttacatctgtaaacacagaggccagtacacagtaggtgctcaacatatgtttattgtagtctttggtgctagaatcatgcaatgacatgggttgatggctgtgaggctgctggaaactgggacataaatcccagaacatctgcttcttaaaaatactatcagctgtcttaagaggaaggaggagaagcaccatgcacttgggttgaagcgggggtctcagtacatctgagcaggggtctcaagaactcacagaagtcagggctccaagtaaagcagctttattgttgctgagctgaaggggtgaatggaagagagcagtagcagcgtggctcagcctagttctcgcttctctagagctggggatcaggaagtgtttctcagtccaaatgagaggttgagggcctggctttccaagggggaattagtacccaaaggtggggcagggagagagtaactgcacctgtgcctcaactcttctgggctcagtcgccttcacactcttcctctttgcagtggtaggttgtgcccctacttaggcagcgcagcttttgacgagccctcctaggcttctgaacctcaggcctttgggaactggaatgacaaccttctgaatggggagcaccacaaggagtcgagtagggagctaggcaggggtttgatctttggggaggggagcatttgggaacatttggaggcttccaagattgctgcttctgctgtgacattgcttggctaccaggtcgaatctggaagaaaaatagttatatcagggacccaggcagcttgggcttctgtttctctcctccacaaactggagctgtcaaaaatgaagtccagcatttacaacccactgaactccatctcaggaggagaaaaacggacttgaaaggactaaatatttgggagtaaatcttcccaggggactcacttactaataaccatgttaatgatatatgcttccttaaaaaaaaaaaaagacaaattgtacttagttgagctgacagtttacttttcccagcccaatgtccacctggttaagtgcaaaggagagccaagtctctgctctttctttactctgtcttattctgtccccagactcctaagtctgactgtcccatctctgcttttctggccctctaacttctatggctttctcccatgttagattatttggggtctttcttttgcagggatccacttctcttcccttctttctaccccaagcatctcctacctggcttttcagctccctgggaagagacgagaggagagatcaggactgcctaagcagcacttgagctacatccaagtgtctcctcagccagaagtagccttaccctagtggaagatgtgtggacaagttatcccaggaggagtctggaggccttgtgttgccaggaagtaagaggctcttttatatatcctccagttgaagcctccaggccacatgtcattggaggagagccatggagtggatgattgatctgggtatttcacaattcccagtgctagattcctcagctacatgtagctgggatgtggttcaaaggcatctgcaggtgcgtgagtgagcagaaggctggggccttcagattggcctacgcagaagtgggtacactggctaatctggatgatgtccttgggaggctgggcgggttgcagctgctgttgaattctatgtaggattggagggaaaaatcaggttcgacatcacccagggtctgaggaagaccttccttgtctactccccacccatcatccatgactgtcagcatcccattccgtgtcatcacctctgtggagattggcccattgctctagccacacatgagtccttcatcctctgacctttatagatacatgtcacagcctttactattgctttgggtcgtgtgaccaagatacatatcctatctcacctattaaactgttatttgatgacagtgcctttatcacttctgcattcctagagcctgatgttgttcctgacacaaagaaaatactcattagtatttgttgaatgaaacagtctatgtgccattagaaaagactttgtgtttcaggagaaaaaaacaggaataaaataaagcccaactcattttgttttgtggacgagaccttgacttcttgtttccatcattctcccctaaggcatttgtgaacaccctttcataaatactacagggaactctgtgggtggacctcaccttacacaataggctgagcagagggtgggaagcaaaaccttcacacacctgctgtctcttaaatgcaaaaggggagctgttcttggaattatcaagggacattgtggaaaagccttccacagagtgaaaagttcttctttagctttcatgaaaattgagataatcatgttttggcagtgcttaaattgggaacattctctaaacacagtccctcacctctggatgcttccatctcagaatcgctcctggtgtgcccagctaagttaaaaggcactgatgaaactccctgctgctcaagagtgtgcctcacctgcctctgtatttctgatgcctgacacacagtaggtattcaggaaacagttgggtaaataaaaagatgagcaattacaaggaacattctgactgtaggggcagtcctcaaaggccttcaaatcatgtataggacaaaggtgagtagggttggggtatgggagagggtatgaagaccagggtggaaaataggacaaggccagaaaaggagcagctattggatcccaaaatccagcagggcaggatcatcaggtttcaattgcttcatctgggaaaactttgagatgcagtttggatggaggaagagaagatctttgtgagtgaaacagcaggtggaagaatggtatgaaacctcgctcactctgttagagcagagccctggagagagagtgcctgatttagacagcctcagggatagaccccatcttcctttacttccttttcccttttctctctccttctctttctcctcttttcttccctcagacaccagaaataactctgatggtgcctcagaagtgcttcccttgcactaagcattagcaggaaggcaaagtaacactggtctcaatgcaccagttgctccttttccccacccaagacctgcaccacttaaacacatgcttcagagacctcacacatcacaaatgcatttttttgaagttaactagcaagtacccaacccttactgtctctgcctagggctgagggttctttctggaggctctgccctaggcaaactacacttcctgccccttctatatctctcccagaccacctcccataataaattgcccacagaaatctcttagccccctccttttcagtacagtgaatttcatcacatataggatggagtgtgtccagcatctagat

SEQ ID NO: 1142 - DNA, 4001 bp, Homo sapiens
gcacctgccaccacgctcggctaattttgcatttttaacgaagacagggtttcaccatgtcggccagcctggtctcaagctcctggcctcaaatgatctgcccgcctcagcctcccaaagtgctgggattacaggtgtgagccaccgtgcccagcttgattattgcctctttacagataagtaaactgaagctcagagagagagatgaagccacttgctcaaggaaatggtccagcggaattgtgactgggtcggcctgtctctgaaatgcacattctctgctccacaccacacctgtgggctctctggcctttggtcttgctctgaggtctctgccctcgtggtacccaaggaacagaatccagggatagtgaccttggcttcatgtcctacgcactcttgaaaatgggtctttctccttctcagaactgtcttgactcttgcaggaagctttccagatcttaagagacaccttctcccctcctctgaaccaatgctcagcctgttcttggcccttgtccacttggcccttctctctttgagaagagcctctgttcctggggcccaagagcaagggaccctgtctgattcgtctgtcagcatagggctgggtggaaggaactgctcatgcctgtccagggtgaatgaccctccctgaagtgcgaggagagccaccatgttccctagcccccacaagaggctacaggacttggagctgtagacaggagaaaggctgggaccagctgactaggcggaaagtgtgtgtcaagaaaaactccaacgaagcaggggaaacctggaaatctggctgagtgaggacttcccaaaaaaattaaggctcagagttaaaaagtgaggaggtgagcaggtagcaactatgcctccccagtctctctccacctccctggggtttgaagcaggaatcagcaaaaccaactggccctacacaggcagggctgaagcgggagggagccaggggcgaggggaggacatcctgctgtgacgcttggcaggggcaggaatggtgactttccagatggaagttcagcgcttcctcacccaggaccaactgcacccctgtctgggataaaaatagtacttcctcttcctttctcccatcattctctttcacttccaacttcccatactcagatcagatatgtccatccaccctggagctccatcccagatgatggacacccccacacatatcagttcacgcccatcaggagattcttccctcgatcgctgaggctaaaatcactcctcgcatgtccatctggatgccttgggtgatctctgtctctctctctctctctctctctctctctctctctctctctctttctcaggagattcttgtcactggggtctgccccagaaaccagaaggattcctgggtcctctgagtccagcctgtccatcaccctgctccaggcggggtggccacagcctcagccatcactctcagccctgccactgccttgctgagaaaccgtgggcagtgagtgccttgttctctctgggcctcaggagcctcatcctcatggcctgagggactgggcttggtggtttctggaagcctttttaacacctgactgtccatgtgcctggtgtccaggaaacacgctcccagtcaggtggggccactggtggacagcacgacagaggcaagcgacaccagcttcgcaggaaagaggcgacccagctacactgcctgcctcccacctgaccttgagcgaggatcttctctccccagccacaaagggctgctgcatccctagggagcctgggcccgcacagctgcagccgtctgctatcaggcctctcaccccggcgcctgcgcccccaataccagcgctccttacctgcccagcccgggagccctctggccccattcacatggtcctcctggcctaacctggctgcctggacagtctcagctcccttcgccgtcgtagccaccacctgtctccccgcgcccacgtcccaccctgacttcctgcctcctccggagggctccgcagccaaccgggccccagcagcccaaccacaaccctctagcacgccaagcttcctgccaccatagacccctgcctctcagcccctgggggtcccctacatctccagaccaggtccatcttcccctactgtcccagggtgacactgggaggtttaaagttgaggggaggatgtctgatagaccctcccttctgccctccagggtgcatctgggcaagagattcaagggcagcctttgggcccagtgagcagggggcaagcggacacacactcagcttatggtgagaggcaaacagcacctcagcaccaccgttgcagctgagagacccttttgtttctgtctggcagcaaaggtagcatcgttcagagtcagaggagaggacaatatccctgttaaatagctggtgagcagaccatgcatgttacagtcaggtcaggccgagagaacaattcccatgtcatctcagggcatggaacagtagctttattatagtcaagggtaggtgaatggcaggctaccatccctcttacagacagaatgctggaaaacagcctgtttcaggaggcagacaggacaacctcatgtcttcaagagggcatagtaacggcccctgctgtagtcagaggccaggacaacacccattaatcatggttggagagtagggcaacagttcgaattcaggtagaggcaaggccacagcccctggcagaggtggagggcttggcactatctcctgcaacaggtggaagacagagcaaacagggccgctcaggcccccaggtgcaggccacagactgtcaggactttctgttataagcaggaggcaagaagattgtcacgagcagcaggcaggcaaagaatttccatttcccctggggccaggctgagggggcacccatcattagctgagggccaggtcaccagtgatatgaggaactccaggtggcctcatcaggtccaagaactcggccttgaccccaccaggaggaaagtgcacatgcgtcactgcctgagtgagctggtagggggaggggaacccacagagcattgttggggcttgtgaggtggaagcgatgctgtgtgcacctcagctgcagagagaagtgggggcaggaaataggtggggggaagaggaagcctgagttggaaagtcagacaaagagggtaacacagaaacaaaggctgagagagacaaagtgaaaaaccttcacagtgacacagagcctagagttggagctccaagcctggtgcagggcccagactcccttgcaatgtaagcctgaacacttcacggtccatctccctgtctcagcacagagtagaaagactgccgcgctgggagtgagtaatagttcatattcactgagcgctcactgtgcactatctcccgtaaggcacatctgctgcctgtggagtgagaatcagcatctccattgtggaggtgaggaaacagactcaggggttaagggagctcctcagggtcgaatagaaataaacggtggctcaggcctgtaatcctagcactttggaaaccccaggcaggtggatcacttgaggtcaggagtttgagaccagcctggccaacatgctgaaaccctgtctctattaaaaatacaaaaattagccgggcatggtggcgggtgcctataatcccagctactcgggaggctgaggcaggagaatcgcttgaaatcggaaggtggaggttgcagtgagccaagatcgcgccactactccagcctgggcgaaagagtgaaattccatctcaaaaaaaagaaaaaaaaaagaaaagaaaagaaaggaaattagctaggcgaggtggtggccacctgtaatcccagctacttgggaggctgaggcaggagaatcgcttgaaatcagaaggtggaggttgcagtgagccaagatcgcgccactactccagcctgggcgaaagagtgaaattccatctcaaaaaaaagaaaaaaaaagaaaagaa

SEQ ID NO: 1143 - DNA, 4001 bp, Homo sapiens
ggggagataggctgatagggcacgggggaggggtcccgtcgggctcactggtgtaatggcggaccagttcatgcaggccgggaaaagtgattcgaggggagatgtagaagccaccgttgtccagattacggatcttgtaatgtttcaccacctctccctggttctggtcgaagtcccggaccgacagtgaaaacgatcctgaatgaatgaatggatggacaaagcgacgaaagaacgcagtgagtctggcccgccaccgcgcccccaccttgggctcacccagcacccccaactccgggtcatcccgcgcccccacctcgggctcatcccgcgtccccctccgactcaccccgtgtctccacctcgggctcaccctgcgccccccctcgggcacaccccggggcacccccgcgcccggtcgagaccgccgcccgctcacccgcggtgctctcgctctcccggatgaggaaggagccgtgagtgttcccgggcgccaggagctgccgctccgcgtccttgcggctcaggttcttgaagaaccagctgtgcagggcggaagcgaacgaaggccgtcggctgtcgtcggatcttcctccgtggccctcaagccttcaccgccaccccaggcctactccctgctccaggatccctagatctgctcctacccacccccacgacgggtccccacttacggttcgggctccaggctgttcgctttggccacaaaattgaaggggatgaagccttcctggcccgtggtcagggactgcgccttccaccactcgccgctcctgcgccacggaggtgggtcagtgtggctcgctcagccgtcgacctgagaccctccctcaaagacccctccaccccttaagccagcctcccccaaccctggctcagcaatactgagcctcgaattttgtcccaagggcggccaccccgagctggtcaagggccgcaggagggctgcgggtcgcggagatcgccgctccctcacggactccgccagagcaaggtggagagggactcactgctccaggatgcggagctgttcccccttctcaaagcccagatctccgtcgtgagagggctcatagctgtgcagagcgataaccaggttgtctgtaaagacaaggggcatcagggagaaccgagctgggatcggcaggaagcctggagttacagggtgggggacaaggaaggcaagaccggggagaaagtaggtgggggagaggtggaagccaacagccagggatccgcaggccttgtctttcaggccctgctgcctggggtcaccttgcagtggggaagccggcggattggagccttcgtaggtaaccagtgggtcccgcacctcagagccatttcggatgagcagctgtggagtgggggatgagggtggggtcagaaagcagaagattgggtcagaccctggcccccttcccccctgctctgctctcagcctctccagcctggttagatgttatccctgagtttaccaactactttctgtgtgatcttaggagattcccttcccctctctgggcctcttttcctttctgtatttcaggggagagggccactctattctttcaagggcctgtagtgctggtcatttctttctcctgggttgcattctctacccaactccctcaccaaggcccctgtctcgcctcttaccgtgcccttgccatccagtgggactatgggataatggcagttctcacacacatcgatgttttccatccagtcatcttccgggtgtgagctgcagccacagcccatggtccctgagggaatggaagagggggctgaaggggctcccccaagatctgctcccccaacatcagatataatggggccttgccctggaaagttccaaaagtacctgagattgtgagatcctgggatccccattcaccagccacagaaaagctaaaatagggggtcccagctccaaaccggtgctccctctgagccctcaggctacaagtaaattcacacacggcccctgagccctagccccaccctcccacctgggatgggcaaaccgccacaggcacctttgttagtctagttacccacttcctgcctctgccccctccctctccctctgccagtaccctgtgttgggaggaccacctcctagagatgacacacactttcccaagcctgggagagacctgacttatcagaccctcccctactggagaggtgtgcacgccacacctcctattataattcccctgtctagctgaggaggctgagaaagaggcttctgctcccgaagtccaccatcaagcccccgctgttcccctcacacagcccacagtcatctcacagggttccttcaaacacgggcttgcttctccccagcagaaaaccctccagtgactctgttggccataactttttttttgtttatttgcctgttttagcagtggaaattttttgtctgatgaaatcaagcagaactccatagataaagtgataaatgtgtgcctgttttgcctgaagcagagtggggccctcactttgaagcccccggagtccctgcagctcctccttctctagggctgctcctcagagtgcttggaaagcgctgtcctcaaagtttaatgtaccatgcattccagacctttcatatcaagatgaaatccacctccgcagtctattctgccacacacacactctctcacacacacacactcacacacaccctatacatatacacaccctacacacacacactctcacacacacacacagaggcaccccctatcccacctccacagaggcatccacacacacacactttcacataaacacacacactcacccctcacaggtactcccccacacactcacacacagactcaccctcccacacacaggcacccacactcacactcagtaaacacatacactcaccctccacaagtgcccccccacacacacactcaccccccacacacaggcacccactctcacacacgtacccacacacacattcatgcacacaccctatacatactccccctacacacacaggctcccacacccaggaacacacacactcgtccacacacccacacagtcacacccacatacacacacacacgcattcacccccacacacacgcactcaccccacacacacacattctcccctccccaacacacattcatacacacacacaggcacctccacacactcacccacacccatgcacacatccacacactcaccttacacacacacacaggcatcccctccatagatacccccacacacccacactcacacacacacaaacacccacacacaggcacccccacacacccccacacacacagcctgtgttctgaactattcttgcctttcccaaacaccccatgctattttcttacttaatgcctttgtacttgtggttctccctgctttgaaatgcgtgcgctctctcgctctctctctctctctctctctctctttctctctctctctctctttctctctctctctctctttctctctctctcttgagacagggtctcccttcctctcccaggctgaagtgcagtggcgcaatccccttagacctcctgggctcaagcaatcttcccacctcaacctccccagtagctgagactaaaggtgcacaccatcatgcccagctgattatttttttgtagagatgaggtctcactatgttgcccagtctgatctcgaactcctgggctcaagcaatcctcctgccttggcctccccaaatgctaggattataggcatgcaccaccgaacccagtcggcatgctctcttttgtccaactgctgaattctaactcaaccttcaaggctcagctgaaatattaccttttttttttttcctgcaacctctacctcccaggttcaagcaattctcctgcctcggcctcctgagtagttgggattacaggcatgcaccatcacgcttggctaacttttgtatttttagtagagacag

SEQ ID NO: 1144 - DNA, 4001 bp, Homo sapiens
caaatggcctggggtggtgggactccaagatggatgtgtattgggaggggagacaatagcaggagaggcagcataaatctaaaacctgtcatccctacagccctagttggtggctccttggccatcagcaaacagggtaaactcaggtaaccagggaggcagcgtgactctgggcagggagaggtgtcctgatcagccaagcagctcctcaaatatttgtgcagcacagaccatgcacaaggtggggccatgggagaacccgcagaaccaaggctcctgcccaggtgaagctgttgcacttcaaagccagaaagcccttaggtgccagtcctctccctgtaccgatgaggaaaaggaggtgattctttccacaaccccgcccatcatgagtcaggacttagaaataaacaaacaccagctcggagcaacaaaagccctggggctttgtaaccagagagacctcagttcacatttgaaccctggccctccaacctccctgctgtgtgaccttggcctggttactcaacctctcttagtttcagctgtctcatctgttattgccccataacagggcccctgtctcagagctgtcctgaggattaaagagatcatgcagtgccaggcacctaactggggatggattctttatagctggtattttaatctacctctctgagtgtgtttcgtcattgatcaaatgtgggccaagccagggcatatgcaaagctcagtacatgtgtgtttcttccttcttctattttcagaagggtaaagaggactgtcctggtcacaccatgggccagtggcacatagtagggctaaataaatgtgtcactttatccatcagagttaaagagaattgcccaggtcacccactgagtcaagaatttgacgctggtgctcttttctctgtgttacaggtgggcactgtatgcagtttggtgcctgtgaggtaggcagcacacagtaggtgcttaatgaatgcatgtgcatggagagaatgaataaccctattaagcaagtgactgtcagcatggctggccaggaagctgggagcagacaacgttaacatggaggcagaggtctgagggacagtgggagccttgaaccctcctcatgtctctatcgccaactgccagcttcaagggagccccacagggcactggccccaggccctccagttctttaccttcccctccagggtgggctttggattcagcagcagtgtagccattctctccctgcccaagagaacagagtgaggggtgggcttaggtgaggtgagctccagcctcagggaggcagacaacagggttttcagaggggtcactgagagagtcttaggtagaaccacgggtccgtcacaccccagcatctcacgccccagatgcatcatgcccgcttcatatgtccacacctttgcctgcactgtgccctctgcctggaaagcctttttctctgctgtccacctgataaatattcatccttcaaaccggcttgggcagcgactcctgggtgaggctttccctgataccctcctccccagtaaaactggccgctcttccctcctgtccacctggctcctctgtttccataccagcacttgccacctggactgtattgctgggtcattggtagggtcccctacaccctgggagtgagccccggggcaggacgggggctgattttcctccgtgtctcccatgtatgcccactctctactgcccactcctcatcccaaggtttgctctcccaagatcaggagcctggtcagggcggctcttacctggggacagctcttacttggagacaactcttacctggggacagctctcacctggggacagctctcacttggggacagctcttacttggagacaactctcacctggggacagctctcacctgggggaagaccttgttcatgtcttcggtttcctgctgcccgactggggctgtgtgcagagagctcagcacgggttccctgcattgtcaccaaggccaacctggaggagggacaagcaggaggccttgcccgggccacaccctccctgtgggcaggcccctgtcagctgccttccaagcagaggcaaaggcaggagggcccctctccggccaggctattccctcatctgccatctgacagcaacattgcgaggctggaatcctcatccctattccacagatgaagagccagaggttcagagagggagaaactgccccaagtctcacagtgcatgggaggagtgaaacccagaaacttttcagaaagtgcattttcctccacatcagagatggaaccggaggagctcaggttccaggggtatgaagatgcaggcagaaactcccagaattgacgtttcggtggctagaaagtaggggtcattttctcattgatgttcttctgttcaactacataggtgacctagattgaaagaatatgcattttccactaaaattataaagcaaatataattttaaattgtttcatttagaaacgtggcaatgtgaatttttactgcccctgaggtggtgctgaggtagggaagaggcggggggctggttgcttgcgtgaacaaccccttctatgtccccagtgagtgggtttccctagcagcctgtcccactgctgagtaaaccaaggccctggaatcttgagggacaggtccaaggacccggaccaagggaggagaggtgtctacctccagaaatgagctcaggagttcttgcacctgcctctgatgcccatagattttccaacctgcaatcagccttttcttttgcattgggaaataaaatgatgaatccacgtgggtgcaagtaggaggcacagacacaggggcagcccttgggaggcagcaagtaacattgtgaagagctgagccctaggccgggagaacaggactctcattagggccctaccactggctctgacgggtgactcactccccttccctgcgcctcagttccttcatccagaaaataaagatataagctagatgaagggggtgttttagtttaaggttccccagaatcagactctaagacaagatttgagggcaagtagagttaattgggagtgatcccaggaaatgctggtcggggggtgagggaaatgagacatggaagagaaggatccgataacagtcgtgttatgaagcaggtttccgctgtgggcaagtggaatttagccctgctggggcactcggggaagctaggggagaagatgcccctcagagttatcccactcaaggtgaggggaactggggtaataatctgccagctcctgccagtcttggttgagaatggccagaggaggccaggcatggtggctcatgcctgtaatcccagcactttgggaggccgaggcaggtggatcacctgagatcaggagttcaagaccagcctggccaacatagtgaaaccccgtctttactaaaaatacaaaaaattagccgggcatggtggcaggcgcctgtcatcccagctactcaggaggctgaggcaggagaattgcttgaacctgggaggcagaagttgcagtgagccaagattgcgccattgcactccagcctgggcaataagagcgaaacttcgtctcaaaaaaaaagagactagccagagggtgttaattccttgtaccactgggctgccttaggcaaggagatgtcagtgatggcaacttagcagctgcacgctaagctaatatgtcctgaaatggaaagcgctgatagcatgggcagggcacccatggtccctactaaagacactaactagattttatctggcatgtcagctgcaattgattgcaaaaggctctctggaacatgggcctcagaaggattctgaggtcagaactgtgattgactagtgatgcctgccatgggtgtaagagtggagaggggtatcagacatgatggctttcactcgcatccgtgtgaagagaccaccaaacaggatttatgtgagcaataaagctgtttatttcacctgggtgcagg

SEQ ID NO: 1145 - DNA, 4001 bp, Homo sapiens
gatgattaatcaatctcagaatgattgtaaggattaaatgatttaatttaatttaattcaaatctacaatcccttattcgaaaccctaagatgcggggccgagcgcagtggctcacgcctgtaatcccagcactttggaggccaaggcaggtggatcacctgaggtcaggagttcgagaccagcctggccaacatggtgaaaccccatctctactaaaatacaaaaaattagccgggcatggtggtgcgcacctgtaatcccaactaatcgagaggctgaggatgagaatcgcgtgaactctggaggcggaggttgcagtgagctgagatcaagccactgcactccagcctgggtaacacagcgagactccgtcaccaaaaaaaaaaaaggggagggggagagctgtgtgataaggagccccttttcttcctgcttttgaaagctgctgactgaggatgaggatgggatgtccagagctgcagcagccattttgcaaagatgaggtcagagcatttcagaggaacagtgacattgttgagccgttgagttaaccatctctggaatcacctatgaccactcttaactgaaatagcaaatatcctaccatttaagccccatttagtttgttatctgttacttacagcccaaaacatcctcactggtacagggttgttgtgaggattaaatgagaagatgtgcaagtactcaaagtagccctgatttctgtaagcacagagaggaaagaggaggtgggttttctggtgcaagatagggaccagtgggtacttgaggaccagccaggatgtgggtctttgaggaaaaaatccttcatcagagctcaggatgtgggagcactttccaatatttggtatttctctgctaaagccagagcctaccctgaaggtacacagggcaggcatggagtttagagagtaagggaattgggcacccttttttttttttatttctttgagacggagtctctctctgttgccaggctggagtgcagtggcgcaatctcggctcactgcagcctccgactccctggttcaagcgattctcctgcctcagcctcccaagtagctgggattacaggcacatgccaccatgcccagctaatttttgtatttttagtagagatgtggtttcaccatgttggccaggatggtcttgatctcgtgacctcatgatccgcccgcctcggcatcacagagtgctgggattacaggcgtgagccactgcgcccagccgggaatttggcaccttttatgtgccaggtattatgaagtgccttgcatgacttatctcatcttatatgccaataatcatagtcccttaaggggcaagggcctattattttcattttactgccaaagaaattcagagagttgaaacaatgatctcaaaggtacaaacataagaagtggcagagtgtgtaaatgcagcttctctgaatccgaagcctacagagttttgcaaagcaggccctgagggctgtcctgcccactcccagactcctgcttctaggtgactggcagatccaagccttccagaaggctttgggttggatttggggatgccaagcaagaccagacacagtttcccagcctcccccagctcaaaaggtctcagcccagcaggatgagtgctgactggggaaacatagtctctaaggatggtgggggcccaagtcttctgggtgccccaaccaagccccctgatacttacctgtctccaaagcagttgcagtcagggcggctgcccccagcaagagcaacctttggggcaactgcagaagacaacaagcctccatccaggctctgctgtgcccagcaatggggcagacccacagaatcttcagcttggggtctctggggagactggagtatggggcctggtcaggccagcagggaggctggtgggacacaaggagaagggggaggcaagtcttcactatgatcttagtgctttgccttccagatcctcttcatttggttcagaactgtgtccaggggttgccatggagatttggagcaagggctagagcctggggagaggaggcagggaggagatctgctccccttctgccagacaggaaccaggaaactcagatccggttcagccatagggcttctgggaggaggacccacaggaagccagatctgctaccttcctagatcagctggccccttagggactgagcttgagggaggtccaggacaccaaaggagcctctctgagggcctagagagcagcaggcagagaaggagcactggaccaggagtctgctgtattactaacaagccattcctgcctcagggcctttgcactcatagatccctctgtctggagtgttgtccccccatagcagtgcacggctgacttcttcaggtcatcaggttgtggctcacatgttacctccacagaccacactctcctgaccacctctccaactaaattaacactctctctctttgtcactcaatcacatctcaaatgtatcatcccagcactgtctggaattattttgcctattcatttcttcttgtatatattgtccactggcctccactaaaattatattccatgagtatcttgtttacctctgaacccttatgtcatagcacagtcactggcacaaggcaggcgcccaggaaataatgaaagaataagtgtgtggcattgaacaaatgacccctttttctggattttactttcccatgtgtaaaataaataccctggactaattcagactttttcaaaacgtgttattagtagaacaattttttttcaaaaggtatgttacaaggaacctttatctataaaactgaagcttttcaagccctggcatccttctctggaaaatgggataatgattaattccaaccacatagttgcattgtaagaattaagtaacttggcctggcttggtggctcatgcctgtaatcccagcactttgggaggcagaggtgggtggatcacaaggtcaggagttcaaggccagcctggccaacatagtgaaaccccatctctactaaaaatacaaaaaaaattagccgggcatggtggtgcattcctgtagtcccagctactcaggaggctgaggcaggagaatcgcttgaatccgggaggtggaggttgcagtgagctgagattgtgccactgcactccagcttgagcaacagagtgagacttcatctcaaaaaaaaaaaaaaaaaaagaattaagtaacttaatacaagtggggtacttggaatagtgtctatcatgtagtaaagtaaccaatgtatttcagcttgaatgatgatcattaatgtcatcgttattatttaagcagatgtttcaagtgtgggggaggggaggagctaagcagcccaaattggcagtgcctgagacaccacctcaaaatcccaggaatccatgagaaggttaagacctctggacctggccgggcacagtggctcacacctgtaatcccatcacgttgggaggccaaggcaggcgatcacctgaggttgggaattcgagagcagcctggccagcatggtgaaaccccatctctactataaatacaaatattagccgggcgttgtggcacagaggctgaggcacaataatcgcttgaacccgggaggcggagattgcagtgagccgagattgcaccactgcactccaacctgggcgataaaataaaaaaaaaaaaaaacccaaaacaaacacctctggacctattattccctaacagctctccctcctggagcggtcatttgatgcaaccttgatttcctacagtgtatgatgtccaaatctgtaccttggggaactccaaaaagactcaaatcttccctcagcaagaatgaatttatcatgaagcccactgaagcttaaacttcagaactcatcacctgcatgggattatatggtttttgttttgttttgtttttgtttttgtttttgttttgagactgagtcttgctctgtcgcccaggctgcagtgca

SEQ ID NO: 1146 - DNA, 4001 bp, Homo sapiens
caaaacccatctcaccacagtactaatcatgctggcagcgtcccaaggataggcagggggaagaggagcaggggagaagaaagccaccagttaggagggagcattattaccaataatctccttgatactcctgccaggtaagagtttttatccccatgttgcagatgaggaaaccgaggatcagaaaggacaagtgacttgctcaagattgaagatggcaagagaaattctcttccacatccaaagcggctacctcttccacgtccccagattcagagatatttctttctagcctcccttcccttgccagccccccttccttcaaaaccacttccctgggggctgccccaccaccctccctccctcattcctggagaaaacccgcaggattctcccactggaacagatggccatctcagaagtcctggtcaaatcttgccagtttttaaagggtctattttgggatgcaatcagtgtgataaacggtacatcccctggcctagtggcccagccctaatgggtctctgaccccaccccccaccagcaggcaccaccccacattcccaatgccaatgccagtctcagctgggaggcggccacagctgaacaacagagtggggccagaggaggagggaggcgggccctctaggcccagacacgctggcactccttggaccagggagctcgggctcccctggcagagccctgtaaggccaagaggggatgggatgagggggtgctgtactgtcagttgtttcctgatgaggggagaagctgtggcccgaagtaggtggcagggaggtgggagtgtgcagcagtcctgggctctggctccaaaaccagcaggaaggtgtgtgtgaccccaggcaagccactctcttctccctcccaaacaacgagacctgcgctaggctgggtcttctggcttcaggggaaggtgccaggtgacaagttccctgagcgtaatcagagactgggggagagaaagggggggaggcccctcccagcctcccagacgccccagggagaggtggcggcgagtctgtcgtttgcctgggcacccaagggactctggaagcccgaggggaaaggtgcgagagaaaacaggtttcaaaaatagtcgggacgccaggcttgccacctggacccggctagaggaagggacgtaagggtctagatcgcctgatgtggggctctcccgaggcaccccaggcggggcctcgttcccaatttcaagtacgtacctgcgaccccgggctcacacctggatgggtgtctgggcacccggagtcaaaagttggcccggtgggtcgggcagggggcgggagaacgggccagtgggctcctgaccgccgcagctgctggctggggcgcaggggtgcgggacgggggcgtcttcccaagcccctgcgccctctcctcctcccctaggcaccgacgacgagcgcctgcctccccctagctggccaggacagcagggcgggaggtgccgcgggtggcgggggcctcttctcccaacctgcaccccaccccatgccggctgcacctgaggaccccgagctcgggctccttcctcagcgctgcccctcctcgcagcggcatcgagcggccggcgagtaggtgcacaacttgaccccggccgaccccctgccccgcagggccgggaaagggccacgccgggaccggagcgccggtgaggccccgcctctgcccaacttggccgcactccgggcgcccgcggaggccccgcgcgcctctgcccgatcccggcccggcccggctgacgcgcgcacactcactgcggtgccggccaccgcccccccagctctgcttggccaagctggggctccggatcagcgcccgccccgccgacttgagcgcgtccatggcccgctccggccgccgccgccgctgccgcagccaaaactccgtcaggaaaaactttccgcccggccctgcggcgcgcgggctgcgcgctcctcccctcccagcgccagctccgccgcggcgtccgacggggcggggcgagagaggacaggccccgcccccagacgggccgcgcccccgacggccggtctcgccccgcccggtccctgtccaggctccaggtccaggcaccaagagtttccgaggccgcccgaaggcgccagaagatagcaaatcgcaagccctagacgcccccgctttcctccttttccccaatccccaccccgtaggggcctgagggcctgagagcagcggcctaggatttccagtgaccattttacagatggggagactgagggctcctccagtggtgaaagatcttgttcagggacaaaagcaatgcgatgtccagggcagtgggagacttaggaaatagtggaggctgtaagccagggatatccaaacttttggcttccttaggccacattggaagaagaagtgtcttgggccacacatgaaatacactaacactaacgacagctgatgagctgaaatatatatatatacacacacactcatgttttttgtttttctgtattgttttttttcccctgagacagagtttcactctgttgcccaggttggagtgcagtggtgcgatctcgggtcactgcaacctctacctcccgggttcaagctattctcatgcctcagcctcccgagtagctgggattacaggcatgcaccaccatgcctggctaatttttgtattattaatagagatggagttttaccatgttggccaggctggtctcgaactcctgacctcaagtgatctgcccgcctcagcctcccaaagtgctgggatggctgtgagccaccacaccctgcccaaaaaaatctcataatgttttaagaacctttaccaatttgtgttgggctccattcaaagccgtcctggacctcacatggccagtgggccacaggttggacaagcttgcagtatagacccttgttaggcgcagggtcggtatataaaaatttgcctttagcaagtccagccaggcactttactcatcctcgtagctcccaggctgctccctggcaccacctgagcatgctgggccaccccatgcccccgcaacttcccaggtagcctcacagatggtatgatctggaacgtgcccctgacactgacttgctgtgtgacctcaggcaagtacttcccctctctgagtcttgtttatctgtgaatgagagtcaatgctatctctagtgatccttccaacctgccagggtcaagaatctgcatgaccttgaccctgaccccaagctgcttcctaggagcattcggagggcagtctgaaccccagaattgctcaggcacagatgttctaactccaggattggaaggatttgttctaactctctaggatgccatgccttcctttcaaactgtgccaaaaggagccagagggaggacacacacatccaagccacagcctggcttcttttagaagggggtgcctcaggcaaggccaacttcaacctctgtaattactcctggctcagaagccagcagtcctctctgtgtcgggagaaagatagtgctgtgctgtccccagctggatagggcggcctcactgacattcccctgtttataaaccaagtgctttgttagccagtctgtccttggcttccccagcaacactgcttaggtggacccactttacagatgacagccctaggtcagggagggaagcattcactgatagtctccgagagtcagagactgggatcagactcaggcccataggcaatggggtagagtataatgccaggggttagaacccagctgtccttctggtggttgtgaactcacccttctgagcctcatctgtaaaagggacaactatatctatttcacagggctgtccttaaggactaaataacaggagttggaatggctgaatcctgttcttgagaacccacctttaaagttgcctcctccaggaaggcttccctgactaccacccatggattaagtttctctttgtgggcgcccacagtcctga

SEQ ID NO: 1147 - DNA, 4001 bp, Homo sapiens
gcgtctgggatggagatttatgatccacctctcaacttcaaaaagctggatgtttgtgatataggatggacagctagaaataacttgaaaattaataaccgatatttactgaggatctcctaagagtcagaggaagaattgtatacattgtctcattcattcccacagcactctgaaaagttgtccatttcaaaataaatgtaattgcctgtctctttattccggcttaccagtttgaccctcagcacctacccatagtccccaaggtccagggtgtgcagctccagctggggctccccaagcccggctggcgccccctgcgaggcaaagcggaccagcttgtgggcgccggacgccagcgggcccagatgctccctctgcaccgacacctgtagcagcagcggctgccggggccggctcagctgctgccagaagttcacggcctcggtcacgtcgaaggccttccagccgctctcgtggacggacaccagcctgagacatgacacagagacccagcgccgcttgagggcggggactgggacgggccccgaggaccccgcaccgcccccccgcgtccccgcccccaagccgggcctagcagcgccctccccctaccctgcgcgcccccgcgacccccacctggagtcgatgagggaggtgcggttggagccgtcgtcgcggacgcgcagccactcgacggtcacccgggcccgggcgctgcgcggggacagccgcccgtgcctgtgcagcgcggccttggggaccggctcctggaagagccgcagcacggcctgcaccagctcgctgttgggcggcagccgctgctccatgccgaacaccagcaggtgtgtgctggcctccaacgccaggaacctgccggccacctctggggacaagagcagggtcagcagggcctcccccgactccaggggagctctgaggatggcagggccactgagctggcagccaggccaggagacaccggccctgttctatttctggggcaaacccagtttacaaatcttccttggatctgggccttgtttagtaacaatttccatccagcaggcaggggcgcctgtgggaccctggctagcaagtttgcctcagctgagatgctgggagcagaatcctcacccaggtgcctggcattgggtctagctctgggcactgaggagctagggaggcgagaggctgcaggaggattcaggccggctgcaggaggattcaggcccgctgcacccctgacagccaggtataacccaggttgtctactcaagtgcagtatttttcagttacccaaacacgcttctatttacaatgactcattttgatgttcacaatgctggaagatgggcaagacatagttataccccagttccatgtgagcaaatggttgtgagatgattttaaagcaatatgctccaagtagaactcagaccagagtggcagtacgaaaacagacccccggagtcctgactgcatgcaccgctgcatgctgaggccccgccatcctcacaggcccggccccacctcactgccccttagaccgtggccctcactcagcctcccacagacctctgcaaggccaggagccctttgacaccaccggagtgggcacatctgacctgccccatgggaccaggggcagcagggagggagggcctcacctcggaagctctggctgaacctctttccgcgggagcggtccccgtggctgcgctgcagcagggccacgtactgggccctcacgtgggtggggatgaccagctcctccatgtcggccctgtccagggtgggcacctctttgagctgcagctgccgcagcaggctgcccaggagctgctccccggtcagggcggccccggggctggccaggggcaacacccagagtgcccagcagagccacaggggctgcatggtgctgccctggaggagcaagaggcagagtggggctgtcccttgagaaggctgcaggagggtctcaggcagctggatgtgctgagagccaagcctgggcagctttatagcctggggtggagggaggaggtagggagtggggagggaaggagggagggaggtcacacccctgagacctcctggaagctcacagccagacgagtccctgagctgggaggagggggctgtctagatagggcaagtctgtctgggctgtgaacagctggctacagctgtctatacaatggtcatgaacccctaatgtgggttgaggcctgaccagttaaattaaaaagctcatttcctagagtagaggtggggctctcgttctctgcaagaggctcagttcccccagctgctggtaagtggacctagagtcttgttccttgctgcaaccaaacaactgacaggaaccagaatggctcaggcaacgccagggctctaagggccaatccagtctgcagggatgagcatccgggcccgtgctcagagggtcccggggcctcatgagatcctgagctggtggtccccagttgtgaaaccagatttcccactgttctggggggaccttcctaggcaagggagcctaggagcatttagttccaacggggttttgtccaataaggaaggagcctcatcctctccctcatccctgctgttcacagaattagagtttagagttgaaaggaatatccaggctaccttctcccccaatttttttttcttttgagacagagtttcattcttgttgcccaggctggagtacaatggcgcagtctcggctcacggcaacctctcccaatttttgagctgaaaaaaaaccgaggctcagaggtgtcaacttcccgaagctcacaaagttaatgatcaatgtccatataaagtcaggtcttgcaattcacaaagttcttggcacactcaaattatttacagcctagttttgatctatgccctaaagggagccaggtggtctcaatccaggtgatcaggtctaggctggggcagggggacaatcccccaagacagaggacccctatcctgaatgtggatttgtaagctggttgaagagttttgctggggaaataaaacatttgggtgatcagccaggggtagggctaccagataaaatacaaggcactatttgggacataattataccaaaaaaattattcattgtctacctgacattcaaatttcaccagagtcctatatttttatttgctagatctgacaacgaaaaataaaacaaatgtggattgggagactgtttacaatggtctgaagtgttgccaggagggagggcagccccaccctttgtcatgcagaagacggagcctggcttccccaaccatccccacctgggtctgcccagattgggcttgagatggtaaagtggccccagaaccagatcttctatctaagggaggagagcggggcaagggaatgagtgatccctaccctgactcagagcacatttggacctggccctcggcccagagctaagggcactggagggcagtggtctggccatactggggagagggggagggggcccaggtaggagggtggatgaggagtggggccctttgccctcgaacaccctcctgcccctggtgggccaggatgtgaccccaaccagaggccaggttgccaagtgagagccatgggaaaacatgggggtcagaggtcatcctggggcctccatggatggggatgagctggactcaggcctgggctctgacgtcagcaaagctaagagtccaggagtggagtggcttctaagtcagagcccagcatctagggtctccagggtggcttttgcccccttcctgggcaggggcagatacttctgagagtgctcaggaaatgccccaaggccagtccaggtgtcctgggctgccccaacccacaccatcaacctccctgaccccaggcctgggggcccatgtggctccttggtggttccaggcaccccctgtgtgggcacttcctgttctcccaaagtagctcagactctggcatcatcaggggtccttccctgg

SEQ ID NO: 1148 - DNA, 4001 bp, Homo sapiens
gtgcagctccagctggggctccccaagcccggctggcgccccctgcgaggcaaagcggaccagcttgtgggcgccggacgccagcgggcccagatgctccctctgcaccgacacctgtagcagcagcggctgccggggccggctcagctgctgccagaagttcacggcctcggtcacgtcgaaggccttccagccgctctcgtggacggacaccagcctgagacatgatacacacgacacggagacccagcgccgcttgagggcggggactgggacgggccccgaggaccctgcaccgccccctgcgtccccgcccccaagccgggccgagcagcctcctactcctgccctgcgcgcccgcgcgacccccacctggagtcgatgagggaggtgcggttggagccgtcgtcgcggacgcgcagccactcgacggtcacccgggcctgggcgctgcgcggggacagccgcccgtgcctgtgcagcgcggccttggggaccggctcctggaagagccgcagcacggcctgcaccagctcgctgttgggcggcagccgctgctccatgccgaacaccagcaggtgtgtgctggcctccgacgccaggaacctgccggccacctctggggacaagagcagggtcagcagggcctccccggactccagcggagctctgaggatggcagggccactgagctggcagccaggccaggagacaccggccctgttctatctctggggcaaacccagtttacaaatcttccttggatctgggccttgtttagtaacaatttccatccagcaggcaggggggcctgtgggaccctggctagcaagtttgcctcagctgagatgctgggagcagaatcctcacccaggtgcctggcactggctctagctctgggcactgaggagctagggaggcgagaggctgcaggaggattcaggcccagttgcacccctgacagccaggtataacccaggtagtctacttaggtatttttcagttatccaaacacgcttctatccacaaggactcactttgacgttcacagtgctgggagatggcgaagacatagtcatacccctgttccagatgagcacatggtggagagaggattttaaagccatttactcaaggtcaggctcagaccagagtggcagtgtgaaaacataccctgggagtccagctgcaccaagtgccttgaggcacacactcacctgctcccccagctctactttctctcctctaccctccccttctctgaagtcttggtttttccagcaggtctagcctggtgcacctcccctgggctggaggggggcctcagtgcacagctggagaccctggacccaggcccggctcctcctcactgctccttggaccgtggccctcacacagcctcccacagagtcccaaaaggccaggggcccttcgacacctccagagtgggcacaaccggcctgcccccgaccatgggaccggggccagcagggagggagggtctcacctcggaagctctggctgaacctctttccgcgggagcggtccccgtggctgcgccgcagcaggactacatactgggccctcacgtgggcggggatgaccagcttctccatgtcggccctgtccagtacgggcacctcgctgagctgcagctgccgcagcaggctgcccaggagctgctcctcggtcagggccgccccggggccagccaggggcagcacccagagtgcccagcagagccacaggggccacatggtgctgccctgggggagcaggaggcagagtggggctgtcctctagggaggttgaaggagggtctcaggcagctgggtgtgctgagagccaggctgggccagctttatagctggccctgggctggcctggggtgaagggaagagggagggagggagggagggaggtcacacccctgggacctcctgggagctcacagccagacaggtccctgagcctggaggagggggctgtctagaaaggacagggctgtctggatgccacccaggcctggggcctctggctgtgctgtcagcagcttgacaatatttttagtgcctgttgaattttcctggccttaccccagccctgttctatgaaaaagtgagtctattctgtgaaaaacaaagtcctgctagccagctgcttaaatctctttaagtctcttctggaggctgggctgggtccaggtctgcaaatcataaaggaagggcgggaaggattctgccttcctgctggttctggccacattcacagaagccccttggtcatctccctccaacctacactccttgcacaccccctgcctctccccacaccaggggtccctcagggttgtcgcaccgtccttgccctccccccatgacatcctctgtctagacacggtcaggacacaaatctggcagctctactgtctttaggagtcccaggaacagcaatttcagcaagtgcctttgcagtcacgtgaccacagcacaggagtcctcccttcagacagcagaattattctggggtgtgctctccccagtgagctggctggccggttcatgccaccagcactcagctggagcccaggtcatttccagacacagacaagggacagggacttagaaagcagaggccagagctgcccaaaggcatggcctgtccaaagccacaggtactgggggcagattgaggtgggagcccccctgtgtctcttcaaacacacattttagactggccacgttcaaatatgagaactgccatctgctaactgtttgacctgctagcaagtgagttaacttctcagtgcctcagtttcctcatctacagaaagagggtgatgatcataaggtcttcttcatagggttagtgtgaagattaaatgcattaatacatgcaggatgtttcacccagtgtctagtgacaggtaaacactctgtaagggtttgctatcattattatctgcctgaaatctgcattcacagggtcgtggctttttgcattttttttttttttttgacgtagcctcactctgtcacccaggctagagtgcagtggcgcgatctaggctcactgcaacctctgcctcctgggttcaagcaattctcctgcctcggcctcccgagtagctgggactacaggcgcatgccacgcccggctaattttttgtatttttagtagagatggggtttcaccgtgtcagccagaatggtctcgatcccctgacctggtgatccgcctgccttggcctcccagagtgctgggattacaggcatgagccaccgtgccgggccaggtcgtggctttttataaaactctcaacaacaataatagcacacatttcctgagtgcatgtgccagtcattgttctaagctctgaatgtgtattcacacagcccttaggaggcaggtgtcagtttcaggtgcatcttgcagatgcaaggtcagaccactgcctggggaagtgacctgctcgccaacctcaatgaagggcttgggagctaaatggagcctctgtctctgtaggcatctccttctggcactggcataggggatttgaggatgtgcagggggaagctcttcccaaaactccacagcctcacttgcccatgttctgtcgcatgagtaaggatggtggaggaggacaaggaccctgggccaagggggctgccgggcaaggggcatcccccttcaccttctaaatgggggcactctggcccctttgtgggaatgctgtgtcactgacaggtctctccatgtcatcccccttcaccttctaaatgggggcactctggcccctttgtgggaatgctgtgtcactgacaggtctctccatgtcatccccctgcttctgtcctcaaacatttcaggcagaggaagagggaatcttctggtgctcgaaggtggaatttcttttggatgaaagcccagggacttcatgccaccacatatatatgcaaatgcatatgtatatgtatatggaagtctcatatttgaaccca

SEQ ID NO: 1149 - DNA, 4001 bp, Homo sapiens
ttctactcctctttctccctcataccatctctttcctgcttcctggcgttagacgctttcacagctgcaaccatatttatggatctctcaggctttgctctaacacagcctggcattacctgggtacacccttcagaagtgggcacctgcctctaagcagcaggtggggtcagagggaaagtcagttctcaaaggttgttgagagtgcagggttctagcctcacttctcagggattgcttgttggtggtttagtgctgtaaaacaacaaacaaaacaaatcaaaacccaccagaaacaccaggagaagtcttgcacagcagaggaacacgtttacttgtcagttcatggtttcagtctccagccccacagcgttgtacatggtggaggtggcagtggtggtggggttgggtagtgcccacagtgcctcactctgggggagggcagggaggtgggcaagcatgtgggcaggatgaagggcatttaggaggacagggcttggtgcagggctggggagggcaggatgaaggagactgcgaggggcagggcaggcacttgggtggtgctggacacttttcccatgggcacttttcgaaacagcgttgcagcagcttctttaaacagctgggctggcatttggactcacacttttgttcacacttgggatcgcagttcttgggctcagtcttggggtcatttgatttacttttatcatcactcgacattgtttcttgattatctgagccctgcaaagaaatatgagatgcattgtaggtgggagaggatacctacaggcttcttacagcttatccttgtacttaagaaagtcttccctgagatgcattcaggctctagatcatcttctcatttagggccgccctcatccttgtatgagtttgagatagcatttcttaatctctccacccttaactctgcttccttttcacttattcttgcttccatgctatagactctagtaggagttcttaacctatggttttggaccccccacctcccccaccccactgaaactgtatttcagtagagttggtgtctctgtaactccatatgttgtatttaattcatttagaaacatgattccaaggagtccctaagtttgaccagattgctcaaggcattcatggcacaatagaagtttcgctcctctaaggccacttcctgttcctctgaagatagatgggaggtacactagcagacttgggggcctaggacactgctttcaatcctgtgtcccacctaagttccctgaaccttgagaattgctttctttactagaggccatgggagggaaagtaatttaatccctgccatgagtgggttcccatgggctactctagaactgcccactcctttgtctccatccaggttctgataaataatagggtaagggaagaaatcaggagatgaaccacgaaattccaatttctctgaaaatctgaatgatagagccacaaaatgtgattttcagaagggaattccttttctctcctgttgagttttgccctgagctaggcatttctgcacggacagtttaactcctagatatggacagggattttcagtccctcacaatacttcaagttggatctaattggttatatttctttgatttcttttaacaatataaaaataacattttaaattttgttttaaaatcagtatagctctctggggaggcatattattaagttgaactctaaaattgttgagactctattccaaggtgaagcacacaccagttcttaccactgaaaataacaggaaactttcattcaaacatgactttcccaaccctgctcagtgcgtggggtacttcaggtcactcccagggtagaagaggccaaagagtggccacttccacctgtccaaatgcaacttacccctctgtgttggtggtgaacttgacaagcagttgagtgaggtggatgttatggctgtgcctgggaaggtggcttttccctttggttcctctgcccagatctgaggaagctgggggtgggggcaggggaaatgacctccacttatgaggtcattgcagcatcatcgaggggcaattgttgtgtgactccatagctcccagcacaacaagccctgaacaccagaatagagccatgatgaatcaccccccttggctgtcccacccctccctagacccctcaacattcaggctggtaaaatgaggctgcagtgaagagtcctgggctctgaggatgggaggctcattgttgctgggagcagaaaagctggcccactgttgacacatggtctccagctcctcttccaccctcaaagtttaattcctctgaacctgctccttccccacccttctaggagagcaaccctgaattgatcactgccattttgacattcttcttttctttatttttctaatgtgagattctgaaacctcttcttaccaccccacacaattgggttagccccagatcctgccttagggcacaaagatttgcctctcagaattccttccttgccttttttaaaggcctgaccagggtctttgtggttggaatgggggtgtgttaggagtggcgatgggaggctggagtgcgaaaggtgggtaggcttagacacagggtgcctgaactcaggtttaggaggttcatcgtggcagtcatcacgaatgaatctctagtgacttttgattaaaattgtgacatgattatgcctaaggtatttaaatattaggatggattgggagatggggtggtgaagtaaaagtcgaatgagactgttttaaagaaattatgaaaatctccacatctgaaggaaggcagtcatgggtctgggtgcccatgagaaagacctcattagacaggtagattcatgggacttatttactgactgtgcagaaaattaagaattgaagatgactccagagcaaaagggcttcttcctagtgtactagaaggcaatacgatgacaccaggtttttgagaaaagaaaagctttttactgcaactagaccatcaaagagacaagagtttagcttgaatctgtctccctgtgctggctttaaggcagtcattttattgggaaaggttagggattagattctggtattagtaggtgactggtggaaggaaaagggagggctggaaaaagtcctcgggcatgggaagttatctcttcatgctacctcatgggtcacatgtgcagtttcggggagggtcagtatgaaacatgcagtggaaatttggctgtgacatcagcacgctttttctgtgcagactccagtctgccagattggctccaatgacttcagccaattttgttatcttacaaatggagagagtttcagcatttcagcaagttgttctttttttaaaatctactatcatgtaaactcaagaatttgtattagtcactcgtttgtttaactctttgggacaatgtttcaccaggttttggggtgttagtattacttttaatgagagctgaggaaacaggggaacagatttgtgctaaaagaatatgggtttaagtctgagaagagtttagttagagtcaaccctcttgggtggttattggaaatatggctttggcccttgggccactggggagacctgaggccttcagttcatttcagtttaacaagtgtttattgaatagaagatcatgagttgaagatggagaaacctcatatggggtttattcacaaggataaataatgccatattcaattaaacctcaaatgaacctaaataaaagaggagaatgggttgggatttaaccccctatcactggaataattggcgatagagtcatagtctttgtgcagctcactcctttcataagaatttcctctttcttccataatattgttcatcagctctctctcctcaaagctgttgagaagcagctctcacccccatctcaggagacccagcctcacctatgttcagctctggaccaaagctaccaatctagatatggagatggcagtcatttgtgacagcaatgt

SEQ ID NO: 1150 - DNA, 4001 bp, Homo sapiens
gcaggtggagtacctgaggtcagaagttcgagacaagcctggccaacatggtgaaaccctgtctctacaaaatacaaaatcattagtggggcatggtggtgtgcacctgtaatcccagctgcttgggaggctcaggcaggagaatcgcttgaatctgggaggcagaggttgcagtaagacaaacacccaatcctaatctgtaaataggatttgggtatatttaccgcctcttccctctttgtggttttctgttttctctatgttcctatttctattttaatggctttactgcatatgttccttctattgtaagttgtttataaaccataaatgacaagtctgtaatatttgctgcatactgtacatacgtagtattgggccaggtgaaaatccaagcttctcaagttggttctgcaatttacagtcactcagacacttcacatccaccatgatgatagaagtttggcctcttttctgatggtagaatccttgaaataacaaaacattaaattcattaagacagccttaccaataagtactaaaatgttaccaatccacataagtgtttataatcctatctccccaacctcctaggtgcacaggcaataaagcaaaaatcaacactttctagttctgccataaatccctgctgggattagttgcctccaatgtaaaactttggatgggtgtcattttccccagtgtctttagggctcaattagttacaactgttctgttcaatgaatatgagaaaaatcttctggacaaaataaacagatatttccattactgctcaggaactctgagcaaaactcaagctctgagaagataagaagttaattaaatatgaaagagctgagaggttttttttttttttttagtgagttaaataaaagttatttatccctgccctccttttgatgacaggacagagagtacagagcattcagttattgcaaacagtagcagctttcacacttgtaatttaactctgaacgttaacaagatggtagtttttaattaaccaccaacagacttagtaattgctgaattggcatttgaaaaaaagtcagctattcattctctggcacacaaattgattcatatagatttatgtaaatcttgatatggctttccaaatctgcacaacctcaaattcaatcagttttatccacttgatcccttgatctcccaaagttgacccttctacctacataacaaaatccgcaaaaagacagacccatttgtcaaaccttttaaaggagatttttaaattttggagtttattgtaccacatttctatcatgtttcaaggctttttaatactgcagtggaaacaacagccagataattattcagcataggaggatctagaccaattttaaataatgactttgcttttgttggtgatcaatcaatgtccaattaggaagaacactgtatacaagctagaaaaagtcatgaattgttatatataatagggttgttctggaatacctagtttgacagttctctactttaaagccatgctttaaagagagttacattctagtacacatagtaggtacctagtaaatgttagtttcctccttttctatgtgtttgggaaactgacttaacactttgaggccagtgggaaaaaaactaatgctaggaagaaaaaggacaatgcatctcagcacctcagattttttttctttcttttttactggaagcttgcttcggcagatcctatgacatttgttcctgagaacagctgtctgttgtttcaccagcttcccaaaaataacctccaatagagccctcaacaatttcaagtggcactagacaattgcctagagggaacacacatatggaagaaaaatattcaaatggaatccaactggatgattaattcacttaccccttcacatggttatctaaagtctatgcaatcgagttggttactaaagctgggtgagtttcactctgaggtttccactagcaaccagtccctttttgcctgttagatattatggtaatcataatactgacagtgtgacatcagtaacccccatagcaacagattgatgtgcaaatcagatgattaatttaaccaaagttcaaacaaaaggaggtactggttgacttcataggcacactgccatgatacaatgtcaagagatgcggagaagttatcattatgcacagcaagtaaggagctgctaccaaaccaaatggtgtcaagaaacaaggaagagaaaggagaaatcagacaaacccaactgtctagaccacccatcaaaaggcccatactagtagttgggcaatttgaccatctactccagggaaaataggaaagcggaagaaacctgtattaatttgttaaggattattcaattaagaaaataagaaatcaggatggagggcagataaataataatacattgcagaagtttgatggatttggccttttcaaagcatgttcgtatcatctcacttcatcctctggatactcttataagccagctgagacagatattatcatctacatcgcaaaagcctacttcttgttgttgtcttattttgtttaaggaaagatcggtgagactattagcctgcatctttcaagaaagactgcttagattttaaagacgtgtgcaagacaaaatgtaactgtgagaaaacgcaatgccttcattaaattgcaggatagagggaatgatctgaaaggggtgaagaggacagtggagacagcctgcttagagtcaaatcccagttctgccatttaccagctgggtgacatcacatcaggtaagttactaacttcactgtgtctcctcctctttgtccataatgggggataataaaaatggtacctgtatcaaagggctatgttattcaatgagttataatacacataaagtgcttggcacatagaaagcattatataaatgttttctattattctactcatgagccctagccccagagagtttccacatccggtattttcctcaggaggcttcatctcatttacacttgcccgtgggagtctgtagtttcagtcctttccagattctgggaaagagctgaacgtctttgggtgggtggttatgaaggctcattgagtctcccaggctgtggctccaagggctatggctccacagtttctgaatagagcatcagttttcaaacaaacatgtaatgcaaatatttaccaacatccaaacattgcattcaccaaacaaagactttgaaaattgacacatttgtttccatcaaagcaaataaatgataggcttgggttattaggaggcacaagcattttgtttacatttcccagaattgctttcaacaaaaaagcagccagcaggtggaactgcttccatttaaacagttagactattgggatgaaacagacatttctaaaatattttcttggttaaatctctggggtttaaaacaagctaggtagagaaggattaaatcagatgatttcaatcaacatctatgggttgcgccctatattatgtgcaaactattctgcttgaaattattctcttgaaaatccaccagcatagttatgattctattgtcagcattattccatttatgaattcctgtactctgtgctatcctgaaatatttggtttcattgcttgcagcacaccatctccctcagttttatctgtgcagtcctgagcattagcttgttttttatttttcattctccccatggctgcaaagatattttattccatttcttgagggaagcaagttttaattgagtaggtattcaacatgataaggtacctaaaccctgagagcttcctcctttcattaaaatgtagatccaatttctcttcccttaatgccacatgctggtattaaactgaaataacggaaatagtaaaagccagatgtcacttcagtctcaggtttgacgtggggcacaatttcctctcctcaaatttaatctttgagttatttactaaccccattctttggaagaatgcaca

SEQ ID NO: 1151 - DNA, 4001 bp, Homo sapiens
cgaactcctgacctcaagtgatccacccacctcggccttgtcccaaagtgctgggattacagatgtgagccaccgcgcccggcctttttttttttttttttttttgagacagagtttcattcttgtcccccaggctggagcgcagtggcatgatctcagctcaccgcaaactctgcctcccgggttcaagtgattctcctgtctcagcctcccaagtagctgggattacaggcactcaccacctcgcccagctaattatttttagtagagatgcagtttcaccatgttggccaggctggtctagaactcctgacctcaggtgatctgcccgcctctgcctcccaaagtgctgggattacaggtgtgagccactgtacctggcctggcctaaagttctttactctgggcatatatcacctttacaaaaagaatctagaaaaaaaaaagagttaactaagaagaaggctgaggaagagctggtcccaggcagggaggaagagggcactatctataatctccaggccagtgccccaagtgacaaagggctgggggatgataactggccccccaggaggggccagagaatgctggatgggaatcccagggaaatactgaacagtcccaaacaggctggctctgaggtttggggggctgtgggtgggcagatcagtaagcataagcaccccctgagcaagacgatacacatggctggtgtatatctaccaccgggagtaactcatggaaaataccagctgtggctaccaagaggaagtaaagagccaattctgctcaatctagctgtttatgtcctgatagggctgtgtcatgataagcctgagggacctgtgtggccacacaggtgtctttctctggtaactttgtatgtgagctgggagctcttgtagctcatggggtcctacttccttgatgagctggggactagcctcagcgcagtgctttccccaagatcctcagaggcaggaagctgcctggaccaggtcttctatttgggaaagggctgggtcctctgggtttccacacacccttggcctcacagatgaagaccctactcaagctgggtcccctccttacccacagattgagaggaacctgaactgtcttccaccctccccactcaggaaccagtgagtcagaaaacctggctttcaatcttggttctattcaggacaagctccttccctccctggtctgcacccttgctcccagaccgttctagtgctgactttttctgattcccctttagacacttataatcttgggcctcaaggcctatggattatatttataattcagtgattctcaaacaggtttcttagggggcagtccattcttggtactatgagggtatggtaagatcaaccatctgagctggtgggctcactgtgccaagcttggaggagtgccaggtcttgccacaatcttactggggtcctagccagagcagtccaagctcctgcccaccagaggtccaccagaggcaggggttgggaatgaaggaggctcagagatgaggcaggtctgctagatgacacagctcaaagcaggatccacactttactgtttactcattgtttatggcccatccttggtcaagcacagctggcttcaggagtcttgatggcaattgggctgggggctaaagaagagaatgagaagctaaggcaagctctgccacagaagctgcagctatgcctcctgtttactctaccctgcccacctgagcgatgccagccatggtgctggtggggagaggaggcagttccctgctaccattaatccagcagttccttgatacaccagcagcagaggaggatgtaggcgacttccttcagggtccgctggaagccctcccaccctgtgcccatcttaatgacaggcacccgcagcccagtgtctcgaggggcccctccgaggaagaagggtagggtttgggctaggggctgtgtccggggctgcatgtgggcaacagttccgaggaagggtgtgggagctgcctctagtgccttttatcaacactgtccccacccccttcagcctcatgactacagagacaaaggatccagggtctagcaaagggaaggttctaggcctgggaacaggctgagtcagcccctctagacagggatgggagggtggggttagtgggagggagggcctggccactccatctttcatcctccacagctaggccaaggcagcttcccctcttccagcccaggtggtgccctgcctgattgcccttttcccagtggttggcacaactcctgctttcgccctctggtgggctcctgctgaggctgacattgagaaccatcagtgagagctcctttccagcctgttctgccctgcccctgggccccttagagtgagcacagccagtcagagctggcagcatttgacccacttctgcttctcccatcctctggagcaggaagacacagctagagcaacaggcacagtgagaggcacggtttattgccaggttataccctaggacggtgtccttccctccctcctagggtgggaggtcatgtgcgggagttccgctcctcttcttcgttctccagtagataggctggacggtatgtggggtgtcctcctgggctcaggcacttcagggccgggttccgcacggtattctcccgactccccagtgatgtgtatctggagcagggagggtggagggcaagcatgtggtagggtgggcgatcctattggccctccctatcccagcaccctaaaaactcccttacccattcccttcccctaatacccttaccctcggtcatacaggatacagtatgggacaaacagctgacgcagaaaatcccagatgtctctgtaggtccagtcctgggaggtcagagtaatagaatagtcacaaatgctcacctttcccacttctacccctgctgtcctgggaaggggcccatccatggctcttctgctcccttggcctctgagggagggcttgctatctgattctctggtatagcttgctctatgtatgcaaagagaaagagaaggacttcatcttctccactctctgctttccattcttgaaccaccctctagtgcaagggtggagcttgaggacagggagaaaccgtctattttttttttgagacggagtctggctctgtcgcccaggctggagtgcagtggcgtggtcttggctcactgcaacctctgcctcccgggttcatgccattctcctgcctcagcctcccgagtagctggcactacaggcgcccaccactgtgcccagctaattttttgtatttttagtagagacgggatttcactgtgtagccaggatggtctccatctcctgacttcatgatccgcccgccacggcctcccaaagtgctgggattacaggcgtgtgccaccatgcccggccctatttttttttttttttttgagacggagtcttgctctgtcacccaggctggagtgcagtggcgcgatcttggctcactgcaacctccgcttcccagatttaagcaattctcctgcctcagcctcctgagtagctgggattacaggcatgcgccaccacagccggctaatttttgtatttttttagtagagatggggtttcaccatgttggtcaggctggtcttgaaatcctgacctcgtgatgtgcctgcctcggcctcccaaagtgctgggattacaggcgtgtgccaccgtgcccagccctattttttttagacagggcctttactgttgcccaggctggagtgcactggcatgatcatggctcactacagcctcgacttccctggctcaagcgatcttcccgcctcagcctgagtagctgggactacaggcattgatcagcccacctcggcctcccagagtgctggggttacaggtgtgagccactgtgcctggccagaacttcctgtgatgatggaaatgttctgtatctctactgtctaatatggtggtcatttgaaatgtggctagtaca

SEQ ID NO: 1152 - DNA, 4001 bp, Homo sapiens
ccttcactccatgccttgccaagggaagccacattgatcccttcagattcagttcaagcatcgcctcttctgtgaaaacagtcctttctctggagcaggggaatcaatcccacctgcatcagcttcctagggctgccgttacaaagtaccacaaactggatggctgagaacaacagaaatttatcttctgacagttctggaggctggacttctgaaatcaaggtgtcagcagcgccaccacactccctctgaaggctgtagggaagcacccttccttgcctcttcctaacactcagtggttgccagcatggttgccaacaatctttggtgctcctgactttgtagctgcatcactccaatttctgtctccgtcttcccatggtattctccctgtatgtctctatgtctaaattcccctcttcttataaggacaccagtcattggattagggcccaccttaaaccagttatcattttaatttgattatatctgcaaagatactacttccaaataagatcacattcacaggtaccagggaattagagcttgaacacatctttttggaggacaaaatccaacccaccatctgttctcccaccgcatctgagcccaacataaacactgacatagtaatataattatttccagctctgtcacccaccaataacttctcatttatctttgtatcctaagtctctggcatacagtagttcctcaataaaagttgaacaatctgtaaaatgcttccttcccttagtccgtttccatttcagacttccttttttttcactacatcacaattttctaacacattcacacataaacgtgatcatgatttggtagtttctgatcatgtgtagtactgagacactacttttcatctgttttcggcattggcttcaaatggatatataacacagtcgacactctccaagtaaaccatgtttactaaactgatattaagtataaaagtcagccagaaataacgataaaatgtctgctgctaacagctcacatactcggataaattcatagtgaacagaggcgtactcgtatatatactatctacatgtttatagcagatgttaactggggatatctttgggtgcaaatttcaaggatgatataaaagccaatataaaaacaagtcatgctactctattcgacagattagaaatggaatgttttcctaccaaaatacaggaagccttgcaaaaaaccttttccgtctcgcattgctctgaagccatacagataagggacgcggtgtttttaccaactgccccatgcaaaaaacacatactacacacacactggtttcttctctgtccataaacagagaaaacaccgaagaaagcagtattaaaattacacgtaatctactctccacgactgcgagaaacaccgtctttctgggtgctttccattgacacccgcccgcggtcaactctgcccagttggaaaaatcattaggaaaaagaggattaagtttcccaatgctaagaacgctggagacaaagggtcctttgtggcaaataggaaactgcggaggggcagaaaaccagaagaaaggcgttagggtggcgtcaagaagtggaaaccttgtttaaaaactcaggagaggtggagggcgccgctctcgccgagggctcaggctggggaggggtctggtgccgccactggagagcaggaaggccagcggccttgcaaaaagggccaaggctcccccgaaacgccgctccacccacaccccaagggacgaagggagcggtcgatcgcctcccgaaccggagaggcgggaagggtggtgaggccgttccccaacggcgcgcggaaggcgcagccccaggcttgaccggaacggaggtggcaaccccaccacacgacaagcgagccggggaccgcgatgtacctttaacgcccgccatgtctcccgaactggggccgcggctgcttccggcttcctgccacggcccgggcagcctgcccaagccagaccgggagtcgccccgcggatcccgagcccgccccggccacgcagagccccgcccccgccggtgcagaactccgaccttagctcgcaaacgcggcgcctgctgctccagaccccgcccccaccactcacaaccccgcccccgccggtgcagaaccccgcccccagctcgcagaggccgcgcctgatagttcagacccggcctcgctactcagagccccgcccctgacagtacagagctcctcccctacctcgcggaggcagcgcctgcggctccagacctcgctaccgctactcgaagccccgccccagacaatgcagagctcctcccctagctcgcggaggcctcccctgctggtcccgccccagccctcaccggcccagaattccgcccccaactctcagaggccgtccctgctggtcccgaccccgcccccgccacccagaactccgctcctgccagtctagaactccgcccccagctcgcagagtccatctccagccctaaggtcccacctggtcccacagagctttcccagagtaaccccaacccagtgccctgggccctcctcctagatcctgagccctccaagtaatcctcaagcccgttcaatgtgggttgggaccttggctccgccccgaccgcgggcccagagtctctccccggcctctcagaacgcagtgcacgcagcgggggatcctccctgagccttcctgagaacggagatgtagaaagtggggagaggcaggagagggaaggaggggaaaagttgcaatcgatgggagagggacaccgactcactaaccagtgttatgttccctgagctcccaagtgcgtgctagtgtgcgagtgtgtgcctgtctgccttcacatgactgtggcagaggagaggcggggtaccagaggacaggccccttaggaaacactcctcattaagaacttgatatttgcataggtttgctttgcttaatagcaacgctttactgaaactagcggggtttttctttactccctggtttatttatagagacgaagaccatataagcttttgtgtccgaagctttcatgaaccttaaaaaaaaaaataaaaaaaaaaagctattatttttgtgccttggggcctcaaagtttgcaggtaaccaaggccagtttttagatctctgagagccattgtgtacttatcttacaggaatggagagttctgttttggcaaaagcaatctagaagatcattgaaacagtctggtccaaatgcttcaacttacatttaaggaaagaggtgcagaaaggataggacttgcctgtcacacagctctttggaggaggttggattctgggccacttcccctcattctagctgagatccactctacctgatggtgccgtccctcttctcttgctttttctccgttttcaaaaggactgaaagacaaaggaatctgtggaaacctagcttcccctggctacctgagaagtataaattctcaccaccatcatgtttcatgatccttgctcagtttactttttcaaaattgcacattgagcatgttactgtttcaagaaatgtctatttgttgattcagtggagtatttttctagctgtcagtttatttttctagctcctctcatttctcctcatagacggatggcacactcactgaaaacagcattgtaatacctgactcactgctgatgcttggagatccaatactacagtacagcactttttactttggagccttcaatctactcaagagcattggcagtgtatgccactttggtttaaggattattttgagctgaaggcaattaggaagaagcaaataggtacacggtactagaaaagcactctgccctccctctatttgccaaaaagcaggatataagtttacgaaggtgtacctccttcctgctctaccaggaaagacaaagattaatcaccagagacaattttagacccctgtcagcctggagacaacacaagaaaaatctacatgataaaccttag

SEQ ID NO: 1153 - DNA, 4001 bp, Homo sapiens
tcaaatccatttcactctcccaaactgcatacaaagtacatgtgggtgagaaaagattgttttattattttgaatccaagccaccgaaaagaggcagaaatattcttaaacctgtccttactagtgataactaagtttcaaataatcttgaaaatgctactgataaaacattagaagtagcaacaaaagctactgtaacattctctgtctgctaaaacaacccgacattttcttctaatcaaaaagaaagtatgaagtacactaacccttcacagtacatactcactgtagacacttttgtgtgtgcgtgtgtccattcctaatttctggtttatctgtttagttaatctctgctattttctgggattcattccaaggcaactaactgcattactaaaattggcatctctgctattgtgcttaatttcacagcggctcagaagtgacctgaaaccaattttttaacattctgcccacaactttatgctaaaaagtagccagcactgttcaagaacaataattgataggaaaggtgcaatgtttgttttccttcaaacacatttttatttcctccagatgtacaatacttaaagagaatacgtgctatgctaaagccatgtatttttgttgcagtgttgcaaatactggcttaaagattatttaaggtagtatgagaggtgtaaatattcatataaatctatatgtttctgagctctttatacatgtttttctctataccttttggtgggaaaatcctaaaagcctaagtcataaatgcatataaactagtgccaagattaatacagattgtttttatttcatgaaattatgaaactagcaatgtttgtaacaagttaaagagagttaaggaattatacttttttattctggggcataccttagatattctcaaaaggccctcagaaattatcttaatccaaccctccaacttgaaaaaatgaggaaactgaggcccactgaggttaaacgaaccacagtgtcataggtaataaaatggaaatcacaccaaaactcagattttctgattccaattccagagccgtgaaagggtatttgtttcaatatactttaatacttacagaaataaatgttaacagaggacaccccaggccacccttcagtataaagaactccattaggctgacaagagcccagaattctaatctgtttgcaaacacaagttctagaaataacaccagaaagaaccagtttttaaatggcaccatacctgcggttcccaaatgattcctcagttgggtctctttttctcaccactacaaatctctttcagtaagtggtttggttaggattgggtttggggttttgctgctgatgctgctactgttgttgtttaatttgcttgcagggaaggggggaggtgggaaacaaaagctgaggtctaaaccatccctacagaacaattattttttctcttgtcattcgaaccagcaaattctcttcaggaccccagggtttactgttttaggtggcagtcccttcagtttccaaagtaggcacgaagcctggaaaagaagttggccgggtggcatgctctctcggtggtcccgagcaggttcgctccaggcgctgccggctgctgtcagccgtgtgtccagatcttcctcgccccacgggagccgagagtcgcccggcgtcgcacccaccccacccccgccgcccgccgggcgctggcccctctggtggtcccgctaagctgccccggactcccagtccctaagcggcccgcggggctccgcgtctgccacgcgcgtcccaaagccccattctcgagttacccagagcgggaagaggtggcaatagggggtgtcggagagggaagcaggtcccaccttgatccgggggtccaactcgaccgaaggcagagatggcggcggcgccggggctcgggcacctgcgtcgcgcgcgctcggctggccgtgggctctgcgatggggccgctccgaactcctcgcccaaggtgcggggcaactctcaggagaggaggagggcagccgagtgcgtggggaggtggggctgagcaggagcaggctggggtggggagaagggagggaagagtcgggtggccgcccgcgtgcgccccgcgccctccgcagccgcccctgagcgggaggagcggactcgagcggctagggcggtcgcgcaggtggcgggggcggcggcggggaatgccgctgcgggtggccgcgggcctgcgggaggagagacccggcgctggggagggaggacccctgcccgcagggaggccgagagcccaggcgaactcagcaagcacgcggtgccgcgagttccctggcagtacccccccaccccggacccgcgtcggtgaccgcaggcttgagataggcactggggttcccccgtccctcccacccccagacttccagaactctgcagcagcagttgtgtaaaatgctacaattaaggttgcaataactgggaggagtgggaaaagaaagctaaatggaaaagatcaaaactagtgaggtcatgagtttcctgataccagggatgcttccgccagcatcttcgtcatgcttatcaggaaggctgaagagggcattcgcgcatctggtgggtgggggtgtttggaggggattgagctatatgaccaccactctttcaatcctgaaattcaatgatgtttgacgtagcaaaattttttttgaaagtactcttgaacagtctgattccaactccaaagtaaatagacattttccggccctccactcaaaatgttcactcattatttgtctatgtattaaatgcgtctttattgaggagtgtcagacaatatgctaggtgcagttatagagttccttgaatttagagttaggggtgggaggacagacagataagcatgtattcatacaattaccatcagcgctgggtgatatggaagaaatcaacagggtaagggagaaagaatgaagcgtagtggacattctctagattggatggatggctaatttttaaaggcctctacttaatttgactaacggcctcataggaagaagcattccaggcacacagggaaagtgagttgcgggaagtagcccagagatgggtaggccagaagcgacgactcccggctccctggcccagctgctgtgcattatggaaggaaccttgctataacttcgcaaatggagcttctccttcataggaatcgcctctcagaacgagtgtcacttttttgaatagcacttggatctccagaccagttgttgaagccactttattcagaagtgtcatatttgtgtactaaatgggctttcagcactatctgtggtaggcgaaaaataacccagaaacactaacccttggatttccaccaaatctcaacagacagacaggtgtctctattggatggagacaaaaattgaggtaggtttctgcagactatttagaaaacaaaacaatacaaaaagagcctttaattaaataatcagtacgaactaacatattagtttcctaggtctgctgtaacaaattaccacaaacttaatgctcaaacagagatgtattctctcactgctctggagactaaaattccaaaatcaaggtgtcagcaggtgtgtactggctcccaaggctctatgagaaaatccttccttgcctctggtggcttcaggaattctttggcttgtggccacgtaactccagtctctgccttcatcttcacttgccttctcctctgtgtctgtgccctcttctcttctttttgttgtaaaggacatttgtctttggatttagggaccaaccagataattcaggatggtctcatctcgagattcttaacgtagttacatctgcaaagaccctttttccaaataaggtcacattcacaggttacaggaattaggatgtgggcatttttggtgggaagtcactatttaacccactataactagtaaactaatagagatcaaaatcattgcctactgtggtatcgggtgtca

SEQ ID NO: 1154 - DNA, 4001 bp, Homo sapiens
ggctccctgcagtccgcagaattctcttccaaatctggcctcactgacttttctagccgcctctcctactactccccacacacatctcgacattgcaatcacaagagttcattttttttcctgaatacatcatgctttggttctacttttctctctatctggaggagccttctttcctctccccctggcaatacttagggcaggcttcaatattacctcttctttgaagtctaatttctctgagataaagctagagtctccctcctttgtgctcccgcagccctaagtatatgcccttgcagtagcccttactacagtaactcttaacagcaaagcaagacaaagcaaagacgttagtcgagcatttaattacttgtacaagaactggaatgcagtaggtatgcaatacatgtttgtcaaatagttttagaaagtgctatgatgaagcgacataaccaaagacataacgcaattattttgatttcaagtccagcgctcttccgagtaactaggaaaaatgaggggaactgtgtaggcagaatgctgtggaggggtggaaatctgaggtccccaagagtctctaagtgtctctttagatcgaatcgaaggtcttttaaacaacagatataccagatataatgcacaactctttctccccccacccccaatacagtgggactaataacagcatctacctgacaagatattatgaagattagggcaaatgcgttaataaatgcaaactgcttaaaatagtgcctggaagtatgtgctggctatcatcatcatcatcatcgtcaccatcaccaccaccaaacaagcctggaacgctccaagcccaagtgtacacttggacacatggcactctggcattccgaaaaatactcattttctttgtaaacctggcagactagccagagggtcccccccccgcccccacacacacacagaaagggccaggcagcccctgctggcgacgtggcaacctcacatcctgaaagagagctgctgaatcaaacagcaggaaaagcaccactggaaaaccaaccggaagggagatattgtagaccgctactagcttctcactcggacacttacaatgacatcagaatgggagacccaaactgccgctttaattccttccaggagatttcccagggaacaaaatggccatgagttttgcttggcctgtgccctaaccccaggctggacctttggggttagcatctgcccatgcgaactgggcgaggaaggtctcctgccagggagcagctctccccggctccgaggagagctccccagccaggaggccactttcccctccctgcggacacttccccgatcccccaagctcctcaggtcccctgcaacactcctctccccagaaggaccccggccgcctggttccaggcaggtctgcaccttgaagtaggcgacctgcaggtagttgtaggggctccgcttgcggaactccagctccatctcttcgctgagcgagtgggcggccggcggcccgaggcagcggcgcaggcaggcagcgcgacgcagaaggcccccgaagaagctcaggtcgcgcagggcggcggcgcccgaggcctgggccgggctgggggaccagtcggggtccagctcccacgggaagtcggcggcacactgggtgcggcagcgcaggcgaagggcgcggagggctgcccgggagcgcagcgcccgttccatgctcaggaccaccccgggccagtccccgcgcgcgtaggctgcggtcccctcggcgaagagcagatcaggcgtcaccatgccccatcctgcctcggactcgacctcggcttgggaggcagcggccacgacagccagcagtgtggtcagcagcttcaacgcgcgtaccgccatcgctccctcagacctaacggaaccgccagccacccgccaccaaggccggagtcctacccccggcgaaggcccgcccccgggcgaagccccaccttccaagccgggcggcgcatgcccacgaggcttgcaccgcctcttttcctttcagtcagcccggatccccccaccggccctcagcgaatcccggcgcgtcagccggagccccgcctccgagctcaggccttgctcagtcgaactgacgcccagtagacaagaaagacggaagctccgcccacgcgcctttatgcgcaggctcttcctactcgcacagcccagggagtggggaggataaggcgctgtcatggaggacgccgccgcgccggggcggaccgagggggtccttgaaaggcaaggagcgccgccagctgcaggccagggaggtatgcggggcgggagtcagcagggggaagtcagctcccgcgaggcagccggtctcggggctccgcgggaggccgacggcgggagctcacggcttgtgttcctgggtgtgtgtcgcaggagccctggtggagctcaccccgacccccggcggcctggccctggtgagcccctaccacacccaccgggccggggaccccttagacctcgtggcgctcgcagagcaggtgcagaaggtgaggaggcgcggccggggcagcgaataaccatcttcgttcacgttgtactctgcgtctttcggctcagacctcactaccacctatggtgggggtggcatttgctcttgtctccattttacagacgagtaaagccgactgtcattgtgagtcggtggcctgattcgaatgaccttctgggaccaaaggttcctctaactgcaacttgagtgcccataatcttccttcgtgggaaggtttacacaacactttagtgttcattatttcatttgcaccttaggacagccttgtgaggtaggcagtacagagttattcttcccatttgacacaaagaaaagttcttcgggaagtttcaaggtccgcttattttaagctgcttcccataagatctttgttacctgagagtttaaacatcttctagcagggcaaggactccaagtttagtcctcattaaacacagtattcccaagcccagtgtttatatatggatggccaaaataagtcaaataaggaggaaatgtgaaataatggaaaaaacactggaagtttggacacatgagtattaatcccacttttgatactaacttgcagtgcgacttaaggcagattacttctctctggacctcaactattttatctgtgaagtgaaaggtttgaagtagtagagctccaagatctaaagttttgtcattattcaatgaaaaaccagattccttcttatctcttatcaagacttccagttgtacaccctcttcagtgtccacagatggagggtcctgctgttttaaagattatcatggccccttatccctgtatacactatcagatttggccttgattatgttccagggtctttgctttgcccaaaattatttaatgtgctcaaattccctcacatctctttttttttcaatgatcctagaaatccttcgaatccttttttttttaaaattaagaaaaattcagatacgcagaaagctcctttaattcaaaacttggctttcttctttttgaagagctggggagcaaagtgcaacttttatttattaagagaatatgcatctagttaatcagattactcttattgggagggaggttggcagggacagaatcttgtgcacacaacgtattcatgtgctattgaatgactatcgtgtttattacgatggcctgaacagatggaagaaagaacacagtttttgtctttcatcctataatcttatgaaatacagaggatgcattattatgctgcctctgtttccccaatacaatctgtatttgagaagctgaagaaaaaaaaaactttagagacaaacaaattgaatcaaacatattaactatctaaaatgtactttttggccaggtgccgtggctcacacttgtaatcccagcactttgggaggccaaggtgggtggatcatttgaagtcaggagttcgagaccagtctggccaacatggtg

SEQ ID NO: 1155 - DNA, 4001 bp, Homo sapiens
gcatgttgtttcataagccctgcgccatgtcacgtgctgtcctccccacttgggatatactccaccttcactccatgccttgccaagggaagccacattgatcccttcagattcagttcaagcatcgcctcttctgtgaaaacagtcctttctctggagcaggggaatcaatcccacctgcatcagcttcctagggctgccgttacaaagtaccacaaactggatggctgagaacaacagaaatttatcttctgacagttctggaggctggacttctgaaatcaaggtgtcagcagcgccaccacactccctctgaaggctgtagggaagcacccttccttgcctcttcctaacactcagtggttgccagcatggttgccaacaatctttggtgctcctgactttgtagctgcatcactccaatttctgtctccgtcttcccatggtattctccctgtatgtctctatgtctaaattcccctcttcttataaggacaccagtcattggattagggcccaccttaaaccagttatcattttaatttgattatatctgcaaagatactacttccaaataagatcacattcacaggtaccagggaattagagcttgaacacatctttttggaggacaaaatccaacccaccatctgttctcccaccgcatctgagcccaacataaacactgacatagtaatataattatttccagctctgtcacccaccaataacttctcatttatctttgtatcctaagtctctggcatacagtagttcctcaataaaagttgaacaatctgtaaaatgcttccttcccttagtccgtttccatttcagacttccttttttttcactacatcacaattttctaacacattcacacataaacgtgatcatgatttggtagtttctgatcatgtgtagtactgagacactacttttcatctgttttcggcattggcttcaaatggatatataacacagtcgacactctccaagtaaaccatgtttactaaactgatattaagtataaaagtcagccagaaataacgataaaatgtctgctgctaacagctcacatactcggataaattcatagtgaacagaggcgtactcgtatatatactatctacatgtttatagcagatgttaactggggatatctttgggtgcaaatttcaaggatgatataaaagccaatataaaaacaagtcatgctactctattcgacagattagaaatggaatgttttcctaccaaaatacaggaagccttgcaaaaaaccttttccgtctcgcattgctctgaagccatacagataagggacgcggtgtttttaccaactgccccatgcaaaaaacacatactacacacacactggtttcttctctgtccataaacagagaaaacaccgaagaaagcagtattaaaattacacgtaatctactctccacgactgcgagaaacaccgtctttctgggtgctttccattgacacccgcccgcggtcaactctgcccagttggaaaaatcattaggaaaaagaggattaagtttcccaatgctaagaacgctggagacaaagggtcctttgtggcaaataggaaactgcggaggggcagaaaaccagaagaaaggcgttagggtggcgtcaagaagtggaaaccttgtttaaaaactcaggagaggtggagggcgccgctctcgccgagggctcaggctggggaggggtctggtgccgccactggagagcaggaaggccagcggccttgcaaaaagggccaaggctcccccgaaacgccgctccacccacaccccaagggacgaagggagcggtcgatcgcctcccgaaccggagaggcgggaagggtggtgaggccgttccccaacggcgcgcggaaggcgcagccccaggcttgaccggaacggaggtggcaaccccaccacacgacaagcgagccggggaccgcgatgtacctttaacgcccgccatgtctcccgaactggggccgcggctgcttccggcttcctgccacggcccgggcagcctgcccaagccagaccgggagtcgccccgcggatcccgagcccgccccggccacgcagagccccgcccccgccggtgcagaactccgaccttagctcgcaaacgcggcgcctgctgctccagaccccgcccccaccactcacaaccccgcccccgccggtgcagaaccccgcccccagctcgcagaggccgcgcctgatagttcagacccggcctcgctactcagagccccgcccctgacagtacagagctcctcccctacctcgcggaggcagcgcctgcggctccagacctcgctaccgctactcgaagccccgccccagacaatgcagagctcctcccctagctcgcggaggcctcccctgctggtcccgccccagccctcaccggcccagaattccgcccccaactctcagaggccgtccctgctggtcccgaccccgcccccgccacccagaactccgctcctgccagtctagaactccgcccccagctcgcagagtccatctccagccctaaggtcccacctggtcccacagagctttcccagagtaaccccaacccagtgccctgggccctcctcctagatcctgagccctccaagtaatcctcaagcccgttcaatgtgggttgggaccttggctccgccccgaccgcgggcccagagtctctccccggcctctcagaacgcagtgcacgcagcgggggatcctccctgagccttcctgagaacggagatgtagaaagtggggagaggcaggagagggaaggaggggaaaagttgcaatcgatgggagagggacaccgactcactaaccagtgttatgttccctgagctcccaagtgcgtgctagtgtgcgagtgtgtgcctgtctgccttcacatgactgtggcagaggagaggcggggtaccagaggacaggccccttaggaaacactcctcattaagaacttgatatttgcataggtttgctttgcttaatagcaacgctttactgaaactagcggggtttttctttactccctggtttatttatagagacgaagaccatataagcttttgtgtccgaagctttcatgaaccttaaaaaaaaaaataaaaaaaaaaagctattatttttgtgccttggggcctcaaagtttgcaggtaaccaaggccagtttttagatctctgagagccattgtgtacttatcttacaggaatggagagttctgttttggcaaaagcaatctagaagatcattgaaacagtctggtccaaatgcttcaacttacatttaaggaaagaggtgcagaaaggataggacttgcctgtcacacagctctttggaggaggttggattctgggccacttcccctcattctagctgagatccactctacctgatggtgccgtccctcttctcttgctttttctccgttttcaaaaggactgaaagacaaaggaatctgtggaaacctagcttcccctggctacctgagaagtataaattctcaccaccatcatgtttcatgatccttgctcagtttactttttcaaaattgcacattgagcatgttactgtttcaagaaatgtctatttgttgattcagtggagtatttttctagctgtcagtttatttttctagctcctctcatttctcctcatagacggatggcacactcactgaaaacagcattgtaatacctgactcactgctgatgcttggagatccaatactacagtacagcactttttactttggagccttcaatctactcaagagcattggcagtgtatgccactttggtttaaggattattttgagctgaaggcaattaggaagaagcaaataggtacacggtactagaaaagcactctgccctccctctatttgccaaaaagcaggatataagtttacgaaggtgtacctccttcctgctctaccaggaaagacaaagattaatcaccag

SEQ ID NO: 1156 - DNA, 4001 bp, Homo sapiens
tggacttctgaaatcaaggtgtcagcagcgccaccacactccctctgaaggctgtagggaagcacccttccttgcctcttcctaacactcagtggttgccagcatggttgccaacaatctttggtgctcctgactttgtagctgcatcactccaatttctgtctccgtcttcccatggtattctccctgtatgtctctatgtctaaattcccctcttcttataaggacaccagtcattggattagggcccaccttaaaccagttatcattttaatttgattatatctgcaaagatactacttccaaataagatcacattcacaggtaccagggaattagagcttgaacacatctttttggaggacaaaatccaacccaccatctgttctcccaccgcatctgagcccaacataaacactgacatagtaatataattatttccagctctgtcacccaccaataacttctcatttatctttgtatcctaagtctctggcatacagtagttcctcaataaaagttgaacaatctgtaaaatgcttccttcccttagtccgtttccatttcagacttccttttttttcactacatcacaattttctaacacattcacacataaacgtgatcatgatttggtagtttctgatcatgtgtagtactgagacactacttttcatctgttttcggcattggcttcaaatggatatataacacagtcgacactctccaagtaaaccatgtttactaaactgatattaagtataaaagtcagccagaaataacgataaaatgtctgctgctaacagctcacatactcggataaattcatagtgaacagaggcgtactcgtatatatactatctacatgtttatagcagatgttaactggggatatctttgggtgcaaatttcaaggatgatataaaagccaatataaaaacaagtcatgctactctattcgacagattagaaatggaatgttttcctaccaaaatacaggaagccttgcaaaaaaccttttccgtctcgcattgctctgaagccatacagataagggacgcggtgtttttaccaactgccccatgcaaaaaacacatactacacacacactggtttcttctctgtccataaacagagaaaacaccgaagaaagcagtattaaaattacacgtaatctactctccacgactgcgagaaacaccgtctttctgggtgctttccattgacacccgcccgcggtcaactctgcccagttggaaaaatcattaggaaaaagaggattaagtttcccaatgctaagaacgctggagacaaagggtcctttgtggcaaataggaaactgcggaggggcagaaaaccagaagaaaggcgttagggtggcgtcaagaagtggaaaccttgtttaaaaactcaggagaggtggagggcgccgctctcgccgagggctcaggctggggaggggtctggtgccgccactggagagcaggaaggccagcggccttgcaaaaagggccaaggctcccccgaaacgccgctccacccacaccccaagggacgaagggagcggtcgatcgcctcccgaaccggagaggcgggaagggtggtgaggccgttccccaacggcgcgcggaaggcgcagccccaggcttgaccggaacggaggtggcaaccccaccacacgacaagcgagccggggaccgcgatgtacctttaacgcccgccatgtctcccgaactggggccgcggctgcttccggcttcctgccacggcccgggcagcctgcccaagccagaccgggagtcgccccgcggatcccgagcccgccccggccacgcagagccccgcccccgccggtgcagaactccgaccttagctcgcaaacgcggcgcctgctgctccagaccccgcccccaccactcacaaccccgcccccgccggtgcagaaccccgcccccagctcgcagaggccgcgcctgatagttcagacccggcctcgctactcagagccccgcccctgacagtacagagctcctcccctacctcgcggaggcagcgcctgcggctccagacctcgctaccgctactcgaagccccgccccagacaatgcagagctcctcccctagctcgcggaggcctcccctgctggtcccgccccagccctcaccggcccagaattccgcccccaactctcagaggccgtccctgctggtcccgaccccgcccccgccacccagaactccgctcctgccagtctagaactccgcccccagctcgcagagtccatctccagccctaaggtcccacctggtcccacagagctttcccagagtaaccccaacccagtgccctgggccctcctcctagatcctgagccctccaagtaatcctcaagcccgttcaatgtgggttgggaccttggctccgccccgaccgcgggcccagagtctctccccggcctctcagaacgcagtgcacgcagcgggggatcctccctgagccttcctgagaacggagatgtagaaagtggggagaggcaggagagggaaggaggggaaaagttgcaatcgatgggagagggacaccgactcactaaccagtgttatgttccctgagctcccaagtgcgtgctagtgtgcgagtgtgtgcctgtctgccttcacatgactgtggcagaggagaggcggggtaccagaggacaggccccttaggaaacactcctcattaagaacttgatatttgcataggtttgctttgcttaatagcaacgctttactgaaactagcggggtttttctttactccctggtttatttatagagacgaagaccatataagcttttgtgtccgaagctttcatgaaccttaaaaaaaaaaataaaaaaaaaaagctattatttttgtgccttggggcctcaaagtttgcaggtaaccaaggccagtttttagatctctgagagccattgtgtacttatcttacaggaatggagagttctgttttggcaaaagcaatctagaagatcattgaaacagtctggtccaaatgcttcaacttacatttaaggaaagaggtgcagaaaggataggacttgcctgtcacacagctctttggaggaggttggattctgggccacttcccctcattctagctgagatccactctacctgatggtgccgtccctcttctcttgctttttctccgttttcaaaaggactgaaagacaaaggaatctgtggaaacctagcttcccctggctacctgagaagtataaattctcaccaccatcatgtttcatgatccttgctcagtttactttttcaaaattgcacattgagcatgttactgtttcaagaaatgtctatttgttgattcagtggagtatttttctagctgtcagtttatttttctagctcctctcatttctcctcatagacggatggcacactcactgaaaacagcattgtaatacctgactcactgctgatgcttggagatccaatactacagtacagcactttttactttggagccttcaatctactcaagagcattggcagtgtatgccactttggtttaaggattattttgagctgaaggcaattaggaagaagcaaataggtacacggtactagaaaagcactctgccctccctctatttgccaaaaagcaggatataagtttacgaaggtgtacctccttcctgctctaccaggaaagacaaagattaatcaccagagacaattttagacccctgtcagcctggagacaacacaagaaaaatctacatgataaaccttagtatttggccttcatctgcaactagtctcccatatatttgttttccgacaatttgctgcccctagagactcaagatcctttatcttgtcatttctttaaaaatttattgttccttggctaatatgctgtataaacccaagttctaaccaaatctttgagttgcttatctctgagtattcccatgttacctatatgaacaacgcac

SEQ ID NO: 1157 - DNA, 4001 bp, Homo sapiens
cagaacgagactccatctcaaaaaaaaaaaaaaatttaattaattaatggtaaatactaatcaaacagtcccgtacaattaccagaggtattcatttagattttcatttccataaaatgagaattacagtattcacatcattggtttgttctgaggattgagttaataaaacagcgaaagagtaagcgctatgttagctattattattgtgaatagaaagaattgctcttcctcctccaatttaaacaaatcaaagtagggaaaaatccaatacttttaatactattaagatacggttttctctgttgcttaaaaaaataataatcacagggcaggggagtgttggaaagcatcagccacattttttaagataaaagcactcatggacactacactacatttaatagctccaggaaaaactcgactttaagcagaactaaaggggaaatgaaaccagagcttcctgtattttacttccagcaattctgtcattatactgcacaccaacaatacacaccgatcaaatctatcactttttctttattaagaaaaaaaactgtatccctcttggtttaccacctaaatatagccccatgtcattaacttaattcgttagtcaaaacctcaaaactctggctccgtgactcaattcaggaagtaagaacaagagcaaaaagaatggatgccgagttgccatacacatgtataataacaagccagtgacccaatttaagccatctgcttgcattaaatcacgcaacccccgaagtatccccagggacaggtcccgccagcatgaacacttcgtatgcatcacaagcagccatcacttaagtttcacgtacggtcaaaggaagtcacatgacttgcgctttgcaatgtttaacactgcagtcaaatgactcggcatcctaaagagcgtgttagaggcagggaacgcaatggaggtcactccactgtcactacaaattccgggaaggaaacttccccagattcctccacttggaggtggcgctcggcctcaggctaggagggaacaggtgagaaagcagcccaggtggggtgggtttgcagcgaggagacaccccagggcaaacagcctgaccccagccagggatgtccaagaaaggccgcgactcctgataatcccttatgccccggagcgcctcgcctgcagaggcagcgtccccgccacccagccccggctctgccgcggtgaggaccggcgggtcggggtggactggacactgtcccacccatcaaatggtgatttaggagccgtgacatccgaatgccatcctccactggcgagaccctcagagcagccacgcctctagcgactgccccgccacccgaggccgggggtcgcgcgactcacccaaagactggtgtttcaggcgctccacggagcaggttgtttgtcagcagctaagtgccgtcagggttcccggctctggcgtccgtgggcggctacgggaagcgacaggagtcagtcctcgttcacttcccggctcgcgcgcctcactgctgtggtctccccaccctccccgcgccccgccttctgtgtctggggcgtccctggcggctctgctgggttttggacagggacccgccgctgatcgccacccagctcggcctcctgcacagcctctggagccttggaccgcgactggcttgctgtgggacgagcacagagggataaggacaaagaatgtgtcctgggtggatctggctgcctttgcccggaaggcggagtggggtgggaggtggtaggaaaatgggaaggaaagaaaagaaaggtgggccgacgtccacctggctgttccaggcctccaggtctaggagggagggcgctcggggctgggacttttcaggaccagggtggtcaccgcacaggccccgcctgcctggaccaagcgctggccttcccggggcgcccaggtccacggggtcaacgccagggttttctcagcttcctcgtctgcctcggatccaagtccagacagtgccagaagagacttggaggcgctgctttttgacagtacacacctctgtatgcaggtgaaacggtgggggaagggttcagtacgctggactgtgcccagcccaagctccccatccgttagtgataacttggactcgcagccactccgcgtcactcgccagttatcctgcgtgtgggtgttttctccaaattggacacttagggaacagtttaagcagtatggagcacaattctgtgcctattagatgctcttaaatacccgacttctcagggccctacactgactgatagtttgacctattggctgtaaacacaccagccagaaatacaaataaagttaaacaaagtcatgtcagccacttggaatggctggctgcttactgtttattttctgttagggacctcaaagttctcatcttctctacttggcttttatccacatttgtttggaaagatatattttagtgtcattaacgtgggctttctcctccctggcttttgttttcattattttttgttttaattgaggaattcattacaagtcccataactgggaactcatgttctgattcactgttgcttttctctcctccttacccattttccaagcctgatgcacttctcaagatccaatctgaataggtgaatttacccttgacatacactgccttggatttatagctgtcttttggtatgtgttgtgtgttttatctatccaactcgactgtagtttgagaaaaggaacttgtcttatacagtctccagtgcatagtgtaatgctttgcataaaatagatatcaatgttaggttgaaatgttagattattgataaagtcaggagcaattgaatatcttcacaattctgcctgagtctccccccagccccgccactttgagacagggtttccctcaagtgatcctcccacctcagccccaggagtagctgggactatagacgcacaccactatgcccagctaatttaaaaatttttttttgtagagacagggtccactgtgttgcccaggctggtctcaaactcctgggctcacaatatcttcctgccttggcctcccacaatgctgaaattacaggcatgagacaccaagctgggccctgagtcaaccttgtacttctttacaaagctaaaataagttgaaataagtacacataaatgctgtgtttcttttgtaagtcatatttaggtgcaaacggggctgagtgaaagggccagagagcagagttaacaaagaaaatctggattaaaatgttcataaatcctaagaacttattcctagaaatatctccctcatttggcactgttgttcaattagcccagtgtgttattttaaataagcaaatattcactgaatgcctatcatggccaggcacagcagtaaagaatactagcatgcaaaggacctcatgggcccttctagatagagtcccacatctcttacattattactgcagtatcctaatcggtctccctatatttgcccttgcccctctgcaatgtagtctcaacacaacagccagagaagtcatgacaaaacataattcagatcatgttaatcccttactaaaacctacttttttttttttttgaggcagtctcactctgttgcccaggttggagtggagtacagtgttacattctcagctcactgcagcctctgcctaccgtgttcaagtgattcatgtgcctcagcctcctgagtagctgggactacaggtgcgcgccaccatgcccagctaagttttgtatttttagtagagatgaggtttcaccatgttgcccaggctagtcttgaactcctgacctcaagtgatccgcccgcctcggcctcctgtaacctgggattgcaggtgtgagccactgcatccggccaaccgtctactaatttttgctcattctttgagtaaagatccagttcttacacgagcacttcctgatctgcccgaatcctcacacactgtgatttcatctcctactact

SEQ ID NO: 1158 - DNA, 4001 bp, Homo sapiens
gaagccgaggcaggtggatcacttgaggtcaggagtttgagaccagcctggccaatatggtgaaaccctgtttctactaaaaatacaataattagctgggccttgtggcgcatgcctgtaatttcagctactcgggaggctgaggcatgagaatcgcttgaacccagaaggccgaggttgcagtgagctgagattgtaccactgtactccagcctgggcaacagagtgaaactgtgtctaaaaaaaaaaaaaaaaaaaaaaaaaaattgtacaaaacaatactcctgttatgtgtaaaacaatctactttttcattttaaaaaaatgctgcttatagtccactaaaatgtttgcaagccccactaatgggctgtgagctgaagtttgaagaacactgggtagtatgttggtgttagctcatactggcttgtgacagccatttttgtacataacttccatgttgataccttgaagttatccagggcaactgctagaacttaggaactttttcccccaaagaacaagatcttaaacatttaccagcacgctactgactttactcatgtgaatgatccgtggagaggagaaactgatcatgcaggagaggggatggtgttcccaataaaagttgcgaaaaccagtttcagaacaatagatattgccaattatttgccacaactgcctgagagttatgcagataaaaggatcacttctggtaggatcaatttctttttcatctatattgtcctctttccttgcccaagaagccacatttatatggtataatatagccacacatttagaaatagtctttttttttttttgagacagagtctcactctattacccaggctggagtgttgtggtacaataatggctcactgcagcagtgacctcctgggctcaagtgatcctcccacctcagcctcccaagtagctgggactacaagtgcacaccaccatgcctgactaatttttttttttttttggtagtgatggggtcccactgtgttgcccaggctggtcttgaactcctgggctcaagcagtcctcctgcctcaacctcctgaagtgctaggattacaggcatgagccaccatacccaggcaaaattaagtcttacaagcaaaatgttaaattatatatatagagcccacattttttaaaaaactagtaaaaaaatcatgattttagacatgaattgtaagctcttgctacttagcagggttaactgattaaacagaaatagatgccatattctatcgatgtgaaccgtattgtttcaagctaaggaatactctggcagtgattttgcttattgttttgttgctgtgtcacttttgttaacatgattgtaaaatttttggaccccctctccaaccatccatgaaatagcggtgctaagtgctgggaaaatgtgctccaactcaataattttggaatacaagttagatatgataaaagagtatcaagaactttaaagaactgccttggtatgctgtgaatttagaaaccagaactccgtcacagaacctgtgacaataatgataaaaaaaaatatgtgaaagcaaaaatttgccacaatggattatacatttgtgagcgccgagaacacataccctgctattctcatgagaaaattaatcaaaatatgtaggttttaaattatgcaacatcttcaggaatgcattctttacaaaaccacaatactcacatccttatacatacatctgcttccccaggaagtgtcatggacggtgtcttctacctcttccgattatcttccccaatctaaaggaattcatttctcctttgaatcctcttgctttgacctaatctcccctacaccccaatactagccccatccatgagcaccaaactcttttttttcaccctccagaccccctatgatctgattcaccaggcttacctccgaagttctacaggatcatgtcccaaatccagtcttttcaggtgggagaaacaagcttctagaactatggttttgtcataaaataaaagaatcttagtgacgagagggatcttaggaggagtataaattaattcatctcaatagctcaaaggatgagatagcctattttgtgaaatacattttttgaatggcttacagactatgatgttagtactaaaaaatgctgaattatttgatatgaggaaaatgtatctgaaattatgtaaaatgtaaagacaaaatgatactaaaaatgtataaatagtatacatgggccgggcgcggtggcttatgcctgtaatcccagcactttgggaggccgaggcagatggatcacgaggtcaggagttcgagaccagcctggacaacatagtgaaaccctgtctctactaaaaatacaaaaattagccaggagcggtggcaggcgcctgtagtcccagctactttggaggctgagacaggagaatcgcttgaacctgggaggcggagattgcagtgagctgagactgcgccactgccctccagcctaggtgacagagcaagctctgtaaaaaaaaaaaaaaaaaaaaaaaaaaaaaaacagtaaaaaaagtgcatatgtatatgctgtatatatccagtaacagtcagacagtaatttacatacacatatttagcaaagtgcaaaagaatgatgtttaatgtagtgttcattgttatcttttctcttgcaaaattactgagattcattaaaaggcttccctcagcaaggcagtctcaatatttaaccaacccttccagcgcatagctgatctcttccagcttgtgtttacacagttcattgtaaagcaacaagtaaaacctcaggaatttctatggcacgttagagcaagcaaaaaaattgaggtgatttttttaaattaaaaaaaagctgttgaatccaaccaagtactcttccaaaaatattttatctgggagtattttaaaacatacacaagaggacctcctctttcggctttggagccccctccctctgtctctgtacgggggagcgtcttccttcagccttctcttttctttcttgcctattagactctctgctccttaaaaccaaaaccaaaaacaaacaaaaaaacacacaaaagtagagagatggtgtgataaatacctgtgctttcatcgcccagctccagcaattatcgacgtggccaatcttgtttcacctacacctcacccacttcctccccaccactggttcattttgaagcaaatctcagacttcatttaatctgtaaaagcttcaaaactaattgttagatttaaaggtttaataaggtccggctgggcttaattttttggccagaagactttacaggtgatatgtagctccaattgcaactcatcaggagacagaaaatatctggttgtttttctttttatgacatcaaaaccagttagtggtttcagatgttgttagcctgatccatctgttacgaagttcccatcagtgtttgatcagatgattttagcatctagctattgatggtcattgcctagatacgttatttcattaggaattgaaaatggtgatatttcaattctatcatttctcctgcatttattagtaagaattctttttctcctttctctttctttttctttcttttttctttctttctttccttctttctttctttttctctttctttctctttcctttctctttcttcctttcttcctttctttcctttctctctctctctctctttctttgacagggtctcactctgtcacccaggctggagtgcagtggtgcgatcttggctcactgcaacctgtgcctcccaggctcaagcgatcctcccacctcagcctctcgagtagctgggactacaggtgcatgccaccatgcccggctaatttttgtatttttgttagagatggggttttgtcatgttacccacgctggtcctgaactccagagctcaagccatctgccttcctcagcctcccagggtgctgggattacaggcctgagccattgcgcctg

SEQ ID NO: 1159 - DNA, 4001 bp, Homo sapiens
tttattattaaaaatactaaaataggccaggcatggtggctcacacctgtaatcccagcactttgggaggccaaggcgggtggatcacctgaggttcaggagttagagaccagcctgaccaatatggtgaaatcccatccctactaaaaatacaaaaattagccagacgtagtggcatgcacctgtagtcccagctactcaggaggctgagacaggagaattgcttgaacctgggagacggaggttgaagtgagccgagattgtgccactgcactccagcctgggcaacagaacgagactccatctcaaaaaaaaaaaaaaatttaattaattaatggtaaatactaatcaaacagtcccgtacaattaccagaggtattcatttagattttcatttccataaaatgagaattacagtattcacatcattggtttgttctgaggattgagttaataaaacagcgaaagagtaagcgctatgttagctattattattgtgaatagaaagaattgctcttcctcctccaatttaaacaaatcaaagtagggaaaaatccaatacttttaatactattaagatacggttttctctgttgcttaaaaaaataataatcacagggcaggggagtgttggaaagcatcagccacattttttaagataaaagcactcatggacactacactacatttaatagctccaggaaaaactcgactttaagcagaactaaaggggaaatgaaaccagagcttcctgtattttacttccagcaattctgtcattatactgcacaccaacaatacacaccgatcaaatctatcactttttctttattaagaaaaaaaactgtatccctcttggtttaccacctaaatatagccccatgtcattaacttaattcgttagtcaaaacctcaaaactctggctccgtgactcaattcaggaagtaagaacaagagcaaaaagaatggatgccgagttgccatacacatgtataataacaagccagtgacccaatttaagccatctgcttgcattaaatcacgcaacccccgaagtatccccagggacaggtcccgccagcatgaacacttcgtatgcatcacaagcagccatcacttaagtttcacgtacggtcaaaggaagtcacatgacttgcgctttgcaatgtttaacactgcagtcaaatgactcggcatcctaaagagcgtgttagaggcagggaacgcaatggaggtcactccactgtcactacaaattccgggaaggaaacttccccagattcctccacttggaggtggcgctcggcctcaggctaggagggaacaggtgagaaagcagcccaggtggggtgggtttgcagcgaggagacaccccagggcaaacagcctgaccccagccagggatgtccaagaaaggccgcgactcctgataatcccttatgccccggagcgcctcgcctgcagaggcagcgtccccgccacccagccccggctctgccgcggtgaggaccggcgggtcggggtggactggacactgtcccacccatcaaatggtgatttaggagccgtgacatccgaatgccatcctccactggcgagaccctcagagcagccacgcctctagcgactgccccgccacccgaggccgggggtcgcgcgactcacccaaagactggtgtttcaggcgctccacggagcaggttgtttgtcagcagctaagtgccgtcagggttcccggctctggcgtccgtgggcggctacgggaagcgacaggagtcagtcctcgttcacttcccggctcgcgcgcctcactgctgtggtctccccaccctccccgcgccccgccttctgtgtctggggcgtccctggcggctctgctgggttttggacagggacccgccgctgatcgccacccagctcggcctcctgcacagcctctggagccttggaccgcgactggcttgctgtgggacgagcacagagggataaggacaaagaatgtgtcctgggtggatctggctgcctttgcccggaaggcggagtggggtgggaggtggtaggaaaatgggaaggaaagaaaagaaaggtgggccgacgtccacctggctgttccaggcctccaggtctaggagggagggcgctcggggctgggacttttcaggaccagggtggtcaccgcacaggccccgcctgcctggaccaagcgctggccttcccggggcgcccaggtccacggggtcaacgccagggttttctcagcttcctcgtctgcctcggatccaagtccagacagtgccagaagagacttggaggcgctgctttttgacagtacacacctctgtatgcaggtgaaacggtgggggaagggttcagtacgctggactgtgcccagcccaagctccccatccgttagtgataacttggactcgcagccactccgcgtcactcgccagttatcctgcgtgtgggtgttttctccaaattggacacttagggaacagtttaagcagtatggagcacaattctgtgcctattagatgctcttaaatacccgacttctcagggccctacactgactgatagtttgacctattggctgtaaacacaccagccagaaatacaaataaagttaaacaaagtcatgtcagccacttggaatggctggctgcttactgtttattttctgttagggacctcaaagttctcatcttctctacttggcttttatccacatttgtttggaaagatatattttagtgtcattaacgtgggctttctcctccctggcttttgttttcattattttttgttttaattgaggaattcattacaagtcccataactgggaactcatgttctgattcactgttgcttttctctcctccttacccattttccaagcctgatgcacttctcaagatccaatctgaataggtgaatttacccttgacatacactgccttggatttatagctgtcttttggtatgtgttgtgtgttttatctatccaactcgactgtagtttgagaaaaggaacttgtcttatacagtctccagtgcatagtgtaatgctttgcataaaatagatatcaatgttaggttgaaatgttagattattgataaagtcaggagcaattgaatatcttcacaattctgcctgagtctccccccagccccgccactttgagacagggtttccctcaagtgatcctcccacctcagccccaggagtagctgggactatagacgcacaccactatgcccagctaatttaaaaatttttttttgtagagacagggtccactgtgttgcccaggctggtctcaaactcctgggctcacaatatcttcctgccttggcctcccacaatgctgaaattacaggcatgagacaccaagctgggccctgagtcaaccttgtacttctttacaaagctaaaataagttgaaataagtacacataaatgctgtgtttcttttgtaagtcatatttaggtgcaaacggggctgagtgaaagggccagagagcagagttaacaaagaaaatctggattaaaatgttcataaatcctaagaacttattcctagaaatatctccctcatttggcactgttgttcaattagcccagtgtgttattttaaataagcaaatattcactgaatgcctatcatggccaggcacagcagtaaagaatactagcatgcaaaggacctcatgggcccttctagatagagtcccacatctcttacattattactgcagtatcctaatcggtctccctatatttgcccttgcccctctgcaatgtagtctcaacacaacagccagagaagtcatgacaaaacataattcagatcatgttaatcccttactaaaacctacttttttttttttttgaggcagtctcactctgttgcccaggttggagtggagtacagtgttacattctcagctcactgcagcctctgcctaccgtgttcaagtgattcatgtgcctcag

SEQ ID NO: 1160 - DNA, 4001 bp, Homo sapiens
atgcagacttcacagctccgagggaattgtggcaagctagtgggaaaaacttctgccagcatggatggtaggatgcttgaattccaaaggtgacagtgtacctccttccccaagtccttctagaaaaagggtcattaaccagtctaggaagacttaatgctgggaaaggaagctctggaaggccttatctcccctgccccttcaacccaggcaagggaccttccttcagctcacccagagaaaggctccacagaagtcacatctaaactctttagccacaggaccctgtcttcaaatgaaccaatgtcacatactcccaggatagaaaactgctgaaagaggggctggcctgtgtgtagggtggggccggagcctgccctgctttgccagatgctgagcgcccaggctctgtgcagttggtacctttattcccatgattgcctctgccgtcacctactgcactgtgaaggattccatttgtccttctagatggacattatttttctcttcccactcccttacctggcccacagcctgtgccttttggagtggagggggacatcccaacctggggacagggacatttggagaggagccccatgaagagttgccctctgggaccctctacctcccaccaggacactcccaacactgagcatctttagttccacaaattcttgctaggcccctataaagattcacccagcctcctcttcctctaagctcccatgtgctggaaccccaaagccataaggagcctctctcaggccagaaggaactctgggatcctagccctcagcagaaggccccaccaggctttcccacctgctcccagctcctctgaggaagttgatagagcctgcagagctgggctggaggaggtttccttgccccagagcggggctgggggtgcaggtgggtggcctggaatgtgctctctcaccctcctcctgcccaggtggtgagcagccagagcccccagccctccagctctgaggggaagctcccatgagccagacagacaggacagctgcccccagtagggtccccttcacgcgccatctcaccccaactcagacgctaaaaatggttctctggttttcagcctcggcgcctgcccacaaattagtgtctccaacacagcctcttgggacatgactttagggaggcccctgggggagccaggaggccccagtgaagggagatggtgctggcagagtccctttctgaggagacaagagtggataaggcccccctcccagcttctaggaaacccgccccccccgcccccacgaaggccacccagcctcagtgtgacagccctgttgtcctcaccatggcagaagaacagacattatttccaccctactggggcacgctcccctcacctccacctccagttctgtcagctttaccctcagccaccatcccgggcactgctctgctagaagagaatgcagcaacaggagatggagcagccagccccgcgccctcccgctcagggtccagaacccacctcgccaagcctgggctcccatagtcagcccacaagcacggaggccaatggggaagccaagtcagggaagcccggtctccctgctcgcctggtatttagtctcagactcttctcccctccccagtcccgcaacggtcaacttggaagggggcaaaccctctccgggatgcccatgccccagggcaccaagcaagcaggtgccctgctgaggccgggactgggcgctagccagcagcccgcaggaccaggcggggacaggcgggcagtactcacaggtaagccgtcagggggtccaggtcccccggaacggcggacagcccgagctcagagcagtcggcagacagcatgatgccgtcctcctggcagtggcagggggccgggcaggcggtgggccccgggccgggctggggggcgccgccggccctccgggaagcgcacagcgcggcgcaaagccatagcgcccggagccccggcgggctgggcatctcggcggtcgggctactggggcacctggcggccgggcgcggacgcacggcgcgatggccgcagctgcttcctcccggtcccggcgggctgcaccgtcggtggggaccgccccaggggctctattgggcggcggcggcggcggtgggagcgccgggacggtgcagtcagagaggggcaggcattgttgagtgatcttcgttattcagtttcacaggctgggcttggcaagggagggagacccagccggaggaggagtcaaggaaactttctacactgcggctcgctcctcttccctccttccttcggagctggcaggaatttcatccaggaaagaaaaaaaaaaaaggaagaaagcaaagaaacccaagcgagcaaagctcagcccgtcagagacctgcatttgtttggatagggtgtcccagggccttggccgcagggctggggaccctcttgcctttggggacagccacgaggtcacatgggacccagaggaggtctctgaaagaggccttggggctcccattgcccctcatgcctccaccacgtttcacactgcaggaaactgagacccaagaggcaaaatgatttgttcaaggtgacacagctgatgggacatccccagagctggaactcgtccaccctccctggcctgtctgctaggacaggagagaggggagtgaggggctaccctggaagaggccaggctgcggagggttccactgcaggctgggatgacccgacggtgggcaaccaggagcagtctcctcactgagaggccgggccttgactccaaagaaacgggtgtggagttacacccgctgagtgcaccctgggtggaaatgcactcctgcagcctctgtcaggtttacggcctggggaccaccttgatccctgctcccaggacctcgggagtctgagggactgtgggcagctcagctggttgtcagagcccacctcaaagtaagcggattggtgccacctggaggccgggtgctgcacctgcagctcagccaccctgaggctggaatcccaccaagtggctgacctgggccggccccagagccctggagagcaaagggcatggtggttaaaactgaggtcaatccctgttctctccttagaccatagtgagctggctgtgcttccttcatgcagcctcttgctctctctggtctctcccatgctgagccaagcccccgcgcagagctagagcaggctgtgggcccccctccttcctttttttgccctatctccccatggtccagccagagggtatactagaaacctgggacctcagaggcatccaggatttcttccaccctgtctttccacatgccaggatcctctcatcaacacctctccactctcccaataacctcccagggctagaggggctgcatagctggaccaagaaatgagcagaccttgaccctaggcctccagttggtgccatggcgctgaaagtagaagacgagcctccgctctcgctctccctctccctctcccctctttccacggtctccctctgatgccgagccgaagctggactgtactgctgccatctcggctcactgcaacctccctgcctgattctcctgcctcagcctgccgagtgcctgcaattgcaggcgcatgccgccacgcctgactggttttcgtattttttgggtggagacggggtttcgctgtgttggccaggctggtctccagctcctaactgcgagtgatccgccagcctcggcctcccgaggtgccgggattgcagacggagtctccttcactcagtgctcaatggtgcccaggctggagtgcagtggcgtgatctcggctcgctacaacatccacctcccagcagcctgccttggcctcccaaagtgccgagattgcagcctctgcccggccgccaccccgtctgggaagtgaggagcgtctctgcctggccgcccatcgtctgggatgtgaggagcccctctgcctggctgcccagtctggaaagtga

SEQ ID NO: 1161 - DNA, 4001 bp, Homo sapiens
catttagtcatgcagccatttgtctattcaacatttattgagcacctagtatacatcaggcactatgctaggtgacgaagcggcaaagtccaatcacagatgctccctgtcctcaaagagccaagtaagtggggacaatgacaacagagtggacaattacaagcctgagtgacaagtgctgggactgggacttaagtgtcacagggcttcctcagactaatccctttggccttttgactctgatctctgcaggttcagtcacaaagtgaggccacacgatcctgtgctcgattaaaactgtcatctcctaatctcagactgctcattcatgtagctggtctccccagacaggctgggagctcctccacagctcccagttgtctgtccttgtcacatacacacgcagcttcaaggctcattttctacagcttccgaggggtgggcatcccacctgcgggtcctggacaagggattgaagagggacggaagacagattctgaggcaggagggaaatggaatgaatcctgcacatgaaaacggcagtggctgtgcattagaggacttggccactcaatcctgctaagcctggtctcccctgactcaccagcatctcttctagccctcattctgatctccagctccatctaggagggcactgtttctgtgtgtggaggtatgtgggcgtgaattctgttcaccctatcagactggaagccccttagaaagaaggactgagatatcctattagatcagacctctccatgggtaaaaactgcacttccctcctcgcatggaaatccctgagctcccagccagggccaccagaagaggaactgggtggagctgatgcaggtgggaagaactagggtgcacaaggattggggaggtgaagtcagaccacatctctgagccttgtttgtttagctgaagctccttgtcctgctgcctttatttcatggataaacaggcagggtgtgtctgggggtggaaaactggagaaagccctctattcagagtcccaccctcaccacccccaccaccctcactaaccccatcccagatgggagcttttcttttacatcagagcaccctccttcccaacccagcaactcaactcaccaacgcgcgcgcgcgcacacacacacacacacacacacacacacacccaggtgcacccaaacaccatttacccctaccctagccagagggttttctaaattggacaggatcccagactcaatttgaatctaggagaaaagagcagaagataaagttcagagcatataataaaaagagctacgtttgctggatcacacactgtgctaaagatttcactgacccattttacagatgaggttcagcaaaattaagaggtttcgccacctttccgcctctccagacccccactccacgtctttgcagtttatagagctcttgaacatccttggtttcatttaatttgatcctttttaataggtcagggaacgaagcattatttattcccattttaaatgaagaaacggagattcggaaatatcaagttacttcccactgtgccacaaagttaagaattggcagcgcgaacccacgccaggtggttcagtggagcccctagctgcacgcacgtacccgggagctaagcggcggccccgggggcggggaccagcctcgcgcgcgcgcccctgcccaccccagcccgcctggccgtgcccctgcccgcccctgcccgcgccgcccgctccatggctgaaagggtccggaagtggggaggcggcctcggctcccagaacaatggaaggggattagggccggcccgggtagcgccccacccgtcgcgtcggtttctgggtcctgctccccagggctgcggaggacctgtggaactttccggagctcggcacccttcccccaagcctacctgggcgcaccgcgccgtgcactcccagcccgggagaggttctgtcccgccctcgctgagcggccctctccctccaagcgcattccggcccctgggacctcgagtgccagttctgcggtccagtgcccgccaccctccgcgctgatcctctctcgttctgccgcttctctcgtatgcccttccctctggatagcgccccacccatctgccctcttccctaactcccgaactatttggttcatcagagctatagaaagactagatccaagatctggatctaaaatacctgcccaacaagaagtccttcctgatacctagcctcactccctcatgctgcagttggactgaatagagttctctgcctgcccttataatgtaatcctcagtggctctggggtcagactgccagagtttgtatcttggccctaacacttagcagttgtttgatattggactagttcctttcctctctgtgcctcagtttctgcatctataaaatagtatctaatattccccataagataatgttgtgaggtttaaatgggagaacccatgggtgtagcatgaatgtcagtggacatccctctcctcacctgcatgtaaccaacagagcccctcctggtggagaagcagggctataaagttaggaaagataggctggggaggctgtgggtagaggagggcgttctgggtcagccctgcccttaggaggcagcagctgccgcttctctctggtgcctccaagtgagtgccacctgcctcgcccctgatcttctcatcctttgatcttctgatctctggccagggtctcccagccaaaggcattcctgtctcccttgccttctccaaggaaaggcaaagggctggactccctccctttgccccaagctccttcctccctcccctgtgttgtgtgtgtaactaagactaccagtcaggccctgggacgaagtaacagccaggacccctaaggtggcagtgtctagggggagaagaggacatggggaagtgttggacatcggggctgttactgggcatgatgccctggctggaccagacactgctggaaaggtgacttcagcccaagttccttattgccagaaccagtttatgcagagccctggatgagcactggagaaagtgtgtgtgcccctgtgaacagtgtgtgttccctgccctcaggaaacttcggtctgaggagagattcagacccacagatactgctggacagagccttatacattagtgctggaggaatctcaagtacctgtgggtcagggagggcttcctggaggaagcttggcctgagctggccaagagagacatgatttgccatcagaaagtggcctgcctcagagctgtgcaaaggggggaaatgagctgggggtgttagcatgggagtgagggaaagtgtggtggatgaatggtggcctccctaaaggtgtgtctacctcataatccctggaacctgtgaatatgatcttacttgaaaaaacggcctttgcagatgtagctaagtaagagatcttgagatgaggagatcctcctggattatctgagtgggctctaaatccaatgtcaattgcccttgtgtagacacgcagagctcacacacagagaagaaggtgaggtgaagacagaggcagagattggagtgatgtggtaaccacgagaagctggaagaggcacgcagtgggttctcccctagagccattgacaggaatgtggccctgctgacatcttgatattgggtttctggcctccagaactgtgaaagaataaacttctgttgttttaggccacccagtttgcggtactttgtcacggcagccactggaaactaacccaggtaagcggggaacaatcagcagagcctcagtgtgctgctggtcctcaagcccctcttcccactgtggcttcctcctgtccttccctctgctcgccctccatcactggcccaagccagtgacccatcccacacttctccacctaggaaagtcattctcacccccttgagactcccttggatctactctgatccagcaattccattgctggggacttaaccaacagacacacatcc

SEQ ID NO: 1162 - DNA, 4001 bp, Homo sapiens
tgtttggaggtgtgtgtgtgtatttgaaggaggtgtgtgtgtgtgtttgaagaaggtgtgtgtgttaggggtgtgtgtgtatgtttgaaggaggtgtgtgtgtatgtttgagggaggtgtgcgtgtgtgtgtgtgtttgaaggaggtgtatgtgtatgtgtgaaggaggtgtgtgtgtatgtttgaaggagggtgtgtatgtgtatgtttgaaggaggtgtgcatatgtgtttggaggtgtgtgtgtgtgcttgaaggagggtgtgtgtgtttgaagcagggtgtgtgtgtgtttgaaggaggtgtgtgtgtgtttggaggtgtgtgtgtgtttgaaggaggtgtgtgttaggtgtgtgtgtgtttggaggtgtgtgtgtttgaaggaggtgtgtgaggtgtgtgtgtttggaggtgtgtgtgtgtttgaaggaggtgtgttaggtgtgtgtgtgtttggaggtgcgtgtgtgtgcttgaaggaggtgtgtgttaggtgtgtgtgtgtgtttggaggtgtgtgtgtgtgtttgaaggaggtgtgtgtgtttggagggtgtgtgtgtgtttgaaggacatgtgtttcgagggtgtgtgtttgaaggaagtgtgtgttaggtgtgtgtggaggtgtgtgtgtgtttgaaggaggtgtgttaggtgtgtgtttgtttggaggtacgtgtgtgtgtgtggaggaggtgtgtgttaggtgtgtgtgtgtttggaggtgtgtgtgtttgaaggaggtgtgtgaggtgtgtgtgtttggaggtgtgtgtgtgtttgaaggaggtgtgttaggtgtgtgtgtgtttggaggtgcgtgtgtgtgcttgaaggaggtgtgtgttaggtgtgtgtgtgtgtttggaggtgtgtgtgtgtgtttgaaggaggtgtgtgtgtttggagggtgtgtgtgtgtttgaaggacatgtgtttcgagggtgtgtgtttgaaggaagtgtgtgttaggtgtgtgtggaggtgtgtgtgtgtgtttgaaggaggggtgtgtgtgtgtgtttggaggtgtgtgtgtgtttgaaggaggtgtgtgttaggtgtgtgtgtgtgtttgggggtgtgtgtgtgtttggaggcgtgtgtgtgtttggaggtgtgtgtgtgtttggaggtgtgtgtgtttgaaggaggtgtgtgtttggaggtgtgtgtgtttgaaggaggtgtgtgttaggtgtgtttgtgtttggaggtgtgtgtgtgtttgaaggaggtgtgtgtgtttggaggtgtgtgtgtgtttggaggtgtgtgtgtggaggtgtgtttggaggtgtgtgtgtggaggtgtgtgtgtgtggaggtgtgtgtgtgtgtttggaggtgtgtgtgtggtgtgtgtttggaggtgtgtgtgtggaggtgtgtgtgtggaggtgtgtgtgtgtggaggtgtgtgtgtgtggaggtgtgtgtgttaggaggaggtgtgtgttgggtgtgtgtgtgtttgcaggtgtgtgtgtttggaggtgtgtgtgtgtttggaggttgtgtgtggaggtgtgtgtgtgtgtggaggtgtgtgtgtgtgcttgaaggaggtgtctgtgatgtgatcccaagaaaaggaaccacgagcacagatcctgccttcaggaagctcccagactgaaggaggaggcatggcccctgccctaaaagagttcccctctcctgatgcaaagaaacacagctcctgtccacaaggaaccctgaatctgatgaagtagagcatcacaatcagacaaacatacagacagatggggacacacacaccctacaaagacatagtgaacataatactacctggtattttcacaggaaataaaatcgcaccccctctgtgctaaacaccccccaaggaggatcttgcttcatgcaacaactcaccgggcagagatgattattgacacttgacaaacaagtgtcaaccttggtcttcccattccttggcctgtgggttttcctttgcaccacaaccgcctttcaggggcttccgcattaggagcatcagttagacacaagcgttccctcctctgtgccccgcctgctacgcagtatctggccctgcctgggtgtatttctcacttcctacaacaggtcacagttatttgcgcttgtcttatctctctctccaaggctccaggggagaggaaagagggcaagcattcaatccacatttgtcacatgaacaaatgagtgattgaatgaatgaatgaatgaatgcttgctcctcacaacagcctgggagttcaagtggcactatcattggttattaacaaggggcatgaggggcaccgcagcaccagtggggatgacaggtattgccagaatccacacagtgtgctgatggcaaccggggcttacatacactctaccgaactgcgctgttcttcttcgtgcaaaggaacatggagcatgttgggagaggtccagagacctggagaaaagaatcctcacactggattcactgggaaggcttccttcctataggaggtgctaaaagcttcttagtgggggctgcctttggcctgtttctcaggagccaataataactcaggtaggggggcaattctaacttgccaatcacacagggagttggaataaacctccatgtactaggctcccattttcctggttcacccacatattcccctatacaaagaagcacttcatctgccctgcaagaaccccagcaatgcactgagctgggggtgctacatggagagagtgactccgcactgctcctctgctcctccccctccatgagtccatctgccttggctttgggcctggggaccacatccaagtccctgacactggtgcaatggaagacactcagcacctttctgccaccttatgcagtctggacactctcggggacactcccacctcctccagcacctccaagggcaaaggggaaaggatggtggcagaagcagagggtgagaggaattgtgtcctaggaccgaccctctgggtctcattctcggcaagctctaggcaggcagagtcaaataggtgaaatgaagggccactgcaggcctgcctccaccgctcctcccaagtgcctcctctcaaggggagactagatagataataaccatagctcccatagattgggcatttgctatgtgccaagcactgtgtctaattataaacatctttccgtatgcccattttgaaagcaagaaaacagaagctgagagaggtgaagaaacatatagccatagctggttagagctggaacttagcctcgaacccatgtctgcttggctgcaaacatgcactctttcttctatagcagcgcttccaggtgtgtgcccagatggggtctcctatcccttgggatggctggatgctgcccagggttgactgggtgcctttcgcctgagaggccttgttggtttaacccaggacactgaataccttggattgcgtttgtgtgtttgtgtatgtgtgtgtctgtgtttttaaaatgtgtgccctgagggaaaaagggcagaaaaccctgctctagaacatgctgccccagggagtgggacagaacaggtcgtggagatgaagtacaaaagccccaatgtggttcctcattctaacctgggctcatggcttccccttctcctggccctgagttaagtccttctggtcttcaggactcaagcctcttctctctcccctgggccttccctggccacctcggtcctctttctcccttgaatgcctgtggacctcacctctggtcctccctggatgctcccaggattatctgatacagtgagttcacttctcacgtgcacctggctggtctctcactgacagtcatcaccctgactgcctcccagaggatccagcagacagtaggtcctcaacatcaacgctgatgataatctccacactcaaggattccgtcttaccctccccagagtccccaatttctgtgctgagccccaataccttcccctccaagtagcccccatagatgggct

SEQ ID NO: 1163 - DNA, 4001 bp, Homo sapiens
tcccaacagacaggtcacctacggaccacagccatgaaagcacagacgtactgggtaccaaggacactagtaacacacacacacccttcccccactcatgcagtctcctcactcgcgcagagctacaagcagcttaaggactcggtgcacctttgcagggtttctgtttccgtctttgcaggggctgagaacccactctgtccctgcctgtgtgcggggtgtggggcgtagtgaatctccaatgccttctatgaaaacatcttagcggtaaactccccaaggctcaacacagacgtggaactgattgccggcagttgacacgaaaacactcaaagaataactgtagaatacagccaagaaacaatctaaataggcttggatgaagctattcttttctagtcccttctcaaaaacttcccagggaagcctacggtacgcctgccctccgaaggatcgccggacagaaaccctgccatggaaacccgaggcgcaggagggcgcgctcgtgcgccctagtttgtaggtagtcaccatccctggatgagccggcccttacttaaagtaaaccccgaagatgtagctaccgcaccactaaagaagtcgcaggcggaagtacaaccccttggcaagcggagcgaggaactccttggtctctccagggtgcccggggcgccctgctgagcgtgcaagccacaggggcaggactctcccggcgcttgtcgcgcgcgcgcgcgcgcgcgcgcgacgactgggcacctgttctggcctctgcacagattccctctcggggactctcgctcaggagtgaagcacagagacggattcccttcgggaaaatctctgcgcgcgcacacccatacacacagagagagacttggggataaacacgccgcgagctccggctgtctcgctaatttcgggcgcgggaagaaagcgggcgggcaggctagcaaagctcccacacacccccgtctctacccctccaaacccgagccaccctgagcacctgccctcgcgtgcgcaaaggctgaacccggaattcacaacttgcggtcgcttctccctcccctgcattcctaggctagctggaatgcgcgagcagattccctcacaaggagcagtcagtttcccgcggcgcacgcggcgggcgccgcgggcagtagcggctggggactcacccggcacgcacgcccggggcgcgggccgcagggactaagagtgtggccggggcttctccgccgccagccccaggggcgagagacgcgctctccaacttcccgccagctggggtgaagttgcactagcggtcctgcaagcgctgaccgtcacgccggcgaaagaagatttgtggggaccaccctcgccctcaggcctggcctacagctcgtacccctgggtgtccccaaacagcactctccccagcgttccaagaaaagccttgggctggagatgcggggttcggtactcggctcgcctcaagcatgatccaggaggcgttcacattcggccccaaacagccaagagcctggccccctcaaacgcactctggctggtgcccctgccctgtgaccgcctctgcgccccggccgccagcccctcccggcccctgagcggcgtccggcccgccccgcagcggctgaggctgctagctgtcttgttagaattaaatcagcgagaaaggggggtgtcttacgttgcatcggcacacctagcatctccgggagccccttgacagccccttccgcggggacagtcgcactctgcatcatctcggagcgaaagccagcgagtcgcagtctacggagatctctcgctctctcgctctagctcgattcagaaatttcaaaataataattaaaaccccaagcaggccgctggagtcacggtggaagccgggccctccgcttctcagggaggactccacaggctggccggccccctccccccgccagtccccagtctgtttccagtccctttgatctcgctctccggggttggtgcacatcccaggttgagacgctgttgctgcagctctggcttttttcctcttccctcccccgcccgctccttccccctccccctccacccttcgcgtgccggccgcccgggaggccgcggtcacccgggcgttttgattcattcacactgcaggagcggccgtgacgtcgctttccgcagggaggcccgcccttcggcacatcccccaacccggcggcgggcagccgaccccggagggagtgggggtcccggcgccccgagtgaggccggcggggcggaggggggcggggcggcagggagcggggcggggcctcgcaagccggcaccccccccccctccccgcctccgcctccgcctccgcccagccgtggcgggctcgcgccctgggtataaattctgctgatggcctgccgcggcagcaggtggtcggagacggcggcgccctgggtttgcgggtcttcgtgggttccaagcccgcgcggctcgtgtcctcctcactcctccgttcggacccaggggcggggcggagccgagccggggccgagcggggcaggcggtccggaggccggggacggggctgcgtcgctgtgtcttcgccttgcgcgctctcggtccccggcttcgctccgccggacggagcgcgctccgtaaccgatgactccatctatcttcctcctcctctttcccctggccaattcctttcctgccggcacttcccagcccctgctctctctcccccgcgtctggctgaggctgggccaagggacagcccgtactcggcccggaacgcgcgagtcacgcggcgggcggcgccggcccgggctggggaaggggaccaggggctgtgcgcggaggtggcgggacgcaggccccccgcgcgcgtccccgcagaccgcggcctgcagccggagtccgcacttgcctccagttccgcagggtagggggcccaaacctccccgcggcggggcctccccggccgccctgccaccagtcgtccagctcggccctgtcttaggtccctagagcccgctctgcctctccggctgccaccgcgggtgctttgaaccatccgcgacctcgtgcgtgcagggcggcagtgagcacacggacgccggggttaaccagcgaaagggcttgccatgcttactgtatttacgagatgcatggacaggtagagaaacgcttaaaacaaattctcctcaacgcgagtttctggcagaaatacaacagaaggcccaacgctgggacgaggtctcctctgacgctccatcaggcgctcgacgcctccgggctgcaggcgcgggaagcccaccccgtctgccccaagacccagccgctctcctgcccccagcccccacggcatttccttccagaaatgcagacatacgtgtccttccagcctagtggggttcagcttaggcgggaagggggactgtgtgccctccccagccttccagaaccttccctgctgtttcccctggtgtcatctccaaacaagggacacctgctcacctttaagggaggagcatggggcgggggagaatggcctggtcgtctgcgctgcttagaatttgtctccaatgaggtcacagtgacttttgtgtgtcctggtactgggttggcatcatctcttcccttgtttacctgcgaggtgactccgcgcgcgagacaatatacacaagaagaaaaaagcaaaagaacccagtgacatttttagtgtttaccaaaatgtgttctatagaaatataactagtaagcaaacacggggaaacgccagcctcatttgcagtgaaaaacacgcaagacaaaacaacacgtgcacagctttttctgtttgtgagatgcccgacgcgcgggaggggcatcctagagttcaggactggcgaaaggggcttggacactcaccaatactgctgggtgcttataaactcttaacatccgtttggaaagaaatttggcaatatgtatcaaactcataaatttttcataccctttagtttatg

SEQ ID NO: 1164 - DNA, 4001 bp, Homo sapiens
gaagtcttgcggccctgccctcctcgcgggccagctaagcttcccaccccacccagaccctctccgccccgtcctctgtctgctgcaggaggggccagctgggccctggaaggagcgcggggacagcggcccttcgtcctgcgccgcctccccacggccagtcttgccagcacgcgagcccctccgcactcaccagtccctcttccccggcgcctttgcgagtcctcccggccgccagggctgtagtccgcccgcactcctctgacatgagcccctgacactgcggagtaggagggggagaaagtatggagaaacagatcagaagttccgagcgtgctgcccgccccagcctcggcgcggggagcgagctaatgaaggccctcagagtgcggggcagcgcgtgcagccgtcacggcgcctgagcccgggcgccgcgggcgggctggcgcgcagcctccttcgctggccgctggcggccgccacccgagcgctggtagctcgtcccgcgctccccgggctccgggtctccggcgctcacccgggcacgtcggttccccgcccccccgccggggataacaagttaataacaatcatcccctcacaaagctctttctttccagacgtcaatcatagcggagcggggaacaccgggctaaagggggtgcggggcagtgggaggtggagtgcgagagaagaaaagaggattgaggagggggtgggagaagaaactagatttctttaataacctcaattaaaagagcaagacacatatatattttaaaaagggggctttttgaataggatagcccgaaaggtgaagaggtttaataggatacttgaaagctaattacagcgggatttaagaagcctggtgtttgttccgatgacaatttgaatgaaaatgcttcagattaaaccgagccagcagctctttcgtaaacttacagcaattagagtggcgagtgatttacactcgtttctttaaggtgtaaattgccacttattgctcagtaagtcaacatttgagctactaaaggattatttttaaccagcgcaaaaagcgggtagaataatggaaaatatccagctgaatttaatttgtgccattaaaagaactcacccaacctctgacaaaatgttttaaagaaacaacgcgcgttactcaagtgtttccaagtatttgctggagttttgttcttaaacgaaaacgcagcgtccctgggcttagaccgctttcgtttccaaaaactctagctcgggggcgggtgggtaccccgaactcgagcggctcgcacttctgcatttctgactgttcgcctccccttctccctccctctggaagcaccaggcaagataccaacctgggggcctcccggaccgtcggccgagaccctccctttctggggtgcgctccctacgcgggacccagcgtagctgcactgaggccgcgtcctcacacacaaagggcgtttaaacagaacagctccgctttcgcctggtgtccccaaccggcttcggagcaaagaaatagtcaggggcgccccgcgcgcgtcctgctgaggccctcagacaggctgcagatgatttcaaacttaaaacaccaaatacccacaggtcctgcctcccgagtgaggtgagagcttgtcagcttccccagtctactcagacaaaccgcgtgactcgttttgtgccctgcggttttcttttggcattttaggtaaaatggctctcccggcaagcccagggatcccggaggcctttctggagccccgcagagggaggtgtgcctcagggcaggcaagtgtccgcgggcagccgaacgaaacgagccaggtctccggttccacccgacagccgcccagtcctcccgacccactctcccggaccgccacgatcaccacagcaaatagaacaaaagcacgactcacatggacctgagagcgccttaggctcgaggcttcatctcccaaattacagtctccatgtctcaggttaagtgagcttttggggagggagtgcaatgattactgactaacgctactacgtaataaaaaaaaaaaattgccaggtctgaagatgaggccgttacaggtagtttctgaaccttgtttaggagcccaaacaactcgagtttcaaggacactgcgattcagctggtctggccaggcgtcggctcgctcaccttctcagggggaactgccagctccggcacgtcctttgctactagtttacacacaaacatctgatcgttcttccaatacatggcactgctagggctgcttatcacataccaactccagagggtcagaggctgtccgtgtctgccgatctcccccctcccccgccccgatccactaataaaagctgatgccgagaaggataatgctacaagtgtgtcttcgtccaaagaggccgctgtggcctgaccactttctgatgaaccgttcttaaaattcctttcccagcttcactgagctctgagtgaagtgagcactgagcttttcctgagtccctccaggaaaagaaaaaaaaaaaagttttgttttccagagggtggaacctaatataaaggaagggggcgtgtgggggaaagtctttcctggagaaattgcttcgcctctttcaggaaaacccgccttctctacatgttaaaatctttatcagaacacgccaactgacttcaggtttagtactaaagaaaaaaaaattgggggatgtcctgttaacttgactttaaaaaatctgctgtctgcatttgccataacttttaaattctcgctccccaacccaaacctaaacaaagattcaggttacatctctttctgcagcaagcagaaggggaagtggaggtctgggtgacttgaaagttttagtcattctcttgaaactcgcagctgtccggtgtagccgaggaatgccaccgctcctggcagcctgggagctgacttatctagcagttcgcgctccctttccgaaaagttttctcattaagataaagaaggaacatctgagcaacacaaaagcttatgatttgcgactagatttgaaatcaaggctacaagaaagacaaaagtatgttgctaatgagtattgctctttcatctcctagacaaaatgtaagcccgagcagccttgtcttctgcctcaagttctgactgcggggcggggaagcggcggagggaggtattcagggtaccttaattttgattaagattggaaggtgtgtttgtttaaacagactctttgtggtataaactttatttcattatttagtgtataaagacaaatttggttaaaagattatttttaaatgatttttgtttccatttaaaaagctaaacttctgaaactaagaagatctaggagtctatttcttaaaggcctttaacagaatcataggattttgctttaattagatggaaatatatatgtaaaacacacacacgcacacacacatatcttatctccttgccttatttgtatagaagaaaaagagcgaaatgatcttgcccagaccccagctcggtcagcagccggctagcggaggagatagatagcctttcctgtgatgaagtgagcctgtgtaagagtctgggaccgagttaccactacaaatttagtttttcctccattgcatttttctcccataaacactagagtcttcagagcattttcctatcgccattgtttttcttttcgcgcagctgcgcacaagttaatattagccatccccctgccggtcctctctgggagatctcgtttaaatttactgagcgaagggaggaggacgatataattaatctgtgccctcttagaaaattgaaagattggggtggactgacttttcaaaaagctaacttgtgcgtgggaaccagaaagacttgtgtttttcatcaaatgcagaaatcggtattgggggtggtggagaaattcacataatgcattttccatgaaatagcatcgttgtggagaccgctcttccgaatggaaagtcagagtcg

SEQ ID NO: 1165 - DNA, 4001 bp, Homo sapiens
gccacccgccccgcggcattcctcactgcggtctgatgcgccagctggggccagttgtttcaagcggttctggaggaccaatagcggaaagccaagttctgcgaccaagagtctgtacgagtgactcggtgtttctttccagccggttcgcagagcgccagtaagctctcccggtccgctacggaagaaataggggaagcgtttccagtctaagagagaggatgggagagagaaaattaggaaccacgccgaaattaagcagggcagcctggaaagcttcccggctaaaagctatggcgcgaaacgctaaagtccatcacaccatttattcattgtgacatttccaagccgacaatagcgccttaagcacgcctgtggtttggaggtgccggttttatatgcattttactgtttagaatgataaacaaatcaggaccaatggaaacctgattctaacctctttctacagaactctgcctgcataattctgtaaaagccgaaatccaaggtggccagagagagagagagagaatccaactctctacccgcctccctttaccgcgtttccctacaagtcctaggcaaaccgggcagatatagcctggagttcgctgatcaagaaagaggatggaaccgaggcccttcaggcttctcctccccttccacatccccgttttcccacttccccagggatgtctgaaagcccaactcggccagtgtggcaggaaagttaaactttatctaagtgcaaaaaccagatggttttctcggtttctggggataggtgagaggcagaagtggggctgtgtgagcctcctattcacaggcttggatgacattttgataagggaaccctcagctcaagttgttagccagggtgaatgagccccacacaagcctgcgccgaccgcccacaactttggtgtctaaggttctccccagcaacacttccacctccggtgtaactcgtaaagctatgcttttacaaaaaaaaagttggcccaagaatcttgagccatgaattttaaaaacttaaataacttctatatgccatttctgctacaggagactggttcttgtaactgtggcaaggttttcttcctttccttcctatcctcctcctctcccttcctccttccctgcttgccttccttccttcatgggagttcagggtttaagaggtaggcaacgtgttattatagtaagagcacaggtttgaagttagtaaaatatgtaatggaattttgagcaatttaaatttttaacacttgagctttctcatttgtaaaatgaagatggcatcacttggaaattgtcataaaaaatcacaatgttgaattaagtgctcatccacacaggaggttcttagtgaacataatgtttctcctaccacatcctccttcacctctctagagaggtctggatgtagaggagccaccaaaggcccaatttccccagtgaagggtaggtcaatgttcttcagcgagttgaccacttctaggggttcagagggtcatgaggttagacgcacctccctgggctgcagaggctccagagatgagtgcagctgcctgtagccacctctgtcgtggcaactaggcccaaggatgcacaatgaacacctttttcatctcctttgtcgctggtttatttgagagttaatctataacatttaaaaatgcttggcacccttctgtcagtttgcacaaccttctgaatattgtgaaaatggcagtaatcatagctgttgattattatttgtcaaatgcccccactgacgttatggcacacaaccctactttaatttatccaaagccctattttaccaagccagggcagaattcaaacccagacgtccgacgcgaatgcctgacttttaactactttgcggtgtttgtcctctttagggtgagttcagaaatggacactttcagtaaatggattcatgatagttctttaccactccagcacaagtggtccagccgctagcctcttgcctctgcccacttccgctgagcagctggggggtgcctggtgtgctgtggggaagagcgccaccttcccacgcctactcttgctgaggttaaacagcatttcagtgccgaataaaacggccacgaaggggaaaaaggagaacgcttaaatcggcggtaaaatcgttctctctccttttccttgcagattgcataatttgatgtctaatcatcagcaagtggaacaaaacctggattgaatagacggtgactcgatctccgtacagactgaggtccaaaggtctgcgctcacttctggaactttccttttgggccttgaccgaactcctgttattgtgtgcagtagcagaggctgcgctgcgtggttcagtttgtgcaaaggctatttattgtttctcatttactgaccactcgggagaagcctttagcaatagtttttcccgacacaaacttgaataaagtcgacccctgcagttcttcctgaggctctacaagcttcctggatgcaggaaccatgtgctgttctgacgacgctccgaaacctagttcagtgcctggcactagacaataaaaaattgctttctgaatgaaagtatatgctggcaggcgcagggggtttcatgtctttctctgccttcttaattctagcgctcctacgtctttgcataggtaccttcttgctcagttcctgcatctttcaagcccttgaagagctaggtaagaaagggcatgaaaattctgacataataattagcaagtggcttgttatttgtcaaacgccccactgatgttgtggcatatacaacctcacttctttaatttgcccaaagtcatattttaccaagccaggtcagaattcaaacccagacatccgacacggagggctgacttttaattactttgctattttgtcttataacagaggcttataagcttataacctccaagggatcctcaggcattatgcttcatttgagttcttccctcctgcgagtccttcagacctcagcgtttgcaattaaattgggaaacctactctgagtgcctaagagaccaactgagtcagagcctctgtttatacaggaggctctgggggcggggaggggcggccagtaggaatgtgttggataggagaagccaagcctggggcaagcccccatagacagactctggacgcgcacttggaaatgctgtgtgtgatggccagacattgatgtaggttttggcttgcttcagggtaaaaagaggacccaagatggacagtcagaatgggagctgaggtcatttggagccaggcgctgctgcacgccatcctctctggcctagaaaggagatacaccttcgtttacagtccacaaagaggaggaagaacacggaggagacgcgagggcagtagatggagtcttcattcttgagtacgacaggtcccactctacagcggatcacagtagtgtgccctgggtgccttggtggctgggcctagtctctccccagtcacagtccatccaagcagaaacaggcccttgtctaggaattggctgggattccaaagtcctgaaaaagggctggaagagaccatgcaaactggaatggttttaccagcgcttgcgatattgaaattactcagcgctaagggagaaaccactaggtttcttaagacttggtgtgtcttcttggcagacacaccaagaagatttgcgaactcagctatagctgctgtaggcttagaaacacggcaaaaattgtttcagaagtgattaatcccatttatttccctcaaataccaccccccttcctcagaagggcctccgacaggtgtttattattattactattaattttaaatggagtctttaggttgttccaactttcagtaataacaccctgatgtggctaagctctttacagtttgcatcattattgtttttgcatctcaaagttttgggaagaaataaataggcggcagtttcttttgaagcttttaatacatacgatgcctttttaagg

SEQ ID NO: 1166 - DNA, 4001 bp, Homo sapiens
gtgccgttcccaataaatgtgtaaagtggctgttcccaaagagggtccgctgtccagcccgctgtatacagtcccctctttccctagcatcaacaggcgtactgagacctttgtcttgaaaatctgtttagtgcccaagttatgcttccctctgggtcccactgacccgactcgggatgccccagtggccccaccttgaggagcccagccccgctgcaaaatttgggtttgggttgctactatttgtttttaaaagtgatgaccagaaaaagggaaaaggagttaacctccggacatttccctcacgactagcagaaatgggttgatcttccccacgaaacttcagcgggcctgaaaaagtaaagtttagccctttactccgaccaggggccccggcactgaatgagtgttacaaatatagacacgttcaccagttgggctacttggccggacccaaaacccagctgataagggctagagcagtctcctgattagtttgggctacaagtcctactgtggtaccaaaggatctacacagctatgtttggccgaaataatttccggagacttctgtagtccccccccccccccgttagtaatctggaaagggaagcgcttagataagtaattagttttctttattaagaggacatgactttattattatggatagtagaaacagtggtggttgattagcttgtttaagggttggttataaagttcatgcgtttcgactgggtgccgcgctcctccgtatgttttatttgatttccccctacacatgacacccgccgggtcctggcgctaaacgtagtgctgtctccttagagggactgagtcgggatgccagaaaccctgagattctctcggttaggggtcccaagccccgagcgtctagagaactggaaatgacccagtcgcgtcggaatctactccacaggtccggtcatcaggcccagagactaaggccacctgggctcctgcttggctcggacgcctcggcagcgcgccgtcctcctattgcttatgcccagcttgccctcggagctgcggatcctcgccggggagacgcctgccccggaatcaagggaaccttgaggtctgtagaagagaatgccaccaccccccatcccacctcctcccagttcctctccctgctctttcggaatcagctgcgacggaggatagccagctgcagacatttcgattcagaaaaacgaccgtttcttagccctgtaggcataggtggacgggagaaaactcacccgccaccctcaagcggacgtctctacgacccgccgctccggttctccaccggccagggagtcggcttggtttaacagagggcgcaggggtgcccggctaccgccgcggcggagcccttccttaccgcgtcgcggccgttgagctgggcgcctttggccagacgggcctcagtcttggatctgcgctccatctcctccatgatgccttggatgtggcctccggagatcccgtgaaagagcatggctggggggcggaaaggacacgagttgtcttctgctcggcaccccactatttccatatacacacgcccggggctttcagctcatccgagtgaaggaggcaagggaccagagagggctgccctgtaggagcgcagagacgctcgaggatggagggaaagagggagagaaaggaggagaagaaacagatggagtggaaatcggtctgcttggggggccgaggggaagcaaaaagaactgggaagagttggggggaagcctcagcggctccctgaaggagatgtgcagaaaacaaacaattcgggcggagggaaaaagaggcgtagaaggcgaatcttactgctctgagagatcgagttactaatgggaaacaactgcagcggggggaggaaaacaaaatctggtgaagaaagaaaatagttttgaacacaaagaaagaaaaagacgtgctattttcagcgttccctggctgcttgcaagttcccagtgcctgtagattgggttggggactgctcctgcctgagctgtgtccaatttgttaagagactaaagccagcccatttttgataatttagtaggaggagttctctccccggagctgccacggatttttattcagacaacaaagacctgtcatactcctctcaaccccctggtgatgggcaagcaggacaaacattacaaaggggtggggggatagagagcggggaggcaggaggagggggcatttacctccccacaaaacacacacacgcgcgcgcgcgcgcacacacacacacacacacacacacatccttccaagagttcccagcagtcatgttttaaaggggaaaaggagctcttgttgtccccgccctgttgcagaaggcctagaacccgcctatttgatccgagttcaagatcagaccttggctcaggacacagagaatatcaacttcaaactttggatttcctccttgtggactttttcatccccagcctgcaggactgtcacccgaaatgcataaatattgagcagaaatgtaagcaatttactgaggtggagataatgctggttcctctcctccccatcccatcttcctcaatccacttttaaaagcagctgtctgacaattcatctctttgcctcaccttcttgagggccggagaccctactagatgctggcttcatccgaagtggagagggcgtttggagcgtctgcatttctcagggttacttttggcaaaacaattttctttgagaaaattagagtgtaggggacagggcatggacctgtacacacgggtacgcaattgcgccttggccatagggcggcttattctcttccccggttcaggtttgaaggaaggttgccggagattctaatgtctcatttgaagcttgccaatataggaagcgacttgcggactcccgggagcttggcgcctgcccccgcaggactgggcgctagccccatcgcgtgcttctcccactaccctggcaggacagaggacttgtaaaactgggcgcacccgcacactcagaagggtgtgaaagggactctttgccgtggaggaggggaaggtgagaactgacaagcagaatggcagacctgctcctcacaagaggtgggattgttctgtcgccctcagttctcggcagcggcggcccctccccggccccattaaaaagtgtccacaatactctgatattgtcgattcattcaaacggccagaggccccctaggagtccgaagcacagcgctgcggcaggaaccaacgcggctttacccagagaggaggacgcgccggccgctctctgttccttccgtccccttcgtcagcctgcgttccccactacttcccgccgcctttcccaggactgcggtgcctgtgtcctggcacatcctagatacctcacaagagccgcccggccgcagacccgcttccctccgcccgggggagcccgaccgggaactgtggccaaagctagaaagatgacgggagaaaagccagggagagagggagagagggaagaaggaaagaaaaaaagaagtgagaggatgagaagaaggggaaggaaggaaggcagaaataaagcgagagaggaaacgacccctggtgcagcagcctgacttcctgtcccaaagcgttgtcttctgaggctcctggagtgacctcttccatgaaactgaagacactactgcttcccctccttttttctcagggtcaaaaataatgttatttgcagactggacgcagtttaagtcctccgggtgccaaaatgcagctcataaaacgcaatttcacacaaaaatgaagccaatcaagtgaactaagctggagacatccccctcctccttactttggcagctatacctgacagcagggctgctatttactgtaagtaatgtaattagcccctttggatgggaatcaatgagcttttcaaacccacgtgcacacaagaagggccctgaggaggggctgggggcagcagtcctttcagagacagca

SEQ ID NO: 1167 - DNA, 4001 bp, Homo sapiens
tttaaataagcactttaaataaggaaagcatctttgtacctctgctttctttcacctctccagcagaggggctgaggcccggtggctggggacaaaaaaaaaaatgttcccccttctcccagctgtagtctgaatggcccgcaagtgttccataaaaattacagtgttcattttttcagttcctgagctgagggacaggtgcatgtggttctctctagcctgcgtcggggataagatcttaagtctcctctaaattcaaagttctaccaggtataatggggcaggtcccttgaccagcactgctctccctcacaattgagcacacgcagtccactaagctttctttcctttctattctgacagcacccatcccgctactgttgccgcttttaggaaagtggacggccggactatagtggagcataatagttggaactgagagttcgggatcttagaatctctatgaaggtcaaaaagactgcagcgcccttgtcgccggctcaggtgggtctacatgggcaaagaacccgagcccagtagaattccctaggggggaggaaagggaaattaaacccacagaacagttagggttgagagggaagaagtaacccaacaaatgtgcatattttgagagcaaaggtgacttaaggtctctctctacctgaattttggaggccatgattctgcgcctctaagtttgccctttaagaaggaggcgttacctttcctccagaccctgttaagctggttaaggagccccttcggtttgaaaggcgcggctcttaaaacagtatccagcgtctggcactgtcctgagcacccaaggcccagtgaaacgtcagcgtcagcctgaggctgggaaccatgcgttcagtgccgcgccacctggccctggatgcccgggctgcgctggatggaaggtgagcggattgccgggacacgctggggcctttctccagacagtggagactgagatactccatgtggaaaatttccccctacactgaggttggcagatccatactggggctgctgcacgggcgcacttctgattcagtcctactaggggatcctccctcaagacaaatgggagtcagccaagcagagctgggatacggggagttcggctgcctggaaaggggtacccgaggccacgctccagctgcgcacccttgccagcctttcgctgggcggtacttcccggccaaggccctgccctttcgcgcgttctctgcctaccctcacccttcgcgacaaaaaaaaaacctctcgccagcttttgcttccttcaaacctctgttctctatagcccctgggctcttctccccaaaggggcctgcgccaagtctagaatacagctcttctgaaatctgatgctcttttacctgagatttgttgcgccgcctgccctcagctctgcagaaataaagggagaagtcccgcactgcgtccgctgagatcaggcgcagaaacggctgcgctgggttaggactgaacaacaacaaaaaaatgtgggtgaagccagtttccagttaacccctacacgtgtgagaaacagtgtcttctcggccccccttccatcccttccaagaaagagacacccccagcagctccccggagggtcaggagcgcgtccctggagccactgactactggaggatcagtggaaccaggacctctgcctggcgccccggacactgatcctgaggaaagtcaaagacagtcaaagagaaaggcaaaaggagggtttcaggagtcctatcaggagactctgaaagagaatgtgtatttttgagcctacgaagcgcggtttaatttttaagacaaacacacactcctcttcgttccacccaacgaaggcgcacacacacgcacacacactcacatggtatacgcactggcccaaggggcagagaacatcagaaggaacctggcacataactcacctgcctctagagtggtaccgttcagcattcttagaggaaaaggagtggatcacgccgtaatggtggttgcactggcagagaaaagccgggagtcagaccggcggtacggcccggcttccccaagcacctcctcccatccggtggggcgcgtccaaaccgctcctcccgtggagacctcaggtagggacgcggcttggagcaaagccgggccttcctccggtaggctcccaagaagtccctgaaactcccgggcgtccgggcgcactccgagggcagaaaactgctccgactaaaatatctccatcagggtcttaccttgatgtccagatgtcagacgtttccccaactagaactcggttctcggcgggaggcggcggccagaggtgcgggccagtccctgcgtctcgctgagggtccccctgttaatccaaataaataaataaagcattggatgaaaattaatttctcccttctctctctcccccaccccgttggagttgatctgtttccctcacctctgacccttagctctctccacctgtcttttattttctgtttatgcttccaaatcgggagggggaggaggaaggggtgggcagagggcacagacgcgggccggtgcccagagaaacgctctgaggttgcgttcagcccttccagcctctcaataatcagaggaggtgttaatggaggactcggcggtaactgaacctcataaagcccagagcgtcttgaggctggggcgcagcagggggactggagtcccgcggcgtgccctgggctcccggccccccagccagcttttgcctccctgcagcttgtacctaaaagatgctgccgccagctggtgcttgcatagacggtgaatgggcggtagctcctgcggggaaactaggctaagccattgattgttcacccaccgcgtccccgccttcctgtcccggtccctccttcactcccctcgctcccgggctgggtatcaggaacccagcactcgggagtattctgcgctcgaggtcggcgttcgaggccgggtcaacgagagagccggggcatctcttcctcccgggacccggctaggggatgggggtggtgattaaccttccgggagaaaaccctcacttggacccgggcaggcaggggttagaggggatgcagccagacccgggacggggcggaggccacattacctggtcgcaggttcccaaggggctgtgttgcccggggcgcagtcaggccgcgggaaagtggagggaggacctggaagctgggccttgggccagttatttacccattcccccacccggtgcgcccctcacagtcggagatggggtggcaggggattacagcaaggctcccgcgccggtagggaggagagtatgagcagtgagattgaccgttccaagatgctggtcccggtgatggtgccgccctgcctacccgcccctcctccacgtgccaccatagctactccttggcggtgcgtggcgtgggtccagggcgcagtggggggggggtgtggggggacgcccgcttgcctcccagccgcttgcgaaaaccgcgtgggattgctgctgcatgtggggcacgtgggagtggatgccgcctccacgcctgacccacaagctccgccatacagtttagggtcggtaaggaacaaaccaggagcggcgaaccccctggctttctcttttcatcccaaatcccgaaatgtagctcggagcacctcctacaagatctctgtttctacccaaacacttggcttcgctaactagtcccaccagcccggtcagtcccaccagtttaccttttaatctcccctacacctgactttcctctttccgccctggcctccttagctctttcttctagaatctcccctatatcggtcaggtttcgcagccaggaagggacagtcctcccgggttcatcttctatgctcatcagcgaggccatcgaatggatggacggcgatacccacccgaaaacgcttgggtgctttcaactcattcctgtcgaaagcaaccgggtttaacctctttgcggtccaatacc

SEQ ID NO: 1168 - DNA, 4001 bp, Homo sapiens
ctagtccatccagcatctcccttctctacccctcccccaaagaatgccatcccttcaggctccaacccttaatccccacatcctcctttcccctcccccacacctcctaaagccaacctcccttaagtaacccctccctgcccggcctgggtgtcaacctacacgatctgggattagcaatttcttctttccagatccagtcccaaacctccaaagatggaagggccataggcagcaagcaacttcctttccatggtctttatgggtagctggtggcccaggaccaccggaatgcctctaggatattcaggaaggggaagcctgggaggagggagacctgaagtctctggctccttgtttgaggccaggaatgttaagacagcaatcaatggctgtctggggccataaatgccaagcggagaataggaccagaggccagcctcccttcaccccctgccctgcgacactgaatttcaccccctactgtgctgccctgctttaactgagaacttggggttgcgacctaccgacttccctcccagcctggcccaggaatgtaaggaaggcctgggctctttgggttttccttcctcacgggaactggacagcaaagaccccagtcctgagctttcaagcccccacagggatccttcagggatctgccaaacccagtttttagtgaccagccaggtgaggtctgcattaaaaaggggatgaggctgacttctcggctttacgccccttgggtccagtagccagttgccctcactctctcccgccttctgagctccattcagacgttggaggagctgggctcccggcttaggcccggcatgtgcttccctggccggcctgctcgccctccccccaccggcaagcacaatacaaccttagtttctgccacatggggtcacctccctgccccctgccccttcccaggggaaagaggtaatagacacgtggtaagccggaggggttcccggaagggggcgggggtgctgataattggtgctgcctcccactactcccccacgagatagttaacagggactcagaattggggtgccgaagcaaagacagggatgcataatgagggctcccgatggccctcaattcaactgcgagcccggagcccacccgtggatatgggcgcctagacgcccttccctgggcaaagttaccggaatcagtctcacctggtgcacaaagacatccactggggggtcgagcgcgaccccggcgcgggcggtcatggacaggaagccgaaccccatgcgcacgttgaaccacttacagatgcccgcaccgtgcagcagctgaggctcgtccgccgcccgggccgcgtcctccggcgcctcctcgggcgcctcttctgccgccttggcgcagccacctggagagagggagggccgggcacttagctggggggcacggaatcggagggccgtctcgggccccaggcagggagacccgagtatccagccccacaagtggacagccaggagggggcagctaccaagcaacagaagagaagaaacctatcccggtcgcctcccgcgttcccctagcgtacaccgggacagtagtgccccgaaagttttgctcctcttcccacaacgcgtttcccagagactcacggcgggacaagcctctcctctccatccacccacgtagtctggcgcgcacgccactgggacaccaaggttcctggccccagagacggccctatgaagcagaaggccgcaccgtcttggggtcctttgggcagcctaggactcagttccccacctcccttctacgtggctcctggccgcccctgaatcctaaagtgtccccgctaagtcccgagctcgaacctgcaaactgctggttggacacggagcccatggtcgtcggctgagcccgtggccccgggcccctggtcgggcggctgctggccccggagaagtccgaaggcaaagggttggttcggagaagaagctgctacatcttcccccgcacaatagcggtgggagggcccacggcttttcaaaggctcccaaattctaaaagacaatgacccaaccccccgcgggcagccccctcccctcccctccctctcctttcccctccctttccctccggctccagctccggccctcccccacaactccggtctctgacacctctggggtgtcccttctcagaaccttgaggtttgacaccccctccccacacgcacaactggagatgggtctgtctgccctagaagacttgagtaccccggaatttgagatcctgcactttggactcagtaggggtccccaaagcagatacaggtgggggacctggtggggggggtagttttaaaaccacgtgactgcacacacacacacacacacacacacacacacacacacaccacccccaccccccgggcagataattatacattccagagagttgggggagggaggtgtgagcctggcggcgctggccaatcagaaacacaaaccacctgtcaagggagaaatgaatgggccctccccctcccccagcccttgagctcccctccccctctcttccccctcaggcctctgagctgacccggctgcttggagctgacccgctctcaccccccacccccgtgtgcttagatagacctggagttctggacactgggaagcccgggatgggggagcaggggagaggctggggacacacagggctgatctgtcctgaccaaagcgctgccttccaaagtctgtctgcctctgactacatctgaatgtctgcctcccagagtttctgactcagagtttttctgggcctcccccagttagaaaagagaaagtgctcttaattgattcgttgtaaagaattcttccttctttcctccctccaaacctgtgtgtctaaagttagccccaggtaagctccctggagagcaggaggaacccaaagagtcttgaagctgtttctccaccagctgccttctcgtcctacccccaccccatccccatccactgctgagagagggactgggtgggctggtgggtagaggtacttcctctctactcttcacactcttagattcctaggccctccttgtttcagagtaaccaccctaaaatgcgctcccattccgtagtggggctggtggaggaacaggactggggggcctcctcatttgaagaggtaacctccccttctaggagataaagacggctggctagtgggggtggctactgccctggtcggagatggacaatggcccggggctcagtgcacggccctggccctgccccttcacttccggtgttcagttcaaactggacaatgccagctccggccagttcccctcccccaccactacaacccatttaaagggacagagcctgctttcgggggcatccgcttgctctgaattcaatcttctccaccgagtgtgcagaaccttttggaattctcacgctgtggctctgtgtgtgtgtttgtgtgtgtgtgtgtgtgcacgtgcggatgtgggcacatgtgtatttcagagagaccggatgagtgggggtagggaaggggaagatggggaggaaagcaagagactgcagaagttatttccctttctctcgtacggggtgctctccaagaaatgaaaacttgagcgtaaggaatgggaggtgggacttcgtggggtaaaaaggacaagagtggccctttgctgctccgcctaaaaaatacatatcgttaacaaatattattagcagtgccccactcccatctgaggactctaatttagaattatcaagagttctcctagtacatcagccaaagccatttttatttacataattctcctctcccaaaagtcttatctcccgctgttagtggcgcccttaaaatatattcgctccgtgtacctctgttcctaagactcaggagcaagtggctgaggtctggctgaagaaaagggagggaaaggggagttgaacgctctggcttctctaggtgggttctcaagtgatgcg

SEQ ID NO: 1169 - DNA, 4001 bp, Homo sapiens
cacatgcctgtaaccccagctattcgggaggctgaggtaggagaatcgcttgaacctgggaggcagaggttgcaatgagccgagatagtaccattgcaccccagcctgggcaatgagtgaaactccatctcaaaataaataaataaataaaataaatcacaatcaattgtattctacaaataaacagtacagctcatgactggtcaatagctgtgccctacccaatacagtgactactagctacatgtgactatgcaagttaaaattaaataaaattcaaaattcagttcctccatcactctagccacatttgaaatgttccatggctacatatggctagtagcttggctgccctactggacatcacaaaagagaacagttctatcatggacaaagttccttggggacttagtgctgctctctatcaaatttaaaacacaaacacttttaatacgacttttcaccagcttggcaacttgaatttttaactttataacttactaagaacacatgacctcacaaagaaaatggaatcggtagtatgttgagtcctcatttttaagtccatttgccttgtgcatagataagattcaatagtaattgagcctttcacaaatatgtataaactgaatagtgaaagtggattcaggacttttttttgtaattaaataacatatttgtcttttcatataatttatgcaatattgtaaattacaaaattaagttccattgcccttaaactatggaattggtgcttttacttactcaacacaagtgagcatacatgtcttagatgtcagggtgagtaaacatggttaggggaggcaatgccctagggtgggtgtcaggcagggtacacgtacgctgtgttggtcacatccatgcataaaggtacctttatggctcttaagacacatatagaataaagtctgcgggacggggtctacctgaacactgagtatccgggctggatgatctcaggaaaggtccacagccacctgtggtcccaggggaaggggccaaccctctgacacggaaacacttccaggggtggacacaccggtgggggggtggggaggacagtgaagatcacaagtgcccgtagaggcaggagctgtgacaggacaagatcagaggctggggcaagaagaaggggccgtggaccaccccgtgcccagcccgagccctcccccggccccgggacaggcgagttacataaccccggcgggcgtctctcggcgccgggcgagtggtgcaggcggcgaggacagcccccgcgcccaggggccgctcttccctccacctcggctgggggccggagtggcgccaggggagcagccaccgcctccgcctggcacaggctggactcccgggctctcggtttccggccctggcgctcacacaaccccagaaaccaacacacagacaccataacaaaggcggcgacgcggcggcaacaccggagtgggaggactaggggaccacagtggggctggcagtcagcccacctgcccagcggagggcacggccgtccgtcccggccggtgcaaccgctgggcaagcagcaggcgggaaaaggggggggtgctttgaggtgctactcactctcgtcaggcaactggtcgagctccgccatcttgaacgagccgcgccgctttttcaaaggctgcccgccgcggtgcattgtggggcggagactgtctttgcgagggaggttcgaatgcggagctcgctgcccgcggcgccgcgctgcgctgctcccgccgcggctggctgaggcgggcccggctccgcccgcgcctgcccggggaggaggtgccgccgaaggggggccgcgcctcgcccctccgccgccgcctccggccgagccgggcgggaggaagggaggaaggaggccgcacggcgaggcccggcgccggagcgcggggggagcagtaccagctccggagtcccgcccgggccccgctcccggcgcatgttccgcggcccgcgctgcagctgcgggaactgcaggctgtttgttccgagtggagaacgggagggaggccccggcggggggaaagaagccctcggttctgggtcgcattgcccgagggggctctacgcaaagtgaaatactcacagttcccgaaacccacgttgcttgggcgcctccgtcccctcacttttcccgagaccgccggccgcagcagccccctgcgcgtcgcgacgtccgggactcggtcccagcggcccctcgcgatccgggcacgcctttcccgaatgttggaagctgagctgcgtgcagccggggagcgagaccttgagaggtcatgaagttggtcatttaggccgacagctaaagaactgttctgctcagctgtttcatccattcgacactagatcgtgcagtgggctggaagagaattagaaaacgagtaacaggaggcttcgagaggatacagaaaggaacagtgacactacaaggtgataaagtacctgatccaaatgttatgagaatactggacgagaattgaacgaaattgaaagaagcccaaggaaaaatttcacaatatctgtctgtaacactttccagtaataaaacactgttgcttttcaaaaattcatttaacgaatgtcattgagctccaatccttttctccaggaatttatgggggttggaggaatgagaccgttaagcagtcaaaagacaacgtgggtgaattccaggaactacaaagttaaaaggcggtagactaaggtgacagagtggtacacagaggcccgcccaggctaaggagttgaacttgcttagtccactggagcagtggaaaagtcgggtgtaagaggggcacgtttctatttgtgttttagaacaaaaatatgggaaatggattggtgggggacaagatgagagcctagaaaccagtcaggaagaagcttatttggggcatgcaaaggacagaagagagatgcctgcactggtagctagagaggtgcagcgggtgggctctggagccccagggcctcgatgggaagaatccagatgggctgctagttgtataatctcaggcacgttggtttcttaaccgaattctctgtgcctcagtttcttatctgtaaaatgcaaataacagggttattttgagggctaaacgatttgatagatgtaaggaccttatactagctgctagcacccatcagctagccactattaccaccattaccacagcataggcagtattagagagaggtggcagcatgcactccacctttcaagacgtggaaaataaaggattgggtgagtcactgggtgtgaggagaaggaagtctcattgctgatgccagctctgtgccttgggtaactgggtgctgccatgctaaggtaggagggagagcagggagtgagcagggagggtgaaagttcaattttacaaagtaatccttccttcagagctagcttaacctctcctttgccttctaaacacactctgatctgctccctaagaagattaaaacactggtccttgttgtcagcacctagggggtgcttcagcagcttgcacttcagtatcaatttggagatgagatcaagaaaaggtcagccctttaagaatggaagaatagaaattaaaaaaacatgagaggttaccagagtgggagaagcaaaagctttgtgaatgtcatgatagtcaaggtgtcattagaccaaggcaaacctggttttattctgaggcagttttcatgtacacgcaacaacacaactactgtttaaatcaatgtttttaggcccttgcctgataatctgcattttaaacaaaaactttgactcttctcataaatccaaagcctgaagctgtatcctagccccagatctagcgcttagctgtgtgatcgaagccaaggcacacctaactcttcaataagtttcgttattgaatatttatgacaggttttacaatgattggcttacttgattctcccaacaacctggtaatttgtccaaagacaatggcaagcaa

SEQ ID NO: 1170 - DNA, 4001 bp, Homo sapiens
tgtgactatgcaagttaaaattaaataaaattcaaaattcagttcctccatcactctagccacatttgaaatgttccatggctacatatggctagtagcttggctgccctactggacatcacaaaagagaacagttctatcatggacaaagttccttggggacttagtgctgctctctatcaaatttaaaacacaaacacttttaatacgacttttcaccagcttggcaacttgaatttttaactttataacttactaagaacacatgacctcacaaagaaaatggaatcggtagtatgttgagtcctcatttttaagtccatttgccttgtgcatagataagattcaatagtaattgagcctttcacaaatatgtataaactgaatagtgaaagtggattcaggacttttttttgtaattaaataacatatttgtcttttcatataatttatgcaatattgtaaattacaaaattaagttccattgcccttaaactatggaattggtgcttttacttactcaacacaagtgagcatacatgtcttagatgtcagggtgagtaaacatggttaggggaggcaatgccctagggtgggtgtcaggcagggtacacgtacgctgtgttggtcacatccatgcataaaggtacctttatggctcttaagacacatatagaataaagtctgcgggacggggtctacctgaacactgagtatccgggctggatgatctcaggaaaggtccacagccacctgtggtcccaggggaaggggccaaccctctgacacggaaacacttccaggggtggacacaccggtgggggggtggggaggacagtgaagatcacaagtgcccgtagaggcaggagctgtgacaggacaagatcagaggctggggcaagaagaaggggccgtggaccaccccgtgcccagcccgagccctcccccggccccgggacaggcgagttacataaccccggcgggcgtctctcggcgccgggcgagtggtgcaggcggcgaggacagcccccgcgcccaggggccgctcttccctccacctcggctgggggccggagtggcgccaggggagcagccaccgcctccgcctggcacaggctggactcccgggctctcggtttccggccctggcgctcacacaaccccagaaaccaacacacagacaccataacaaaggcggcgacgcggcggcaacaccggagtgggaggactaggggaccacagtggggctggcagtcagcccacctgcccagcggagggcacggccgtccgtcccggccggtgcaaccgctgggcaagcagcaggcgggaaaaggggggggtgctttgaggtgctactcactctcgtcaggcaactggtcgagctccgccatcttgaacgagccgcgccgctttttcaaaggctgcccgccgcggtgcattgtggggcggagactgtctttgcgagggaggttcgaatgcggagctcgctgcccgcggcgccgcgctgcgctgctcccgccgcggctggctgaggcgggcccggctccgcccgcgcctgcccggggaggaggtgccgccgaaggggggccgcgcctcgcccctccgccgccgcctccggccgagccgggcgggaggaagggaggaaggaggccgcacggcgaggcccggcgccggagcgcggggggagcagtaccagctccggagtcccgcccgggccccgctcccggcgcatgttccgcggcccgcgctgcagctgcgggaactgcaggctgtttgttccgagtggagaacgggagggaggccccggcggggggaaagaagccctcggttctgggtcgcattgcccgagggggctctacgcaaagtgaaatactcacagttcccgaaacccacgttgcttgggcgcctccgtcccctcacttttcccgagaccgccggccgcagcagccccctgcgcgtcgcgacgtccgggactcggtcccagcggcccctcgcgatccgggcacgcctttcccgaatgttggaagctgagctgcgtgcagccggggagcgagaccttgagaggtcatgaagttggtcatttaggccgacagctaaagaactgttctgctcagctgtttcatccattcgacactagatcgtgcagtgggctggaagagaattagaaaacgagtaacaggaggcttcgagaggatacagaaaggaacagtgacactacaaggtgataaagtacctgatccaaatgttatgagaatactggacgagaattgaacgaaattgaaagaagcccaaggaaaaatttcacaatatctgtctgtaacactttccagtaataaaacactgttgcttttcaaaaattcatttaacgaatgtcattgagctccaatccttttctccaggaatttatgggggttggaggaatgagaccgttaagcagtcaaaagacaacgtgggtgaattccaggaactacaaagttaaaaggcggtagactaaggtgacagagtggtacacagaggcccgcccaggctaaggagttgaacttgcttagtccactggagcagtggaaaagtcgggtgtaagaggggcacgtttctatttgtgttttagaacaaaaatatgggaaatggattggtgggggacaagatgagagcctagaaaccagtcaggaagaagcttatttggggcatgcaaaggacagaagagagatgcctgcactggtagctagagaggtgcagcgggtgggctctggagccccagggcctcgatgggaagaatccagatgggctgctagttgtataatctcaggcacgttggtttcttaaccgaattctctgtgcctcagtttcttatctgtaaaatgcaaataacagggttattttgagggctaaacgatttgatagatgtaaggaccttatactagctgctagcacccatcagctagccactattaccaccattaccacagcataggcagtattagagagaggtggcagcatgcactccacctttcaagacgtggaaaataaaggattgggtgagtcactgggtgtgaggagaaggaagtctcattgctgatgccagctctgtgccttgggtaactgggtgctgccatgctaaggtaggagggagagcagggagtgagcagggagggtgaaagttcaattttacaaagtaatccttccttcagagctagcttaacctctcctttgccttctaaacacactctgatctgctccctaagaagattaaaacactggtccttgttgtcagcacctagggggtgcttcagcagcttgcacttcagtatcaatttggagatgagatcaagaaaaggtcagccctttaagaatggaagaatagaaattaaaaaaacatgagaggttaccagagtgggagaagcaaaagctttgtgaatgtcatgatagtcaaggtgtcattagaccaaggcaaacctggttttattctgaggcagttttcatgtacacgcaacaacacaactactgtttaaatcaatgtttttaggcccttgcctgataatctgcattttaaacaaaaactttgactcttctcataaatccaaagcctgaagctgtatcctagccccagatctagcgcttagctgtgtgatcgaagccaaggcacacctaactcttcaataagtttcgttattgaatatttatgacaggttttacaatgattggcttacttgattctcccaacaacctggtaatttgtccaaagacaatggcaagcaagtgctagaatcaggaatctagcccacttttcggtgcctcagtgactccctctgtgatgggaggattacacgtatgtctttgtccatttgtgctgctataacaaaacatctgagactgggtaatttatagacaacaagaatttttttttttttttttgagatggagttttgctcttgtcacccacgctggagtacaatggtgtgatctcggctcactgcaacctctgcctcctgggttcaagcgat

SEQ ID NO: 1171 - DNA, 4001 bp, Homo sapiens
ctgtggcataggatgcaggaggcacttgactgggaagctgggaatcccctgcaagagcccaggggcaactgcttctctactgcaattgaagttggggtgtgtgagagacccaaaggatgcccaggttttgagttctgttgcttggtcttcagtcttgggcttccctcatatccctccttaatggtgtttggattctggtccagtgtgtggatctgagggagagctcttgtcccttttggcctgagctgcctgagaaattcccaagagacagattgtggaccagggagcatagataagtgaggagagacagcatctgaccaagtgctgtaggatggggaggaagggagccgttggctggcacagcaggtatctgggcacagacagtgtgcagagcctgtagacttatagtcagtttctgggtaccaggttccgggaaccctcaggaagatggtgactacaatggctgaggtgacagaggagaaggggccctctaggtgatgagggcccctgactcatcctgttagatgtcaacagggaccccaaggcagaggaagtactggaattggcaagggatggctacagagataggagcaaaagcccatggatgctctctgggatacagcgcgtctgagtctctgctgagcggcaatcctgatcacctttgggcttgtgggcttcaggctctctgggctctacagggtcagctttctactacatgccctgttttttctcatgtggaacttaggagaggcagtttaagagatggtcatttcttcccctttccttcccactctccacctcctagaaggatcattctagtggctatcctacagccacttgagaggattgtcctagttgggaaactaaagaaagaggccaaaagagcagagggatgcagaaaactggtgtgaggcttggggatgaaaaagaataacgtggggcaaagactgcagagcagactcttctcgccccaaactgacctaacaggtctctgtggcatgcccagagctctcccgggaaagatggcccagcctcccttgttctccctaggcttgttctgggaagtccacctgacagctagctcttcatcactactgctgcagttcctgcccatcctcgctctgcattcagcaaaagtgcagtgaagcatgtaacccagctttcttccttcctgctcctgtgagtttcccctgagtccgctgggccaggggctgagggagctggagcaacctattttatttctaaggtggctaatttaatcacaaatttcccttgccaacctccatggctgcaggaccggcttccggccactttgcaggaagcgagatgtcagaaccacttttttgtcccttcagtggggtggggacatcaccaagacatgacccttgaaggcatcacccctcaagggtagggagcctttttcttgtctttatgtggcagtccagagacacttttgaacctgggtatcctgtatcctctttaaagcacacctgactgacaaatgggaactgtgtggggagagggttcctgggggaaagatttctggaagatccacaccgattgtggagaaaaacccttccagaggaaggggaagcactggggagatggaagggaggtctccttggagcccttccacccaggggtacttgggatatttgagtttccccctcaaagtcccatggggccaggattaattgttagcagtgtgggggcccaaaccctcttgccttgaggggcctgtctggcccctagtctggcctgtctcggagaatgttatggaaaagggcggctgcatctttgggacagagagtgggggcacttaccggagaagctggaaggtggcatcaagtttggcactgcatctgtccagcgctgggggccctgtcccattcgagctgcacctcaggcccctgcaccttccctgtgtgcctcaacccccgctgcctggctgcccggctgctgcctgccgctgctgctgctgctgttgctgctgcggccgctgctgccaagactgaggtggagaaaagagccagaaagcatttctcctttttttttttcctctctctctctctctctttttaaaccaggcaagaatgagtctgcagcaaccctgttggtgcaaaataaataaataaagcaaccagggagggctgcagcaagcaccactacaggctggcaagtgacaggggagggagccaggagggaggctctggtgccagggaggggtcatgcaatagcaagaacagcaggttctagaggatctctctgacatcctgattcccccactggggagcttgggccagccaccttccagaggactgtcttttggtctcccagatgtggagcaattctgtgcaacctctaaatctaaacgttccccgtgggtatcatttatgggaagttctcagtctagagcatctcccgtggggctcagtttgaggctcctacagtgggggttcctgaagattcgttcacagtcctcactgagggactgctccacctggggagaaactgcaggggtcgggtgagggtgggttggatctgtataatgctgatggattgctgagctggaaacctgagtcttgacccaggaatgagactggagagcaggcatgcaggtaatctaatttaagaatctcccccaccctctgacacacacacttcttgcctttaaaatcattttataaagaatggcacaagttggggtttatgtttactcagatgaacccgtccccttagaggacacaatcccacccccaacccccccaactccacgactgcccatcattgctgttaatccctcaggggagggttcacagctgtttatgaagccaagagaggttctgggcaagatcacagctggggaaacaggcccaggccctgctccctggtgtcctccatgctggagtcagcggtgcccaatgacggggtgatgtgatcacatctgcttccttctccacaacaagagcagggctggcgggcaggccaggaaagtcctccaggatctgatcttgccttccgactgaccagtgcgagcgacttctgcttctcttgggtcttctagtggtagaagacagctggagctggggtggtatttggatcaccccagacccaagatcagtggactggagcaccatggaaatgtttgggagggtccctcaggattgggactttcccctgaggcctctaggctcctccaagctgtggcctcaaggataagagagattgtgtcaggttcatgtgtctctggaactgcatgattgctgttgagtctgtatgtgtttcacctgtgtatggatatgtgtctctgatcagatttgtgccagcccctaaagtctatctttaaagtgcacataagaggtttgagttttaactctatgtctgagatgctcttggccttcattgtaccctagtcccacacccaaatcccataaaacaattatctccagcctctcatcctcatcccatccatttttggttagaccccaggtaaagggtagggtgcccaaatacttccttgctgagctgggaggaaggcagaggcagaaaatgtaaagctccagattcattttatacaggtccttctgggctctcactgccagtctctgagcttgatccatctccccaagccgaagcccaaagggaaatgcaatgaggtatttcaaaggcttattcttagcttctgagcttctgaatgaattgcattctattcatccagggagccctggatgcccctgttttcttgaggatgtcttggtcccccagaagtccttaaatcccagccaccccatgccttccagaagctgggtgtgaaggaatatgggaaatgagacaggtcaaagctgaggctggagatggtgttctgccagccccaccctctggcgattgtcccactgccaggccggcctgctgacagaaagccagccgcagcatctgctcacttccaaagagctggtggggaccaccctccagggttcatgggaaaggaaaagggtgagggt

SEQ ID NO: 1172 - DNA, 4001 bp, Homo sapiens
tcctgtgcccagaggcaaagaccttcccttgatcttgacttagagacttgaagcagcaggatagtagctaatagcagttccatcacatagccttgttaaatcttgggattacattggaaaaatagtatttcctcatgagtttcagattcatccatttgtatccccagcacctagcagagttcctgtcttataataggagttcaaattgtatgaagaacaaagggaaattgatgatgaatgaatcattaggcacatatagcaaaatggctctaaaaatctgttttcataggaatttttgggtttacattattaggatttaagagtgggaaaaagtgaagcatgttctacttaaggaactatgaaccaacaaatttgagataataatcatttttaggttatatgtcatttgcaatgtctcagtcaatccatattgtaacccttgaagaaactgaagctcagtgaaattaagtcccttccccaaagatttggctggtaagtgacaaagatctccaaagcctgtgtgtgctcttttcactaaactttcttaaaaaaagaaaatctacagaaaagccctgtaacttttctctgtattattgttaaacagaaagttaaagatatagtcacttccaggtcaggcaggacctggccaagcagacagaagggatgtcttgtaaattccaggcttaaattctgtattccacacccttcactatatattccttattacttacactataaatctggaactcaaactcagacaggaaactaccctagttaaacgaaaacaacaaagaaaaccctcacatccctctttccagaaattaacgaagttttctaactgaaatagagtttctaacctggcacatttccacagaatttaacattgaaagagccaaggcctgggatttatcctcagttcctgggcaagggccaggaaaacacagccagacagaaaggctggagttgtgagtctccatactaaaaaagataccaaagtaaggtactgagccacaggaagctgctgtgagttcagtggtacaggtccggatttaaatacacaattactatgagtgacttgtgaaggcactacctagttccccagtaaatctgaagttgcactgaaatttcagagtgaaggtaagtaagtaaagaatttaacagtcaaggttaaggggctggagcaaattaacaggtgagtccaggaattgcagagatcacagaggaaagactgagagggtatggatgagaaattggatctgaaataaaagacaggatcccacacaatgaggactggttctcaaaggcagagagatgttaaggtattaagctggaggaggaattccatttctaaaggagaaaagcttaggaagaaaagaggattgtatctgaaaaagagtccctggagaatatattaataactcagtaaaggggaggaggtaggaggcttaaacgtgtgtatgagtgtgtgcgtctgtgcgtgtgcgtagcccagaaggaaactccccaaaaggaaatgcatgtgagggctccacgccaggaaaagcgatccggaggactgtgggagcaaggctcccttacagagggtgtcgcgcaggaggccagacccgcagactcacctcggccatagccctgcgtgtgcttggcgaagctcctcaccacggcctccacggcctctcgcagcactgccgggctgccggcggcgccggggggcaggggtagtcctggggccccagacaggagcagcggcggcgggggcggtgcgggaggcggcggggcaggcggggggcccgcagggggtgtggcggtggcggccgcggccccagtcactccgggccgcagcgctcggagagtgcccctcccgctggtgcccacaccaggctgcagccgctgcgctcgcatagtctccatcccggccgccaatggagtagcgccccggagcctgccagcctgccgagctaacggtcccaaccaccccagtcagctagcgcctggggactcagggcggtgccagggccgaaccttcagtcaagtgggggcggggacgagctaggtcccatgccaatcaccagtgatggggcgggagctggagggctcctgctccgccataggcaaattattgaggagggtggggattctcagaaccaattgcaaagagaaaaagcgtatcctctgaaaggcagacgcagagcttcggcgcgtctttgggagtcctgtggcaagcactagaaagcaggacagaatcttggggctgggcttgaagaaaaaaatgggcctagatgcaagattggggaggattgcagacagagtagagatcattttgtcctaccatttcatttcacagattgcaggtgaggatattgtggctcagagaagtaattcgacttgtccaacatcatatgcaattggtggtggagctaaggcaagaaagatactgacatttaatgaacataaactatgcaatgtactgtagtgcatgtcttatttacaatcacaatcactaactagattttgttattttagggataaggaaacagatgctgagggaagctagaaaaatggccaaaattaaatagctaagagatggcaaagtggaattcagagtttaagcataggtgttctgattcccaatatttttatctttttactatgccacattgttgggtaaatttctgagttcacttattctaagtagaggaagggaataagagagagtgggatgggcaagtctctttgcctcccattagagtgagaaagagttaggatacatgcagaaaattagcaaactgagaagtccagttgggggaattaagaaaattacccttgttggtataatatgtcagactgggttcctctgattactttgcacacacacacacacttgcacacatgcacacacacacactctacataccctttatcatgtggtcaccaggccatttttgcttaggtgagattatattaactgcttccccccatctctcctacagtggctcagaaatcaaagatggggaaatagaggccagaagtagaagaaaatagaagaaacacacttggtgaaatgaaaattagaccctgaataaaaactgtgagtagtcaagaaataggaagtttcaaaaggagacagttaatctactgggatatatctgctgatgatggagggaggaactctttgtaggaaccttaaagaattcaaggttggacatagaggaaactggaggaaatgaaatcctgtcaaatgccttaaaatcttcaggacacaggacacttgccttttctctatagaaaagttggtttcttggaaagaaggtggctggaacagctaagtatcccttggataattatagctataagttagtgttaccctccctccccattcctcattccccatacccacacctccaggcagaagtgacaaaacagagacttctgaacacatttatttgatatgtcaagtggagagaggagtgatttagggtttctccccacttctacctgtgggggtgttcataagctcagacagacagaagagcagcttagagcccatgacccaccccctgggaaaatgagacaatctgttgtagttgttggaggaacagggtgggaataaaaagcaggaagttgagaagtgaagttgagagcagtaaagacagcagcagaactgaggctgggggttgctgcaggaacccccaagaagagtgaaaaagatatcctgaaaagtggttggggttagaagcagggtgtgaataaggagccaggcctggagaaagaagcaagacctgcagaatgggctgggatgtccacggagagagtgtgcaaaatcatgataggctgtgtttcagggcatacatggaaagcaagggattgcttctgcaggagggcaaagacatcggagactgcccataagtaagggttccctactgcttctgaacaaatgcaagagagtttgggaccctagccctgtgtgtttattgatatgctgtgcctgtaggtacacaagtaat

SEQ ID NO: 1173 - DNA, 4001 bp, Homo sapiens
atcacttgaacctgggaggcggaggttgcagtgagccgagattgtgccattgcactccagcctgggcaacaaaaccacacctagcaaagggttctaggaagagcagaagtttggagtagatgataaaagagagagaagaagtcaaagccaacagccctttacggatctccaagcacccttagtgctcttggcctgggtctgcatagagaaagggaaggcaggaagaagggaaacaaattttgatggggctggaagagagggcctatacttccaagctcccaaaggcttttttagaaaagaagaaggtgcagttgagtagggtggggtagggtggggcaggggtgggtaaagtgggagtggcctgaatcttccaacggctggatttcaaaaatgtcactgtattccagcacttcaataagacaaagatcaaaacgtcagcagctaagaggatgggcccgagcaaagactgcctggccccgctgggaaaatgaaagtggctcaccccaaggagggaaggacagtgcccccaaccctcgaagacactaggcagagggccaagggaggagtgcggccagacctgggcataacacaacttcctgagctgggagcctctgccctctgcctccctccctcccttgcattcctgggccaagcaggccaagggctgtgggagctgcgggggagccgatctctcatctcccggagctcttttggtgggcctgtcagagcccaaggaaggtcccagacacgcagagtggcagagtgagggagaacttcccaacccttagaacccaggacaaggtcatgctgagggggggccaccgccaagcccttgggagggaaaagggggattgccctgccttcctgacctcgctccaacacgctggacagatgccaacttgagagttatgtcttagtgggcatcatgtgttcagagccagcttgggcaaagctagcacagtgccaagcccgctaacaaagttctaacaggaccctttctgccactccgatgtgtcctgggtgcccagagttcttcgagctggcagggctagttctgttttgctcaagcccctccccccggctccaaatagttggcaaatcccaatctgaccgaattcaggccggccccagccccaacttgtccctgatacccccaccattccttatatcctccccgaccctctcccagagaccaccacttccctctctgtcctgtcttgacaattccccttgacactgccagtcacccgctgggggcagttccggggagggaggagactatggcaaagttatcggcctccaggccctctcactcccttcctgcggccggccaggggcgccggcccgccgccctctccactccccgccaggcacgcagccacctgggcgaactcaccgcgctttcagctccttaaactcctcacgcactttgctcagctccagctgcaggcgggcgcgctccttggctactgagtcaagggtcttgcgggcatccccgagctcggcctcgtaggcggccttgatgccggacacctcgcggctgaccacctcttcagactcggtgatgcgaaggcgcagccctgcgttctccgtttccagcgagcgcacacggtcgatgtagaccgccaagcgatcattgagctcctgcaggtcctccttctcctgcagccgggtgatgcgggtgggcgacagcggagtggagctggcctgcgccccgctgcgggtggcgcgccgctgggacggggtctccatggccggcaggttggcagcgctgcccgcggggcaggggtcccggaaagggcgcggggctcgggtcgaaggacagagactgctcggagtcggagtgcgccggccggctggctctcggcttgctcctggcaggcgtggggatctgggccgggcgctgtcggacctcgggatctgggttggctggtgtaggtgcggcgctcccgcgaacactgagtcaccgacgccggggcaaaggctctaataggtcctcctctgaagggaggaggggccactactcttaaaggggcagtcccagatccattgggggtgggggcgggagtggtgaggagggggaaggaccgttggggtgtggcggagtcgggccccaccctctccagcgcacccctaactgcgtgaggctcaagcttcccctctcttggctcctgcctgctcagcactgtcggctccaagcttgcccccattgcctcagaccttctgggctagagggcagagccaaggagggagagtgggtgggcaaaagggtcggggagaaagagagggaagtgggcgcaaagcaagggagagggtcaggtaggcagggctgggagccaggaaagtggggggagggctgaggctggtgcccatcagtgtgactcacccttcttccaccactggctccccctgtcctcccagtagtaatagtgagtcaccccaacccccctccacacgtgggcagcccattcagagctgcatctcagtgtgccaggagtggggtggagaaggaatgcctgggttccctggggggagcaaagttctggaacctgagttcctttatgcccccagtttggggccagggatcaaggagtttggggggtccctttttttctttcttttgccccaatctatctctcttcaaagccaagcattcgtttttagacccaagcaacaagccacagtcccctaaagaagtcccctaaagaaagccaagaataggagccaggcactgccccttccatctcctgtccccttcctttggacccaagcactgcctgggttccttcccccttcagtccctttctactgcttaccgcacccagtcaacttatttttttcccccagaactgtacttattttaatggataatttaaaacagataccagagctgtgcatgcattcattacgttgccaagacactaggtcccagatttctgtggttcccagaggggcctgaaaggggaagcagggctgggggctggacagccaatattgggtctctatcctggtttcagccagaaagaaggtagtggggggcaagaaggtagtgggggacaggaacagcaaagaccccacagccttgctggctgcaaaggccagcaccatactcatctctactttcctctctggccaggtccattctgcagctggctctggggaggggccaggctctctcacaaaacgagatcactcaggtccccagggttcgctacctcaggctctggagcctccatcctcaggcctcaccaaggacccttttgataagccttccactcccctcccctcatcctggcccctatcctggtcccaccatccacctcatcctctgtttgtttgttttttttgtttgtttgtttgtttttttgagattaagtcttgctctctcacccaggctggagtgcagtggcatgatctcagctcattgcaatctccacctcccgggttcaagagattctcctgcctcagcctcctgagtagctgggattataggcacctgccaccaagcccagctaattttttttttatttttatttttagtagagatggggtttcaccatgttggccaaactggtctcaaactcccgacctcaggtaatctgcctgcctcagcttcccaaagttctgggattacagatgtgagccaccatgcccgtcccaccttatcctctctaagaggtgacagcattgaggcctgggtcccatctgcctgcatgccctgcccaactgcctcccacagcttatcctccgatgagcaaccagggaaatcaaattatgttgctaccttgtacagctccaagatatcagggcttccctcaaacacaaggaaagcagggctggacaggccctcagttctgggttctgaagcctggcctcggggtggatgagggactggagtgggattaaggcaggaactttggttattaggggaggggaacaaggaaagttctcatctcagtgagggtgcctgggcagcatggtgagcactagggatgcacccg

SEQ ID NO: 1174 - DNA, 4001 bp, Homo sapiens
tctaattcttcctctttcactcttgcttggtggcagtagcatcaaatcccacaataaggtttactgttgatcttatgttaaatccccagtccagggggcaaacttccccaactccaggaccctcccgggttcctcagtcaaggttctccttccctggatcttctgcctagcaaaggaaaaaaatccctgcagtgtgccaactgcccccaccaccccccgaccttctgagatcctcagctcaggttccagcactcccattagtgtgcaaattcactctttccaagaaacagtttagggaactggactaaacagctcagccctcaaggccccacattgctaagtctgtgaagtcaattcatctgtttccttgcctctcagcaggactttatcttacaaactagttcagatttttgtttttcaagtcactccagaaaaggacaccttaccactgtggctcacccacccactattataaaactctttatggaagttcttcttcaagtctgacctcgagccctcaagctgcagtgccatcccttcttcccttgggaaagatccagacataaaaagggtgatataaaataaatgcagaaaatatggggtaaagggagaagaaaaaattgcattacactccaccttcctgaaactctaaaagtgcctaactctccaagccttaaaaacttattttcattctcaccgaatttccggagtcaaacgggactgaatgggtttttttgtttgtttgttttgtttttgtttttttgtgggggggacggagtctcactctgcgatctagactcactgcaacttccgcctcccgggttcaagcaattctcctgtctcagcctcctgagtagctgggactacaggcgtctgccaccatgctcggctaatttttgtatttttagtagagacgaggtttcaccttgttggtcaggctggtctcgaactcctgacctcaggtgatccacccgcctctgcctcccgaagtgctgggattacaggcgtgagccaccgcgcccggccctgaataggttttcaatgggagagaggtggaggaaacagagtggaaattacgatgagtgctaaaggacagatcaccccaagctgtattcacagcccaggcctgaaggaagcctgggttcccagtccatcctggtctctcctccctcctgtcatatccaaagctcaaggccctcaccccaaacggttaagtcaccccaggcctttaagacttttcctgcctgcccactctccgtccgacccccagttctgtccctgcactccttcaacctctgcacttcatcactccaccgccctcccgaccccctccaccgagcagaaggacgtgaactaactcacctcccagtcggtgcctctgagatctccgagactgggggggcggggggcgggcgaggggagatggcttgctgtttagggatgaggggaccccatcctttgccagggggttccagccccagcctggcaccctttcctggcccccacaacacgcagagcccagctctccccccatcgctgctgcgggctttgtcttctctgccgagaacctctccccgcggccgggctccgggatcgactctgggagagcgggagggggaagcggagagtgagcgcggcagggagcggggagaggggagcgagagagaaagccgcagtgagcgagcggggacggctcccggctccccgcccccggccccggccccccctcctcatttccataaaaaagcgggcccccaggaccggccggcgcggggcaggagcgggtcctgggagggggcgcgcggcgttagccagcttcatacccgctctgtttccgcatactaccccttctccccgcaccctccccttaaaaaattagggacctcgacttccatcccactcctagcttgccccggagctgcgaggaaagaccgaaggccacatccctatcctcctcgggtcaaggaatttgtccccgcgcccccaagggcgggaaactacaactcccggcatgccccgggcgcccccggcgcgcccccctcccgtcagtttcatgctgctccatccagttcatttaaaacaaaagagtttgagcgctggaaggggctgggctctattgggggccactgagcgccgctcccggactggggctcggtgcgggagcctaacgggggcgcctggacagcgggggctagagactcccaggtccgaggcgggaggggtgggggcagagatcctgcagccccccgccccccgtcacccccggagaggagaggagatctgctttcttggttttgcttctctttccccccacccccaccccgggggctggggcgaggggagtcgggttacagggtgtttggggaggggggcttagggggagggtctatctttctatctcgctttcttcccccctccccagttctttgttcccccctccccacacaccccctcctctcctctcccctcccctcctctctcctcttttcccttccaccacctctctctctctctctccctctctctctcccccagcttttgtttcgccatgcctagtctagtggtatctggaataatggaaagaaatgggggctttggagaactaggatgtttcgggggaagcgctaaggaccgagggctgctggaagacgagcgcgcccttcagctggctctcgatcaactctgcctcctgggtttgggggagccccccgcccccacggcgggcgaggacgggggaggtggggggggcggcgcccccgcgcagccggccgcccccccgcagccggccccgccgccgccgcccgcggcgcccccggccgccccgacggcggcccccgcagcgcagacgccccagccccccaccgcccccaaaggggcgagcgacgccaagctctgcgctctctacaaagaggccgagctgcgcctgaagggcagcagcaacaccacggagtgtgttcccgtgcccacctccgagcacgtggccgagatcgtgggcaggcaaggtaagcggggcgccgggaccactgagagggactgtagtgggggcaccctcgtccctagcgcggaaagttcatttcttcccttcttgcccgcctccggctctgtcccttccccacaaagggggacccgccccctaccctgatttcaaagtgccacaaagttccccgttacccctagtcgggacggttctccagatccttcctcccccaggactctgcctttagacaaagaaatatcctcgcactggaagagggaaaggggaggggatcggtctcccaatccagggaggctgtcctgagggggtgtccactcctaaccagaaaaactgacggaatgtgcaaagagttactcagaagcctgtactctggtatctgctcctaggctggggagggggcatccctggggcccccagccgcctggagttacagactttgggggagacctggccctcgaagccagactgagtatctgtctctttgttgggctgagtgtaggaatggaagggggtgtggcccaggggagggtcccagcctggggaagaggcggtgaggggggctgctgagaggagggggtcctgtggtcacccacaccccaaagttggattgtctctggggttttggaaggggtgtctccaaggaagtgctacgtcctggcttggacctctcctcttccctctctggcttttgttctgggctggccacggccttgggccagaggcctagagaggggtctctggtagtgaaagagtaggacagggtaggagggggaatgctggggggtaagaaaccttcacctggaaatttggtggagggcgtgtgtctgggtgtgttgggagggggtgcagaattaatccagcgtagtatgtctggtaccacaccctctgctgctccagcatccctgggtgggtgagtgggggtgttggtgaaggtccaaattgagcagacgggatcttggggacccttccctctcctggcttctcaaaggagagtgtggggggcagg

SEQ ID NO: 1175 - DNA, 4001 bp, Homo sapiens
tgcaattgaggaaataggcacagaaagctatatctagggtcccgcagcaagtagataggggagctggaaatccatgctgtaccactttggcacaagccacagtatatggtctccaaggaaagtaagggggctggctgagtgtggtggctcacacctgtaatcccagcactttgggaggccaaggcaggtggatcacttgaggccaggagttcgagaccagcctgccaacatggtgaaactctgactctatcaaaaatacaaaaattagtcgggcaaggtggtgcacgtccatagtcccagcaacttgggaggctgagacacgagaattgcttgagcctgggaggcggagattgtagtgagttgagattgtaccactgtactccagcctgggtgacagagtgagactctatctcaaaaaaaaaaaaaaaaaatttagctgggtacggtggtgtgcacctgtagtcccagctactgaggaggctgaggtaggaggatcacttgaacttgggaggcggaggttgcagtgagccgagattgtgccactgcactacagcatgggtgacagagcgagactccatctcaaaaaaaaaaaaaaaaaaaaaaaaaaacagtaagggggttatttgtctttccctggtggaggttttgactagcactgcaaagagaggagattaaaggactaagacacaccctgcagatgagaaaaaccacgagcagagagggaagtgaggaagaacctttgtggttttcttaggcacggggagctcccatctgcggggaagaagccactatcacccatgggctcatgactcagaccttgggagctctgtggccagggagccacacgcacaccccaagagatgactaggggtacagtagagcccagtgtctctcctccctcctccctgcccccgcccccaagtgccatttccttcctaggaggggtcctcagacctagcagggaccaaagtagaccctagccaggcattcggtcccagggtggtggtgcagcccactccactgggggttggcatcaggaaagctgagcacacgctgagtgccgtccccgtgctgggttggcagggaggacagggtggggcaggccagaggagctgggaagggtgggaacctgggcccctcaggtgactcatgctcaggcacacaatacccgggcaggggtcgggaaatcctctagtgctcacaggggagaccctggcttcgcccgtgtcctgccccaggccgggtgctgtgccagcagagtgccagtcctttcccttgcatcctccaggttccccaagcacaggagtggctgcatcccagtggcctcttgaggcgagaagggctgggcatcctgtttctaactcttcccatcactggcaaatctgatctcagaaagagggaagagagggggtggggaggggaacagagaggaaaagaataaggtagaaatgagagttggcacttgcaaatgtgacccaaggcaggggtctgaagagctgtgcctggtgggacaaggaagtccggctccccagctgcagcaggcccgggcccttggggctgtttggggaagaaaggcaccagcacagcaaaggggctaggtgggcaccgggccaggcgctgacccaccctctgagtcaccctgctcagcccaactctgatgccagatatggaagccagggccggccacaggcctgtttgggcccggttgctgggggcaacaggctaggcccggagggagaggcctccgtttcctctcccaatctgggggagaagcaagagggacagacactgtagctaaaaataacaagtgggaggggaagacaaaggggaggtggaggagctggcccagccctgcagggactccttagacccactcctcagcagccctgctcaccagccctcagagttccccattgccaggcagcacacaggaagggagcagaagagcagagggtctcccagcccctgggcatttcctgtctcccaggaacatcgccccctgtggccgggtgggtacagggagtccgcctggtggcaaatgctctcctgtatcctcctgggcatctaatttgtttaattttaatttaaaatttttaattgtttaattttaaaatttttcatttattattattactattattattattttgaggtggagtctcattctgtcgcccaggtgatctcactgcaaccttcacctcccaggttcaagtgattctcctgcttctcagcctcccgagtagctggattacaggcctgcaccaccatgcctagctaatttttctatttttagtagagacggagttttgccatgttggccaggctggtctcggactcctgacctcaggtgatccacccgcctccacctcccaaaatgctgggattacagtcatgagccaccgcgcccagcccctattattattatttttgagacagagtctcactgtgttgcccaggctagagtagagtggcgcgatctcggctccctgcaacctccacctcccaggttcaagcaattcttgtgcctcagcctccagagtagctgggattacaggcgcctgccaccacacccagctaatttttggcatttttagtagagatagggtttcgccatgttggccaggctggtcttgaactcctgacctcacgtgatcctcctgcatcagcctcccaaagtcctgggattacaggcgtgagccaccacacccagcccctcctggacacctagacctctgcccaggctgacttcccgccatgtgacagggcgtcttctgctgccaccccaagccactcctaccacccctccttttgttccagcaactcctcctactgcaatatatcctccttctctctgtccctccctcccattcacccaaaacctccctacccctcagcctacttgagcctgtctcagctctgccctgctgatttcagccagtgttctacctgttgggtcgtggggctttttctgtgtgtcccacaaatacccggagactagacggttcacaggctcaaggcttctagaggaaccttctcttgaaccaactcctatacttttacagggggaaactaaagcctggagacgggtaggctcaggcactaaaaacctgcccccaggtcacctgaggacactcacagcagattggtgcaaaacatagaaaatggcacgatacacacagacactgcagagaataacacagagagacccagtaagacagtctgggaagcgtgtctgcctctgtctcgcttgctgggagataccccagtcagagagtgatacggaggcctagtgaaagtgccactcccacccaccctcaaatatacacatactcacacctttgtgtgcggccaatcatgaggtttgatagcccctacctcccccccaacccggcaaagtaaccactgcttggtttcttggctagtctgtgggtctgccacaactcgggtaagggcaggatgtggagaattcccctccctggcatttgaggtgctatccctctctggaaaggagaccttaaagagaggaactgaggctgggcgcagtggctcacgcctgtaatcccagcactttgggaggccaaggtgggtggatcacgaggtcaggagtttgagaccatcctggccagcatggtgaaaccccatttctactaaaaatacaaaaattagccaggcatggtggcgggcacctatagtcccagctacttgggaggctgaggcaggagaatcacttgaacccaggaggcggagtttgcagtgagccaagatcgcgccactgcattctagcctgggcaacagagcgagactccatctcaaaaaaaaagagagagagagagaggaactgaggggggcagctgttccagggacttagaagccccttgagccttccccaaaccccaacctgtgaagttctgaatatcatacacctcaaaagcccacaggtgccccaggatgaaacaccccgactccctcacgcgggcatgtgcacccacagcaggcatggc

SEQ ID NO: 1176 - DNA, 4001 bp, Homo sapiens
aaaacccattagcattgcatttatccgaatgcatcatacctttatgtaaattgatttatctgatgcatttactcgaggaattgctttttgttacaatttcagccctaacccaaatgaatctgcatttcctgccctagatctttaaactgtttcccccaacgttttaatcgctccgaattcctttttaaaaggagagtgagggaggagattccaagctcttccccgcccccatctttagtgagaggtaaatatatatgtattttttttttgaaaaggaaacattacactgagaaaagcatccagtaaccccattagctaaagctcttaaggacaagcaataccttaatgctgattaaatctaaaagagatgaatcaagaagactgaccagaaactgactcccctgataactaaggacgggccctcatcaagtttcatttagagttggaaaaaaaaaaaaaaaaaagaaagcttttaagttaaataggcttatactctagtaattacatagccaagcaatttaggtcctgggatagtcagtgaaatagaaagcagaactggcagctagaggcaaaatctgcccccctttaacaacgtctctggtgttttttaatggagaccaagggagggacaaacgtaacgctggcaatttgtagtacaaaaatggatgcttaattcatgtcttgattttaattaggtgattcaccgtatttctcctggattggaacaaaagacttataagccaagaagaatttttttaaaagaaccagcaataccgaatcctgctcacttagatccttcctgccactgtttcaaaaatagtgtttactagaagggagggggggtatcgtgactatccccacccccacccccccaaacacactacttctcatacttaaaatcctcatctaagcaccccttgcctttcccttatgaactagaaatatccccaccccctctacggtccccaccagccccgtttccaagaagagcccttttgtaagcaggaaccgctacaaagctggcggcccggggctgccctccgcgctagctcgcaggccggcctcggtagtttcagactcgcgctttatctaagccgacgtattgtttacttgcaatttgggacggtcaggggaaggaagccaaagaaaacagccctggcccgaatcgaccccctccctccctctcccacctcccggcccgcggctctccacccgcccccttacctgcttttcccctatattgcaatattgcgagaggcggcggcggtgaaatgcgagcgaagccgctcggcttccagggaaggggcgcctgggctggcggagctggagggagggagggagttctcgcagaagcaggaaaggggaggagggggctaagggcggctttttttttttttttaaatcgcgttgctctggggcgggttggggggcccccgcgtaagtgccgggcggccgggagcagaagtgtcagtctcagtcttcgtccttctccgcctccgactgcgcgcgagcagctgcaggagccctcggcccgcgcggcgcggcttcaggcgcggcgcagcggcagcaactgctgcaatcgctgctgcaagtttggcaatgtggcttcactttgtatattcccccgcccgggggcccccgcccccgcccgcgctcctcccgctcctcctcctcctccgccgccgccttcctccctcccgcgcgctcgctcgcttgctcgctccgggatggcagcggcggctcggctgagctccctgcacctccggccgggagcagtcgcagacacaacagccccgggagcggcggcggacggtgcggaggccggcaggcaggcgcacccaggcgtcgggggctgcggccggccgggcccggcgcgctggagcctgcgccgctgccggggctgttgctgcccggctcggaggcggcggcggcggcggcgctggcctctagccggctcgctcgctccctccgcggctcttacacatgtgttactgacagagcaaaatcccaactactccccggctctgcctccgacgtcagcgaccctcagccactgggcggccggattgttcaggcggaataataaaacctgccaatccggggaaggacaaagggatgactgaaacgagactcggggggcgggagagagagcgaggcggcagagctggccgacagaggagaagggaagggcccgaatcaggtggggtgaagtgacccgggcgcctggggccggggacccgcttgggctgcccttcgcgacccgggatccggagtcgagacgcagggcggggcctcacctgccttctcagcgcacggggaccctgaggacccgcgcccgctcgcccctcggggactgccatcccctctatctgagaggagacccttaggaaacttaccatctttctcagaaatgggtctcttcctgtttgggaagataagtcctgcatcttagggcagtggacttctatcccctcacgcacaagcacacagaagaggatttttgttgttgtttctttaattcacgatattggagatttatgaaccgtagtggaagcttagttaacaaggtagaaacataaaggaaataatagttgctagctaaatactgcctacttagcctccctcatactcccatttttccgagtttgaaagtgcctagcaggcatttcctggatccttgtcaattgctggtgatgtagggagcacagtccttattttcaaagttgacgaaaacttaagggagaaagcctttcccgactaccctcctcactgtggaggatgagaggcggaaattctcacagcccccaaaagcaatggaagtaattgcaagatttgcaatctcacagcctctagagagtaagaaatgtcacttctagtataaatcaagttttgaggaatgcttttagggtgctagcctgagagtctttttccaaggccgaagcacagcctagatgcttgaatacctaggcattcgactttatctactctgccaaataggttaaataaatctccagactgaggctaatattaggcctgattattgttagtaagttccagagagatttttctggtggaaattatcatgaaagtgcaaagcccttctgctaagtatcattaagtaaaaccagccttgtggggcaagttttcatattgtgttacacacagtactgctagattgaggaaaggaacctgaaggagaatctggcgagacaatgcagatgttgaacatttagggttttagtgtctatttgggggatttctgtctttcaaaccatcaaaattaataaggctgcataagaaagaataattattgcccatacagtcaggtagagggcattttaaatatcaattcaaatactcattttttaattctagcaccttaaaattaaatgaattaattttattgatttgtatttaaagttgcactgctatgatgaattcaccttgtgcacatataaaaaactttttttaaaaaaaagtcattaaaactataatagtaattaaaatgtcctacacagaaaacagctacagatgggcatgattaaagaggaccaacttagaaaagatgtaatgctgcttgaaggttagtcaagaaaactcaattaaaccagatgaggagaggaacaccataaacaaataatacatttgaatcccctggttcattttcactttttaaataatttataataaaaggagatgacacaagatcttagtgggctacaattaagttatgatttgtcatgtgcaagtaaatttccgtctctgggccttaattttctcatccacaaatgagagaattaagccaaatggtctttattttttctttttaaaaatgattttcttagatagagcacataatgcatagatgtataacgaattgtggtacttttcaggatttttcctgaagaatatgcactaaaacgaaatcttaattcctgaaggaaatgttagaaatttaaccagacacatgttcagctatcattgagtgattatccagagga

SEQ ID NO: 1177 - DNA, 4001 bp, Homo sapiens
tggttttatttatcattatcatagctgcatctggggcaaccaccttgtgcatacaggacaataaattcctgagcctcctggcttccctccttcctccctccttctccctcttcttggcaaaggcttaaacataggtggtggggcgggggggggcggtagggacagagacagagttccagctcctctttgcttcacccccttccctcctcctcccttctttcccattgctacactaaaggagtcagggctgtgtccaccaatatgctctgtgactagcagtcaacacaatttcatacccagccagtcattccgcaggcattttggatgataatgttcccattctcagttcctctgtgagaatgtgcatgtcatttgaagctctgtgcctcagtttccatagaagtaaaacaaaaagcaagaattgagactgatctttttcttgcaagaattcacaagtaatggataatgtacaagagatgtggctgaataagagaactagaacaaagacttgaacaattttcctatgcaacactctttcccatggacaaaggtatcccacaaagtcatacttcatcggaggctagtttgtccaaagaaaactcacataccaatgcaatagtgacaaaaaaaaaattcctccatgccaactcaggaaaacagaaagcaagttgtgcttaagcccattgtaggtgtgggcagatgcttccaaaaccgtcaccccttttccctcctctatgactatcttcaacccccagcaaagcggcctcgccagctgctaaagggttaattaccaaaaagagggcatgctccctccagaggctcctctggagagtgcaaaaacaaaacaaaaccaaaaaccaactaaccacaacaaaaaacatcttccctgggaataaatttgaagcttatcaggtctttaagccacatttcccagcccatagactcctggtccctgtctccctttgctttgggaaactcatttacccccaagcctcctgaaatgatccatgtgccgtgagatgcccatagggttggggacttgaaaatgagttattctcccacaaaaaatggcttagctttgtctttttgggtggctgacaggagacataaagtatcactctctctttttacccctcctcacaataggatggaatgagtgtggagaaaaacaaaggtattgtgggaccaggatggagtcaacttgacaatggactcttcaaggacaccttccagctcccattctactagtagctctatttgattttgtgggatgttgtgttcctccaacatatccgacttctgcttataaaacagaaattaggagtaagagattcgcaccgctagttcagtggataatcatcagttctgaagcattaaaatcctttgccaacaagaacgtttcttctaaggaaggaagcatcctaatcatgaagccagggtctccagccctcccctgtctccctcctcccctccagggctgtgctcactcacatccatggacatctccctctgcataagtttcttggtctccttttcacagaagttgagcatggcctcccggttgtacacacccgtggactgtttctccgtctggtttctctgccgcagccccacgggaacactcccgtctgggtccaccacgtccagctccttctccagctcctccatctcctcgggagacagggtctccagcaggctgtcgatgtcggggtcttcactcacctgccggcgatatttggctactctagacatcttggcaaaatgggctgtggctgccaggggctatcagagtcctggtgggcagggaagggagaggggtgagctgatctggatgcagcgagtgggctgaggagcaaacctcctgctggtcgaggactgcagctccttggcccttctgtgctacaggtgctgaagtgttcactggacgcagcagcctccctgaagcccagggctagtggaccccggctggtctaatcagcggccaataagacccgacaactgccaggcccggagaggagaagccaatccccaagctgggggcgggcctacctcgctgtcagagctgtttgaaacttgaggacattccagggaatcttggagcgctgcgtgaccaaatttagtacagagcagtttagccttttaaagacaaggggccacgcaatgagaaaaagatacaaaaatgcgtaggctggcagaagcagatcacagccacggagagccagacaagcagggacgaggccatgagggccggtgaactcgccagcccggggcacgttcaagagcgtattttactactccatcaccgggtggacgtatcactgtggtcaatgtgtggttcatggacttccttctacagtatttggtaatgtgctggggggctcccaggtgtatacagctccaggaaagtctagattcaagatgaggagctgttactcctaaccccctgcctacccattttctttctacccaggttctgccaaggaggacctgaaggctgagcatcagaggctccaggatcctttggccacttcttaagagagagacaggagacagaaagacaaacttagagatagagatagctaggcaggagagggagagagagagagagagagagagagagagagagagagagagagaataaatccttactgtgtaccaaaactgaaaactggcaggctgtttgggaaagagagaaggatctgcagaagtcgggaaactcttaaagggctgtcactttccatgaagttccaaggctcttgggaagagggttcaaacctccccctgttgtcatctgtttcttcctctgccgggcatctgtagacagacctcctttgggagcacagaggcaggtcaccacccacatataaatccagagcacgatttagtatgtcttcagggaaacagaattctgggccgtcgggagagatacgattgcaacaggtctggcatgtttcatagaagggctttccactgctcatccatcatgctgccctgcacaagtcacagagacattcaatcccctgccccccttcctcctgccacaaaatcccttctagaagccctggtgtaacccatcagggtagatgcttcgatctttcctggcatctttccatcctaagccagagagagacagtcacttgatcagcatttgctgagtccagggatcgtctgggactaaaacttggccgtgccatttaatgtccactagtccaactttaggttaaggctgaagaggggaatggtgtccactggggggactgaagggcagaaggaaggcaggcagacttgataggaagagtggaagaagactttagggaaacctgggggttgtcattttaagagtcagtagccaacttattggtcaaaccgtaggtatatatttattgagtgatttatcaagtgcctattatatatcaggcattgttctaagagcaagagatatcactaaagatacaaaatcaggccaggtgcagtggctcatgtctgtaatcccagcactttgggaggccaaggcaagaggattgcttgagtccaggagttcaagaacaggctgggcaacataatgagacccccatctctccaaaaaaaaaaaaaaaacaaaattagcctgatgtggtggtgagcatctgttgtcccagctactcagggggttgaggtgggaggattgcttgagaccagaaggttgaggctgcagtgagctgtgatcacgctactgtactccagcctgggcaacagagtaagaccccatctcaaaaaagaaagaaagaaagaaagaaagaaagaaagaaagagcgagcaagcacaggggctatgggaaaacacaacaagaggaggctgaatagaagtatgatttaacagtgaagagcttgggcctttgaggccaatagacctgtatttggtcctggtattgctacttacaggccatgtgacttgggcaagctaccttcttttctgagacttgagttcatcatctgtaaaataaggacaacagttataccaac

SEQ ID NO: 1178 - DNA, 4001 bp, Homo sapiens
cctcctgctaaaaataaataaataaaataaaataaaataaaatacgggcttcccaaacttgaaaagctccaagggcagagtgggtgggggagccgtaaccagaatctctggcttcagctctgcaagacccgtgtgtggacactcttccggggtccttgactcgctgctcctcctctgtcgctgcaaaggagttgtgaggggggacccacaggacccgacatccagctccagttaattaacgcggagcctagggcccagccgcgcggtctaatccccgcgctgcgttgcctactggcccagaaaagtctctctcggccttgcccatggctgaaattggggctggagttggtgggggagagaagcctcctcgaacttgggcgctccaggcctcgggtctcggatgctattgcctctaggccgcgagaagagggcggcatttatgagacgtcgatcagctccgagattaaaaatccagccctgggtatttttaatcacttgccactcagacgcctacgaacaagctcgcccgcccctcgcggctttggggaattcggtgcccagtgcgtgaggcctggggcggcttgttggatttatttgggtagggacgacccacaagcactgacggacagatagtgatggggctcaatttagtgtatgaagaggggcgctagcttccctatcgcggaccaggtcccagagagcggggctccagagctcagcgccaagcggaaagagagtgcgcccaggacgcacggcctgaacactcacccagcagcgaggagaaggaggccgaggtgtcgatcgcgctttggaagttctcctccatctttaggccgtccagcatgttcgggccgggccgggaggacctgtagaggagaagaaacgatgcgtctgacgtccgtgcccgctgggactcggcgccagcagccaccgcactcctgggaaagaactgagggagtgtccagggcgaccagaatcagccaggaggatagggtccagccaagagaatgtagggtgggaggagagatcagtcacagcgaactgctctggctgatctgatttcacttgaagtcaacacgttatgtacttaggcctccgccccccaactgcgtttctccttctcctgcccccctcacccccacctacatcccttgccccaggttttccatcccgaatccgactccgccccaacctatacgaaggtgggccctcgggacgtctctgcaggaacgcagctactggggtatattgggtatataaagagtgggtaccctccctcgagcgaccgggtccaggcacgcgggacgatggggtttgcaatcccgcgtcccagccgccccgttgcggccctcacctgccccaggtcgagaaggggcactgtaagggacccggagggcgtcccgcccgcttctggactcctggcgctgcgctctgttggggtgcgcgcaggagccggtgtgcggggcgcgcggggaggtcctcccgccagtcggccagtgccgggaatgtctgcagaagcaaaagagtcgcctcggggaggagccccggctggcccggctcactcttggatgcatttcaagtcaactttcagaaacacgcccgcccgagccacagcctaggcacgggcagccttacttacctggtaggcgagctctctcccagtgactggagcagagagaagttgcggagcgctgctggaagcttctgcccgggaaggcgtcgcccccgagactgcagccggaggagccgccctcggcttcggagcgccggggagggagccggagcgaacgccggccgctggctctgctcctcggcgcgcccaggctgggccgggacgtggtcgcgagctgccggccttcccgggacgtcctaccagcccgcgtcgctcctcagcgggaggagagggccagttgcttctccaaggctaggagggaaggcagaggcccagggtcctgggtgcgagtcggccctgcttcgccggggcggatcctgcagcttctgacaggggccgcggcgctgcgtgcgcggcggcggagagggggtggggtgcgctgggcggggggctggcagcgcgtcccgtggcggggccgtggtgctccctttcccagcctggctgcgcggccaccacacggccgctgccctctgagcccctccgcctctgggagctctcggacacgctaagtttcctcccctccacgtgtaactgttacctcggggcgctctggcccggtcgccccccagtgcccctcaccccgactgggcctttgcggagatgtcggcgcctcctggacagcggtgccgccacgaggattcccccgccgctctccaactgctgctataaaagcgctgcaatccttacccgggccccgggaagcgctgagaagctgtttagcgccagtagatgtgggcccagcagctcctagctcctcaaacccctcatcacccgagggctcatgccagtttccaacttcctttaaggtcgaaccatattcactcatggggcgtacagaggccatgggactcacggcctaagaatcatgctcttgggagacactaggtgggatctgccccccagatgatgaacttgcaatgacactcaacaggaaatcaggtaaagggacattgttaggggaacaaagtatctggggagaaatgtgaattatctgcacctcctaactttaatttacaataacagacctttagccccctccagagcaggaataaggccttatccgtctgtatagcccaggaggtaagcatgttgtgtgaccccaagtggatgctcaataaataaattacaatgctggctagcgtttatcgtttattttgtgccagctttgttacacagtcacctcatttaatctttacaacaacccccatgaagtggagacaattgttgtcccaatcttacagttgagggaaatggaagggaattcatggaatccgagtcccatcatctgaataccatgggaaggttcagttcaattcagtgtgattctctggggcaccttcagttcctaaactgaactgaactgagatgaaattggcaggccgtttgacatggtgaactcaggcagaggagatgccacatagccagggtttttctattacctcctccaaagacagagccacttctttattcctaaagaaaaagtgctggcagcaacttgctctaatgtgcttaggagcagcgaccccactaagcactaaaaaagccattctaagtgctttctgccagcaggcacaagccaaacactgaatatgactccagaagaaagaggggaaatggcaaagaggctaatacgttatattcgaatgctgctttacaggcattttcacatacatgattttgcttgatctttacagcaaacctgtgaggtaggcagaacagttttatcttttgtttcagatgaatctttggagcttagcacggctgggagatttccctgatgttgcccagatggctagtggcatgtctcctaacacctgacctctgtcctttctgtcaccccaggtagagcagggtgtaaaaaaatacaaactacaagtattattaggataatatgtgaaatagaagttaagcaagaaaaaaatggaatagggcagatacaaccataaggaatgtttttatgtaaatacccggcagaattttggtttcactaaaggtcttatatgaaatatatgaaatacattttaactagtggtaagactattccttttagtgaatatcctgaaagtagatagattgtcatttgacctgaaactcaaatctttcaaacaattcttacatccacccacaaggccgcttgattagtgtagatcacacaggtttttggtgagaatgtctccccagccattgggcacttcaggatggggacggtgcctcaaaaatcacatcataagtcatatcacttttagtgcagacctagacacatacaattgatgaacaaatgccttttacttggttgaggaatgaatagaactctcactacagtcagaag

SEQ ID NO: 1179 - DNA, 4001 bp, Homo sapiens
tccccttccgagaggcccggccaccggctcgggagctgggccggtcgctttgggagcggatgaggaaggttaggagaagcagcgagatagatcccaattttacaattctattttctttcggtagggtctcggcgtcctgggccacgttgagagcgaacgtgggccgagcggaggacacagagtaaaaagcgacgcccgctgtatacataaatccgcacccgctgcccgcccgggtactgcctgctctggcttccgctctcttccgaggctgggcaagtccaaaagttcccgaaaggggggttcaaagaggggcgctcagtgcacgtgatttcgtttcatctagggtgttgggggtggggagattcctcactggatttggtttctccagcagaactgtctcatcctccacattcatgccgctctagcggttccgagtgaaagaggcaagaggtttaaaggacagaaggaaaactccctcctgctaaaaataaataaataaaataaaataaaataaaatacgggcttcccaaacttgaaaagctccaagggcagagtgggtgggggagccgtaaccagaatctctggcttcagctctgcaagacccgtgtgtggacactcttccggggtccttgactcgctgctcctcctctgtcgctgcaaaggagttgtgaggggggacccacaggacccgacatccagctccagttaattaacgcggagcctagggcccagccgcgcggtctaatccccgcgctgcgttgcctactggcccagaaaagtctctctcggccttgcccatggctgaaattggggctggagttggtgggggagagaagcctcctcgaacttgggcgctccaggcctcgggtctcggatgctattgcctctaggccgcgagaagagggcggcatttatgagacgtcgatcagctccgagattaaaaatccagccctgggtatttttaatcacttgccactcagacgcctacgaacaagctcgcccgcccctcgcggctttggggaattcggtgcccagtgcgtgaggcctggggcggcttgttggatttatttgggtagggacgacccacaagcactgacggacagatagtgatggggctcaatttagtgtatgaagaggggcgctagcttccctatcgcggaccaggtcccagagagcggggctccagagctcagcgccaagcggaaagagagtgcgcccaggacgcacggcctgaacactcacccagcagcgaggagaaggaggccgaggtgtcgatcgcgctttggaagttctcctccatctttaggccgtccagcatgttcgggccgggccgggaggacctgtagaggagaagaaacgatgcgtctgacgtccgtgcccgctgggactcggcgccagcagccaccgcactcctgggaaagaactgagggagtgtccagggcgaccagaatcagccaggaggatagggtccagccaagagaatgtagggtgggaggagagatcagtcacagcgaactgctctggctgatctgatttcacttgaagtcaacacgttatgtacttaggcctccgccccccaactgcgtttctccttctcctgcccccctcacccccacctacatcccttgccccaggttttccatcccgaatccgactccgccccaacctatacgaaggtgggccctcgggacgtctctgcaggaacgcagctactggggtatattgggtatataaagagtgggtaccctccctcgagcgaccgggtccaggcacgcgggacgatggggtttgcaatcccgcgtcccagccgccccgttgcggccctcacctgccccaggtcgagaaggggcactgtaagggacccggagggcgtcccgcccgcttctggactcctggcgctgcgctctgttggggtgcgcgcaggagccggtgtgcggggcgcgcggggaggtcctcccgccagtcggccagtgccgggaatgtctgcagaagcaaaagagtcgcctcggggaggagccccggctggcccggctcactcttggatgcatttcaagtcaactttcagaaacacgcccgcccgagccacagcctaggcacgggcagccttacttacctggtaggcgagctctctcccagtgactggagcagagagaagttgcggagcgctgctggaagcttctgcccgggaaggcgtcgcccccgagactgcagccggaggagccgccctcggcttcggagcgccggggagggagccggagcgaacgccggccgctggctctgctcctcggcgcgcccaggctgggccgggacgtggtcgcgagctgccggccttcccgggacgtcctaccagcccgcgtcgctcctcagcgggaggagagggccagttgcttctccaaggctaggagggaaggcagaggcccagggtcctgggtgcgagtcggccctgcttcgccggggcggatcctgcagcttctgacaggggccgcggcgctgcgtgcgcggcggcggagagggggtggggtgcgctgggcggggggctggcagcgcgtcccgtggcggggccgtggtgctccctttcccagcctggctgcgcggccaccacacggccgctgccctctgagcccctccgcctctgggagctctcggacacgctaagtttcctcccctccacgtgtaactgttacctcggggcgctctggcccggtcgccccccagtgcccctcaccccgactgggcctttgcggagatgtcggcgcctcctggacagcggtgccgccacgaggattcccccgccgctctccaactgctgctataaaagcgctgcaatccttacccgggccccgggaagcgctgagaagctgtttagcgccagtagatgtgggcccagcagctcctagctcctcaaacccctcatcacccgagggctcatgccagtttccaacttcctttaaggtcgaaccatattcactcatggggcgtacagaggccatgggactcacggcctaagaatcatgctcttgggagacactaggtgggatctgccccccagatgatgaacttgcaatgacactcaacaggaaatcaggtaaagggacattgttaggggaacaaagtatctggggagaaatgtgaattatctgcacctcctaactttaatttacaataacagacctttagccccctccagagcaggaataaggccttatccgtctgtatagcccaggaggtaagcatgttgtgtgaccccaagtggatgctcaataaataaattacaatgctggctagcgtttatcgtttattttgtgccagctttgttacacagtcacctcatttaatctttacaacaacccccatgaagtggagacaattgttgtcccaatcttacagttgagggaaatggaagggaattcatggaatccgagtcccatcatctgaataccatgggaaggttcagttcaattcagtgtgattctctggggcaccttcagttcctaaactgaactgaactgagatgaaattggcaggccgtttgacatggtgaactcaggcagaggagatgccacatagccagggtttttctattacctcctccaaagacagagccacttctttattcctaaagaaaaagtgctggcagcaacttgctctaatgtgcttaggagcagcgaccccactaagcactaaaaaagccattctaagtgctttctgccagcaggcacaagccaaacactgaatatgactccagaagaaagaggggaaatggcaaagaggctaatacgttatattcgaatgctgctttacaggcattttcacatacatgattttgcttgatctttacagcaaacctgtgaggtaggcagaacagttttatcttttgtttcagatgaatctttggagcttagcacggctgggagatttccctgatgttgcccagatggctagtggcatgtctcctaacacctgacctctgtcctttctgtcaccccaggtagagcagggtg

SEQ ID NO: 1180 - DNA, 4001 bp, Homo sapiens
cccgcatgccattggctccagctcttggctaagagcttgctgggccccagacctacctgctgaagctgaagatgatggagaagagccccagcaccatgttggccagagataaggcactggtaacatccttccaggaaacctcatttatctgggaatggctctggtcatggctcaggaagaaactggtacccttacctggggcccaagagagaggggcgaagggttcccaaggttaaggagtcccagaagaggctcccagggacctgttccactagatctcatcccagaatggcaccctccctacattctgtttcactggctggactaagggagacaggaggtagatgaaggagactcaggaggtgaagacaaaggtgctgaggatccagcgtcttgggaaagctcaacagcagagtgggtgaaccaacacaagcatagtttccactccctctctgactgcacctttgccccacagcacagacatccctccagtccatatgctgactctcctgaagccccatggcccagaatgcagggggtatggggcccttctcccatctgagaggtgggcccttgtcactgacgaagggttggcttgagagagaagtagtgccaggaagccctgttgtcccacagtccaagttcactccttctgaagcacagggctgcagctgaggtgcctcaaggtcctggttctgacaggccccagtcagaacagcaggcctacttcccacaaggaaagagacggcagattaaaactgaatgtgtagccggacacggtggctcatgcctgtaatcccagcactttgggaggctgaggcaagtggatcatctgaggccaggagttcgagaccagcctagccaacatgttgaaaccctgtctctactaaaaatacaaaaattagccgggtgtggcggtgcatgcctgtaatcccagctactcaggaggctgaggcaggagaatcgcttgaaccttaggaggcagaggttgcagtgagccgagatcacaccactgcactccagcctgggtgaccgagtgagactctgtctaaaaaaaaaaaaaaaaaagtgtacaacactgaatagttcacaaagatcttttcgccatgttcccatccccatgtctgtttctcagatcctgacaacctcaggagatggtgctagaattctcccctattttatgaatgaggaaactacagttaaaagagaggaagatacttgctcaaagtcacatggtaagtagaaccaaatcccatctgtttgattctaaatctgctgtttcttcgctgcaggcatagatttcagcaggaggaggtgtgtgggatatggcagtgaacgagctcaatggccaggcctgcgaggcagcagcagcctccctgtgtgtgtgggaccgtccagcccaggccccccagtgctcccagtctctcccagtctctcccacaacagggaattggctggccctgcccatcttcacagtctgtcttgtctctgtttttactctaagaccacatttgtacaccttacactcaatctgcttgagaaactgagtctcttggagaaagagccccattcctccccaaaactgagaagccccgctggttggggcaaatgtaccagccacaaatagatcctgcacttgagtgaaataaacaagtttcaaggtgttcccagatctgttttctcatttaatcctcacccatttcagatgtgaggattaatctcacctccagctctgcctccatccagcccctctgttcagccccaggcccatctggtctggacaagagctgagacaaaccatggtcttttctcataaacctgccaccaacatgccagcagctgggagggctgacttggagtttgggactagagtttatcagggcagcactgctgggctcactgcctccatgggccagcctcactcaccaaaggtgatcagtagctacatggccagagccattgggattcctaagacgttcgtatgccagagcccctccaaacctaagacaagaagcaatgcaagccagggaaatctgggaagggaaggggacaaaggacttgctgcatactccctccccatgaacccgctgtagtggtctctcctgggtctctgggctgaccccagcaagatcaaacatcccactgtctgctgctcagagccagttagcaggtgcccagggtctgtctaccacctgtcaagcattgctgctgcctctgtgctacttcacactggttaatttttaattaatggtcaattgtctactatattatctctttcattatctcctccattcacaaaccactttcacatttaggatttccattggccctgtgagctctgtcaggcaagggttctttttttttttttttttttttttttttttgagacggagtctcgctctgtcgcccaggccggactgcggactgcagtggcacaatctcggctcactgcaagctccgcttcccgggttcacgccattctcctgcctcagcctccccagtagctgggactacaggcgcccgccaccgcgcccggctaattttttgtatttttagtagagacggggtttcaccttgttagccaggatggtctcgatctcctgacctcatgatccacccgcctcggcctcccaaagtgctgggattacaggcgtgagccaccgcgcccggccaggcaagggttcttgtccctactttccaggtaaagcaaggaagactcagagatgggaagaacctagctcaaggtcacaccagaagtggcagaacaaaagttacaattttgccttaagtgttctttcccctgtgctctgctgtctaccaaccaagaggactgaacattgtattggttatatgctgtgcctgagctgggtgctggtagaaaccttggtccctaccatcacagagtttacaacctatccaaggaaatgagtctcttgcatacatgtagagacttagaccctattcatagtggtaccttatcttacagatggggaaactgaggtttcaggagagttatgtgacttgtccagtaaatggtggagccaggatttgatttgagtctcctctttcccagttaaatgctgtttgcagcagaatgcacaggtcccaggtgtgaaaggatgtggaattgagagtaagggctgtagaggacaacagaaataaggaaccacccactcattcagcaaatgtttggccaggggcaagatgtggtgcctggtgcttgggacacagagaagattaagaccaaaggacacagtttagccacagtacctaaccctgcacagaaaagaggcgaccgggctactaatggagcaccgaaaaggggctcagcctgccacggggtgagaaggctcccaggaggggcgagggctgaggcttggcacagcacgagactgcaggtgatctggtcactccccagcttcttgaatgccctcaggatggagtccaactcctgcgtttggtatgccagctctgctcagctctcccagcttcctctcagtcctccccacccttctcagaacctccctttggacttgggttgggtggtgctcctctttgggaagcccctctgacatcacccctgagcacgttaggtgcccctcatctgtatggtcttgtcttcttgtgcttaccatgtgacacttggcactctgtttgggcaccgcctacactggctttcctacagggaatgcaatttgagtgctggccgaggtccctgtacccagtatgaggcctgacaatagaagttgttctgtgtttgttaaattaacatcacaggtcactctggtgcttccctgaggtcctctcgctgcaccaaatctattgaccttccatctaaccctgcccagtgtggcctccaagaagcctcagatgaacgctcaacagtccagccccttccgcatacccagcaactacccagttcttatggtcttccacttactcattttttaaaatgcggtttatttattgccaatggctgctctgtgccgggccttgtgtgt

SEQ ID NO: 1181 - DNA, 4001 bp, Homo sapiens
tcaaatctcccacccaagtaaccttggttcaaggttgagtgatggacacaatgctgaagcaatgggcttgagactcaggcttcgatctctgacatttacactgcactctggaagcttttgtctcaattatgatcaattttttgatttgtaaaataggaacaatgataatacttacctccatagcattgttgtatgaacagtttagataatgcctgatagcaaccagtgaatgctggaaatcacattattgttgtgttattgtttttggtgccatggtgggggtagtgtctttatccttcttcctaaacacttgcttggccacagtacaatttcaaaatgacataagtttggccggtgtcaccttccccattactgacttctccttgtttatacagagtttggcgaatggctctcaaattaaataaaatacaaaagataatctaccatcttggaacacacagtacttgatattgcagagcaaggagcctgcattctcctggagctattctttttaccttggcagcagagtaattttcaaataaatataagttccaatagggacagtgccaagatccagttgtgacaaagcaaccagccaaacgaatagagttattagggatgatctcctaagaagagaactaaatgttgattgaatgtgaaaactatataatgctcgaccttcacttcaacagcatggtattttttaggatttggggtcagccacctaatttccaaatgcctggatgtattcagaaatcaaaccatcctgatttctctgagaaagatgagctagaccaacagactcccctaacgatgattcagaggagatgcctccacttccctatctctcttgcttcttctcccttttgcagatgtaaacatgccacaaaacagggcaagacatttgcgaaccagctttgcagctgcttcattactctactaatatcaatattaatttttgcaggcttcctttctcagcacatcaggctagaggtgcaacttgtacacatcctggtgtttggcaaggggatttgtgagcctgctctaaagggcacctcctctgccacttctcctgtggcaccatgcaaaaatctcgttcaagcccaagacagcagggagagagcaggggaggcaaagtcaagtctcacaggccagatcacaaaagctgaaaaacaagcacctgggtattatgtgcctgcctctctggtgttttcgccgccaatttcctacttggccacatgtgcatgtttaattaatgttctgctcatcacctcctgcaagtcattaataatgatgctctgtagacgccggcccatctcagagcctgccagaagcatgccgctggccaccagctcccagtcactccacggccgcccaccggctgctcacgtggccttccagccagctttcaatacaggagacagctcagaaccagccccgttgaattcatctttcaagtgagatttctggatgcatccatttcatttccttcacccactaatgttgtggattttttttaattctattaaaaaatgcaattaaatttgtctcatggaatttgctctttaaaaacccagacagctgcttgctcatggtggcattatgctcttgattcttacacatgtttttcctcatctccattccattactttactgaggattaaagacaggcttaccagatggcaaatgccaggatctcttcccacccccacctcccgttcggaagactagtatcatatcagccataatacacagcccaggttcctctatgcagcttttggaagacatgagtaattgcttcatttaaattcattagtcaatgcctaaaacacaattaaagggcaggaggttaggaagaagaaaacctgagtactgctgggaatgccacgtccgggtctctctctgtgtgcctcagtttcttcatctcttcagtctcactcgcttcctccatcatttctcagccataaagcattcattaggctgtgaagcaaatgaggtaatgtctgtggtgagatggtttgtgcgtttccaaagaaagacaccatataaaaagcattctgattgctaacagtcagggatgctgaggattgggcctggctggctttataaactatttaactgcctgcttcttgcaaaaactatttttatcagttaattacacatttttcttattaaataacaatgtgaaagcatttcttgctcattttcctgtcatgattaatttaatctgcctccctttattgaaagtccagtattcttcccctcatcttatccaccctgacaggctagtaaaagccccacaactcttcagcccctttgattaacattaacccattctacttccttctttttcttatccagagtccctgaaagagtttctttttctccccaaactgtgtgcctggtgcctaaggaagcaccggacgttaaagaatggaccttgccctcacagatgacttccttcctcctttcctttcttgtgccctctctcaggcaaattcccagaggcagaaaagattgaaactcagcctccagccatgtcctgcaagggaaggaggccagagagtcagcgaagggaccactggtcatgttcgatttcagaacagacacacatgtgatgtgaaagggattggacaggagtgagagggaacgtgccaacaccacaggcactcactgccctgtggcactcttttctaaattattggttattattaactaaaattactaattataataagcaataataccattattccatgcttaagcccctgacatggaaaggggacacgaggcaggccctcatactattgctgaatgcacagaaagagactgagcttcaagaagataaatcacaatttttgaagcaaaatagccaacaatgacaatgacagaaatggtaacagaagaagtaactgcatgtttttttcatctgttgcttgttgggggtagaataccgtacaagtgatgggatggcccttctgaggttgggctgcagaaaggctgtggcttctcttctggatgccttctctgacctgctggctcacatcaaggaaagcagctgccacggggtaagttgtcccatgatgaggcccaggtggcaagaacctaaggaacagccaatgaaacacggaggccctttgtcctagaggaacagaaccctctgtccatgaggaacagaatcccaccaataaccacacaagtgggcatggaagcagatccttcccccagctgaggatacagaaaaggacgcagccccagccccaaattgattgccaccacataaccaattttgagacagaagcactcagctaatccatgtctctatttccacatcccacagagactgtgagatagtaaatacctgtttttcttaagctgctaaatttgttactcagtagtagataactattacaccatccctcccacagtcaagataatccagaaagacctgcctcatggcatactacagtcatgaggaaaagtacactgctgccctccctcacgcccacgaacttgttaatcaaccaaaaccctctttctttttggatgtggtcttacaacccttcccaacacaactctccaagcaggcacccccagtcagttgttcggagatgaaagaaaactcttgctgtccctagaacaattcaaagagaagaaaactccaagttagaagacctgatttctacttacaagccaacaggctttgggcaggtcatttatactctctcaacttcattttcctcattgataaagtagagataatctatttggatgctctgaggtaaaaggaacagaatactcaacttaaaaaatctaaagagaattttgtcttttcctagtctgccaccttctatgtgttggcatctccccttatggccacaggacggttgtagcagctccaagcctcatgtcttcccaaaataatgcccctgggcacgaaaaggaagcattcttgtctcctggtctatgggtatgaaaaaatttccccaaaaggtccccca

SEQ ID NO: 1182 - DNA, 4001 bp, Homo sapiens
gcattcattcattgaatagatatttacagaatgtgcactatgtctggaacattttactaaacataagagtcacagggaggatgtgacggtcattttgcatgacacctgtcaccaactgatcccaacagttgatttggctgatctggctaactagctgggttccccttccttcctaactgccccatatatgtctcttccaaagctgcccactcggctgaggaggatgacttacccccataaaggaggatgatttttctgtaagggcatacgtgtagcagtgctcccttgctagaagctccaaacaagtcttcaaagaacacacacaaaaaagccgctgaaggatagtgtttaaaatagcatgaccactccaatcggtttataacactaccctattttttccaaagcacttattattctctgaaaagaactttatttacatatttattctgtcttgattttagaaagtaagcattgagagggcaggaattgattgtcttcttcttcttccttgcctcaacttctcaacatctgcatgtcccatgactccattatgggcacaattctatctataccctttgtcattcttcagatataaataccatataggttgatgccatacctcgtggtaacctttcccaagaatgccaaacacacacattcaacttcctacttgaaacagggatactgaatagataccttaaacttaatatatgttcctctattcccaatgtcccactacagtttctaacctagctatacttggtcaatcttctcacattcagtaaatggcatcatcatctacagatggataatatctagcttaagccaaaaatccagaatttatccttgcttactattcttcatctgcaagttcctatcaactacttctaaaacgtatctcaattccagttccttctctacatgtccactttcaccaaactattatggtagtgtttttctccagacttctacagtagtccaactggtctttctgcttctgttttttgcattgcaaccggagaaattttcatacctaaactttgattctctcccctcaacacacacctacttaaagaatttgtcagtttctaaatgttcctcaaataaaaagggctcctaacaaatctacagcgtctacgtggtctggctctacctatctgatattttggtgggtgtgtggggaaggttcttctcatgtttgtcttctagttttcattaatatctgtctctctccttttccccaaccaatgcgggatgacagcagattgctggtatactgcttactgctgtatctctaacatttatttaagtggcaaaaagaactgtaagaggaactctggttctccagactgtagcagctacatctagcataaaacctctctttagaatcctcaaggccctctctgtatggggtgaggggtacattcctgaccctccggggatgatccctgcctcactccattcagaatctaggcagaacagtggattagaatgtagacccccagtcagaacaccaagggtcaaaacttagttcttccactttctagctgtgtgatttaacctctttgtacatcagtgtcctcagctgtaaaatagggagaaaagtacctacacctacacacacacacacatacacacacacacacacacacacccctacacacacacacatacacacacatgcaataatttatttattaggttacctctccctagaggctgccatttctgcgaaatgaaccctggcaggggcctatccgtctgctaaatgcctactgattcaagaaaaaagtctgaactctcaacgttttgccccttaaactgagttctcctccctacaatggtgtctaatgagttgacagaataactggctagctttatattttaccatctaaatactgtaagaacatacccggtatttccacacccaagttctcctccttgctattcaggccaattcactttcccaaggccagggattaagagccgcacggtcagctccagatagcgctcgccgccgtgcgccccgccccgccgtgcgccccgccccgccgtgcgccccgccccgccgtgcgccccgccccgccgtgcgccccgccccgccgtgcgccccgccccgccgtgcgccccgccccgccgtgcgccccgccccgccgtgcgccccgccccgccgtgcgccccgccccgccctgtgacggtcccagcccgcacatgcgcagtcgtgagtcctcttgtccttgagcgtcaaccttctttccctgaagtggctggggttcctgtttccttctttgattgacaacttgtgttaaccctcgcacatctctgggccaatttttgcttgtaagtctttccggagacccctggaatttaaatcattagcaccgcgcccttccccgaagagtcttcgaagggttgccgcttttcggtggcgcagttctcgcgagaaggtgactttctttctcggtatttcctggtttccagaatccttagcgcgaggcggaaaaaatatttctcccagcttgtgttgatgccgcgattttgactgagacttcttcccacgatttctgtttttgcttctccaaggaaaatggcagctcccgagcagccgcttgcgatatcaaggggatgcacgagctcctcctcgctttccccgcctcggggcgaccgaacccttctggtcaggcacctgccggctgagcttactgctgaggagaaagaggacttgctgaagtacttcggggctcagtctgtgcgggtcctgtcagataaggggcgactggtaagggcgcgcccctccggagtctcccgggaaggcatttgggaagtgaccggggagggggagcgctgacaagagtaaaatggaaacgagtggggaagatggacttgtgtgatgagagctcccccatcctacctcttttttatcaaaatatctgctctgcgaagtggagttttaatcggctcgagtctggattagtcatagcactgcagaaaagggcaagtgagaacgacaaagcagaagaatggaaattagcttagttatattgagttttcggatccatcctgagagcctcacaacttttttgaatttggggttatttctcctggactcaagagtattcttacaaatgtgcatcaagggattttttaaagtcctacttcatttataagccaatgttaaatcgttcattaaaatagaggagaagctacattggtgacttgcgtaaattaaatgcagaatttcaactagaaaaagaggcttttcataaaaatttcccgatgacatcttttagggaacaattttttagggctgttaagagtacctgtgtaggaatttacacaattactttgttttgctttatatccaaagatattttagatttctcttcattaaaataggaatagcgatggtgcaagactcagtggttttaaagtttccctaggtgattttaatgttaatgtgcagcccaagttgagagttactgaattagaagaaagaccaattttgatcagtttaaatgtcacttatgcctgcaaattaaaaaaaaaaaattatatatggctcaatttaagtacatcaggtcatcgtgtatcagattagacaaaattagaatgtgcgatataattattaaagtaacttttaataagcattgaccagagctcttccttagcatagtgattcttttactgttgatttgtgtttcttttctgatggtttttaaaatccgtataatttatgtttaaaaatagacttctcccattgaacattattacaaagataaagcacaaaggaaatatgcaccttgaagaacgatttctctgttggtgaatgtttttaaactacgcattgttatgtatagaggaaagtttaaaatctttagatctgtcataaatgaaggaaataaatttttagttggttaaaagtgaccctctgtgtagaacaggtctttaaacttttggtcttttgaactatttgcatgtgtaaaacgtgtgtctttatatga

SEQ ID NO: 1183 - DNA, 4001 bp, Homo sapiens
acttttatttcttcacttctgacaggggtcttgggatgttacccagactggtcttaaactcctaggctcaagctatcctcttgcctcagactcccaaagtgataggattacaggcatgagccaccgcccctggcctatttttcatcatcttaacttagacacacgtcctcaggaagaattcagaaaggcaccctcactagatctgaaccccccagtagctagcttcctagtatgacaacctctctatagcatctcccctagctgatccctctgcctctattgggatggttgcatgatacccatttcaggacagggccgccaacaggacaatgtatggacattctagtgtccccttcactgttacatcctcataggctggctcacagtagatgcccactagcgtttagtgaaacaggctctgctgtggtctgcagagaaagctcaccaccctccctcacctgagcagctggtccaggtggccttcgaggaaagaaacagagttcatataaagcttttggaggcagtgcagcttgaggaactgagtggtgaactgggtaacaatctccttcttctgctctggggaaacgtagcgagagacatccatgtgagagagaacgagcttctgaagattcctcatgtggcccaggtatggggtaaactgtgtcaggatgggcagtacccacttgcaattcacttccacctcctggatacagtctaggttcaccattttcaggatgcttctgatattgcggaagggcattcccaaaattttcagcttcttacagcacaggtgtagtaaatctttcctctgcttgacccatagaaggaggtaggtgaggtattcatccagagtcctgttcttgagccaaagttctacgaacacagtcaagggctgctgtcctctcatccttggacagtcctgcactggtgttttgttcctcttggcattgaggaaggacccacgggccatagcttcagaccaaaccatccagaagttctcacagacatcctgtaaatccagcacttgaagtttccacctcctgtgggaaaatagaggtgagactgagaatttaagaactcatttctgaatttaaactccacatcctggatagcagctcctcccctccctgcttcttgtccctctctctgacttttcttcactctgttctccccttggatcctacccacttccacatttttttgtttttttttttgagaccaagtctccctctgtcgcccaggctagagtgcagtggtgtgatgtcacctcactgcaacctctgcttcctgggttcaaatgattctcctgcctcaacctcacaagtagctgggattacaggagcccaccaccatgcccagctaattttagtatttttagtagagttggggtttaccatgttggacaggctggcctccaactcttgacctcagcctcccaatgtgctgggattacattgtgagccaccgtgcccggcccagttctcacttttcatggtgcctttcagtgccattagaggagaggttcctgttacctccatggaccttgcgtggtgagcagtgctttccctgaggagctggtgaatggccaagtcctctcggcttcctcaccaccaccatcccccttgggcctcctcacttcacatgacccagctgttccttcagttggacacctgggccctccccaccagcccacctgggccacctcacctgggacaaaccccttgggtaagcagtgcatcaagcccatcgagcacagcttggaaggcctccagacaaggcatctttatcagaggcctcagagggaggcggcggaagggccaggcctgcaccatcagcttcagggcctcacagcatctcctgctgaaggcctccatgaacagtggggggaaaagttctgtgggcagctcctccagggtggacatggccaaggcttggtccctcagcaggctccgccccgcaagctccaggagtctgggtggagtccggatgctcatcttcatgaatctgcagggaaaacttccagaggacaaacccagagaaaaggcatcactctcaggccaagcccatgcaatctcatcttctcctatggccaaactcactgctctggcaatggtgaaacagccctcagtttactccaattctgccctgtactcagtggccattaagccagcattgtgcctctgctgcatcagcatgagcgtctccgaagcagtgaggaagcagggtcaccacgagcccttcctttctatccagtgctccatccagtgactagtgagtgtggaggaacctgaaagtgaacccctcctaccattgggggaaattactgattactcaaggttctaaaacaatgggaatgggagtgtcacaagcctacatgcccacattttcagttcctacaaataagtttgttgggaacattcatgggacatccctagaacaggttctatttgttttcttttcattatttaagcttgctttctctttctctctctttcttctttccttctttccctctctccctcccttctttctttctttccccctctctctcccttctttctttcttgtcttctttccctgcatcccttctctcattctctctctctttctctctctccctctctcactctttctgacagggtcttgctctgtcacccagcctggagtgtagtggtgggatctcagctcagtgcagccttgacctcccagctcaaaggattcttccccctcagcctcccaagtagctgggaccacagttatgcatcaccacacccagctcatcttttatgttttgactttttgtaaagacagtggatttcgctatgttgtccaagctggtcttgaactcctagtctcaagcaatctacccctcttggcctcccaacatactgggattataggtgtgagcctctgccccagcctcgttattgaaaatttcagtgagaagctttgaaagctatgtgacactgttatgcatcattctcaagatagatgtttccaatgcacacctcttacacatattcaaactgaaccactttggctgggtgcagtgactcacacctgtaatctgagcattttgtgaggccgaggcaggtggatcatctgagatcaggagttcaagacgagcctggccaacatggtaaaaccctgcctctactaagacagcaaaaattagccaggtgcagtggtctgcgcctgtagtccaagctactagggaggctgaggtaggaggatcacttgaacccaggaggcagaagttgcagtgagctgacattatactactccactccagcctggggaataggctagattgaactgagagacagagagagctacatttgactagacttcttaatctctacccagttaatccttattggatttttggctttcttaaagaataactgatcgaattagatattaatccatcaaaatgaaagatttagggatagggtgaaagtccaggactcattcaccgattcccttcacaaacatggacttccactaatatgtgtccttcaaagtcctgagtgtgagacagggaagggttgaatctcttcctgatattagacagaaagaaagaaaacttgaaagtatctttgttgagggatccttggccacatcaaatttatcaaaatatttcagagttaaaacagttttcaaagacagagatgacagtccctaagaaaacacaatagaaatcttcatgtatccgatgatcacctgggtcatataattttttttggtgctgagggagctgagtctcacttcgtcgcccaggctggagtgcagtggcaccatcttggctcactgttacctccaagattgcctccaagattcaagcaattcgcatgcttcagccttccacgtagctgggactacaggcaggcaccccccacagccatgtctccatttgggtggaagaggatgtgattggtttaaaattaaggtcaaagatcctttttgattgattttgtttttgtttttggacagagtgtctc

SEQ ID NO: 1184 - DNA, 4001 bp, Homo sapiens
tacttttatttcttcacttctgacaggggtcttgggatgttacccagactggtcttaaactcctaggctcaagctatcctcttgcctcagactcccaaagtgataggattacaggcatgagccaccgtccctggcctatttttcatcatcttaacttagacacacgtcctcaggaagaattcagaaaggcaccctcactagatctgaaccccccagtagctagcttcctagtatgacaacctctctatagcatctcccctagctgatcccgctgcctctattgggatggttgcatgatacccatttcaggacagggccgccaacaggacaatgtatggacattctagtgtccccttcactgtttcatcctcataggctggctcacagtagatgcccactagcgtttagtgaaacaggctctgctgtggtctgcagagaaagctcaccaccctccctcacctgagcagctggtccaggtggccttcgaggaaagaaacagagttcatataaagcttttggaggcagtgcagcttgaggaactgagtggtgaactgggtaacaatctccttcttctgctctggggaaacgtagcgagagacatccatgtgggagagaacgagcttctgaagattcctcatgtggcccaggtatggggtaaactgtgtcaggatgggcagtacccacttgcaattcacttccacctcctggatacagtctaggttcaccattttcaggatgcttctgatattgcggaagggcattcccaaaattttcagcttcttacagcacaggtgtagtaaatctttcctctgcttgacccatagaaggaggtaggtgaggtattcatccagagtcctgttcttgagccaaagttctacgaacacagtcaagggctgctgtcctctcatccttggacagtcctgcactggtgttttgttcctcttggcattgaggaaggacccacgggccatagcttcagaccaaaccatccagaagttctcacagacatcctgtaaatccagcacttgaagtttccacctcctgtgggaaaatagaggtgagactgagaatttaagaactcatttctgaatttaaactccacatcctggatagcagctcctcccctccctgcttcttgtccctctctctgacttttcttcactctgttttccccttggatcctacccacttccacatttttttgtttttttttttgagaccaagtctccctctgtcgcccaggctagagtgcagtggtgtgatgtcacctcactgcaacctctgcttcctgggttcaaatgattctcctgcctcaacctcacaagtagctgggattacaggagcccaccaccatgcccagctaattttagtatttttagtagagttggggtttaccatgttggacaggctggcctccaactcttgacctcagcctcccaatgtgctgggattacattgtgagccaccgtgcccggcccagttctcacttttcatggtgcctttcagtgccattagaggagaggttcctgttacctccatggaccttgcgtggtgagcagtgctttccctgaggagctggtgaatggccaagtcctctcggcttcctcaccaccaccatcccccttgggcctcctcacttcacatgacccagctgttccttcagttggacacctgggccctccccaccagcccacctgggccacctcacctgggacaaaccccttgggtaagcagtgcatccagcccatcgagcacagcttggaaggcctccagacaaggcatctttatcagaggcctcagagggaggcggcggaagggccaggcctgcaccatcagcttcagggcctcacagcgtctcctgctgaaggcctccatgaacagtggggggaaaagttctgtgggcagctcctccagggtggacatggccaaggcttggtccctcagcaggctccgccccgccagctccaggagtctgggtggagtccggatgctcatcttcatgaatctgcagggaaaacttccagaggacaaacccagagaaaaggcatcactctcaggccaagcccatgcaatctcatcttctcctatggccaaactcactgctctggcaatggtgaaacagccctcagtttactccaattctactctgtactcagtggccattaagccagcattctgcctctgctgcatcagcatgagcgtctccgaagcagtgaggaagcagggtcaccacgagcccttcctttctatccagtgctccatccagtgactagtgagtgtggaggaacctgaaagtgaacccctcctaccattgggggaaattactgattactcaaggttctaaaacaatgggaatgggagtgtcacaagcctacatgcccacattttcagttcctacaaataagtttgttgggaacattcatgggacatccctagaacaggttctatttgttttcttttcattatttaagcttgctttctctttctctctctttcttctttccttctttccctctctccctcccttctttctttctttccccctctctctcccttctttctttcttgtcttctttccctgcatcccttctctcattctctctctctttctctctctccctctctcactctttctgacagggtcttgctctgtcacccagcctggagtgtagtggtgggatctcagctcagtgcagccttgacctcccagctcaaaggattcttccccctcagcctcccaagtagctgggaccacagttatgcatcaccacacccagctcatcttttatgttttgactttttgtaaagacagtggatttcgctatgttgtccaagctggtcttgaactcctagtctcaagcaatctacccctcttggcctcccaacatactgggattataggtgtgagcctctgccccagcctcgttattgaaaatttcagtgagaagctttgaaagctatgtgacactgttatgcatcattctcaagatagatgtttccaatgcacacctcttacacatattcaaactgaaccactttggctgggtgcagtgactcacacctgtaatctgagcattttgtgaggccgaggcaggtggatcatctgagatcaggagttcaagacgagcctggccaacatggtaaaaccctgcctctactaagacagcaaaaattagccaggtgcagtggtctgcgcctgtagtccaagctactagggaggctgaggtaggaggatcacttgaacccaggaggcagaagttgcagtgagctgacattatactactccactccagcctggggaataggctagattgaactgagagacagagagagctacatttgactagacttcttaatctctacccagttaatccttattggatttttggctttcttaaagaataactgatcgaattagatattaatccatcaaaatgaaagatttagggatagggtgaaagtccaggactcattcaccgattcccttcacaaacatggacttccactaatatgtgtccttcaaagtcctgagtgtgagacagggaagggttgaatctcttcctgatattagacagaaagaaagaaaacttgaaagtatctttgttgagggatccttggccacatcaaatttatcaaaatatttcagagttaaaacagttttcaaagacagagatgacagtccctaagaaaacacaatagaaatcttcatgtatccgatgatcacctgggtcatataattttttttggtgctgagggagctgagtctcacttcgtcgcccaggctggagtgcagtggcaccatcttggctcactgttacctccaagattgcctccaagattcaagcaattcgcatgcttcagccttccacgtagctgggactacaggcaggcaccccccacagccatgtctccatttgggtggaagaggatgtgattggtttaaaattaaggtcaaagatcctttttgattgattttgtttttggacagagtgtctctcttt

SEQ ID NO: 1185 - DNA, 4001 bp, Homo sapiens
acagcacgaaatcagtgaattcagaagacactgttgagtgcccgttctgcacaggctctgtactagggacacaaagatgattgaacggctcactctggaagtcctgatctagtgagggacacggtcaagtagataagtaactaagacctcagacagatgatggcgagggccacagtcggaggtaagcgagaggtgatggcagaacagagatgaaccacaaagttcatggagtctggggggaagacttcgtggaaaaggaggatttgagttggacgtgggcaagctgagctaggactggagatgagtgtgataaacggccgtgacagccgggacaagggctcataactagaggagacgagaaggaggtgggtcttctggaagataggtgcttgggttgcagattttcccagggaaaaagaaggggatgttccccgtgagcagaactcacctctctcctgataggcggctggcagtcgcttgctgaatgaatacatcggtgaatggatgaagggcttgacagccaggctgaggcgctccctctttgttctgcatgaatcacagcagtggaactcttgagcccaaagggccagaaggagagacaagagtacattctggcaaaagcaggatttcttcctgaaggaggagcacatctctagttggaacaggacaaatcgggcctgacctggattcctggtttcagcagcgcatccgtggacctccttttagtccctctgtattctttgctagggttgccagagcaaagtaccacaaactgggtggcttagaaccacagaaatatatcgtctcactgttctggaagccagaagactgaaatcagggtgtcggcagggctatgctgcccctgagggctctgggaaggacctgctccggcctctctcccagctccttgtagatccttggcagcataactccaatcttcacgtggtgctttccctagcacctgtctgtctctatgtccaaatctcccctcttcataaggacaccagtcctgctggattagggcccaccctaatgacctcattctaactgaatcatctcttcaagtacagtcacattctgaggtgctgggggttaggacttcaatgtctaaattttgggggacacaattcagtccgtcgcccttcccctgaggctggtccaggatacaggcttgcattgagcagtatctccaaccatttgaaaatgccaggcagccttccccagcccagcaccccagaggcctaaaatgaaagcttggatgatgggaaggtgcttctcaggctgtctgggcagctttcatcttcctgctagaggaaggggactgctttacccgcacatcccacgacatccacggctgcctcatcagcaaggctaatgaggatgcccatctcacaagcatatggatctcgaccaggagatcaatctaagtctaaaaacagaaagctgaaagcttcccaggcaatggtgtgaccaggaagtcgtagctgtgttgttggatccctctttatatttcacctgggaagacagcgtttaagaagatgaaggaaaatagccacatttaagcaacaaggggcaagaaagaagatgcagggaaaagacctgcctctgttggccccaggctccccaagtggggagtaggatttcgggataaaaggagaaggagatcatctgcctggcggaggagtgtgcctcagtggtatccgtgcctccctcaggtggtgcttagaagtcaatttctctgcttacccaggagcctctaccttttaatttttttaaaaaatgagtcatttacatttctcatttatttctactgttctgccaacagatgagggcatttttaacttattaggcattattatcagccacaggttaaaaaaaaaaaacaataccttagcactgaggggcagataaaaaggtgagagaaatcccctgtggtccatttcacaacctcctttgtgcccaatgatggtgtgaaactctcagtgaagcttcgattcctgttttaatacacgccccatctctactgtctcccaagtggggcatcaaactgcaggaggcggagtgggagaggcggggtgggaaaggcgggcagaaggaagccacgtggctgggtagccagagggacagcgggcaagctctctctgatccacgccaggcacaaaggagctgctgtagtgcttctggagagagacccaggcaggcagatgcttggttaggctgtgggaacaagaaagtagctcagcactccagacgcctaagatgaaagcttggctgatgggaagtgacaggagtgaatctatgggatctcccttcctagagaaaagcaagtcctgttctttcgtgttctctcccagaggagagctgcctgcacttccctgccctgccaatccatttttgcttcccatgctctcccactctcacagagacatctttgtgagagcgtgatctatgactgtgtccacataatcccttccacccctccatcacactgggacccgtgttacatggcaccatattgctattcaaggcagtcttggttgcttctgcctcccccagacaccttgctctgtgtgggacaggagcaggaggaggtggtggtcagtgtcatcctcccacatgtgtcccctgcagtgcagggacaaagcccagactgatggcaacgttgctttatcaacattcgcaaagtggctgtggaggcttcctacacagctgcacatttgaaatcctaatgagctggagagtggagcttgggtctgatgaaaccatcattggcagacaggcaaccctgcccaagcacacagaatgccagggacaagggtcccctggagaataaagatgcagctggaagatggtgggtggtctcagcccagcagccctgcctccgagggattttaatgggaaattaggttttgtcctccttccacgttggttgaacatccaaagtgcagtgcaatggagtgcaaagagcatcgactttggattcagaaaaatctgggtttgagtcctggccacactacttactagctgtgtgactttgagcaaattacttcccctctcgagcccatgctcccttctgtaaaatggtgttaatatggcacctccttgctaggttatgaggaatcagataaattcggcatgtaaagagctcagcacttagcaagctgtcggttgttattcttattgctattaatgggaagtcaccagttgctactgatcctgtcccacctcaggagaggagaggccatcaagtccaggttgtgactgggttcgggcagtcagacctttgtcctgtggcacaaaaatgacattgttctccacaagatccacttttctggcctcagcgggtggatctgtgtctggtggatgttggttctgtgatggatcttgtcctgagaactgcctcatgggcccagtacaaagctgacgatccaggtagaaacagaccctcaatcaggcaccatttatagtgggtcctgtgtactagcctccgggctctgagctggggatgcgacactggataaatccaacgtgacttcattgagtgcacagtcctctgagcagcagacattgaacagttctgtggccacatgtgaaatgaggtttttaaaaatgataaatttaattgccagtcatagcaggctcaatgatggcctccaaggacgacatccatatctttattcctggaacccatgtaaggtgaatgttaccttacatggcgaaagagctttgcaaatgtgataaatgtgatgaagttaagcatcttgagatggggagattatcctgctttaacctcacaatcattgtgggtccaatgtcaccagaaaggttcttgtaagagggagataggaggatcagagttagtcataggagatgaggatggaagcaagatgtcttagtcttcaggatgctataacaaaataccatagacaggggggttgataaacaaaaggaatgtacttctcacagttctggaggctaggaagtccaagatcagtgcctag

SEQ ID NO: 1186 - DNA, 4001 bp, Homo sapiens
ttcatcttccagcagaaagcttcatctctgggccacaggagcccagtggaagagatgcccaaagaactgacctgagcaaggtctagggacatcagctagggctacctgctttcagaggctccctgacatggccacatctgcaaaccacctgtcactttgtaccactctcgtgcctattccctcacctccatcccagaagcacgcatttcccatgtcacttacctttcctggagttcaaaacaaccttttacagacagggaatcagagagaggatcattcatgttcactaagctgtgaggacagagcttcctctgtgaaacacacaggtttggtgcactttctcttcttttacaccctcccctctgttgcctcttttttatcatattaactttaaacacacttcctaacaaggaattcctaaaaggaattcaccctcactagagctgaaccctccactaaccagctccctacacgatgtccctctctgtagcttctaccccaggtcatccctctgcccttactggagcgatcctgtgatacccacttcaggatatagagcaccaaacaggacaatgcattctagtgtccccttccctagacatctccagtggctggcacacagtagatgctgattggtgtttattgtaacaaaaaaaggctgtgctatggcccccagagaaagctcaccatccttcctcacctgatcagctggtccaggtggcctctgaagaagcagacccttcttacataaagcatctggaggttctccagcctgaggagcacagagctgaattcagcaactaactgttcttggctgtcagagcttagcaggtaacgacagccatcagagatgaagagtttgcgaagattcctcatctggctcaggtaacggctaaactctactatcatacacagccagcacatgttccaaatttccaacacttggatactgtctgggtatactgtttccaatatgtttctgaaatttagaatgctcattgaataattcaccaccttagtacagcacaggtgtactgaacctcttctgtgctgcacccacccagagaagaagctcagatcttcatccatgaatttttccttgaggcaaacatccatgaacaccttcaagggctgcttctctcctgtccttggacagtcctccactgtctgtctcttactcatggcctctggggagcaggacaggagcctggctccagaccatatggtccaaaaattctcatcaacatcccgcatttccagcacttgaagtttccacctcctgtgagtaacataggggaaaagctcagaacgtagacaaggacccacccctgacctgggctttcactccacatcaaggacttcagctgcttttttcctcagcgcccctccttctgtctcttctccatccctttcccccttggattctgcctggtacccacttctagtgcctttaccttccactgggagcaggcaggttcctgtttcctcagtggaccctgtatggtgagcagtcctttcccagaggagctgggcaatagccaagaacgttcccagctttctcactggcaccatcagaagcccctgggccaccccgggttcccaatttgtctgacccagctgtttagtccctggacacctgggccctccccacctgggtcacctcacctggggcgaaccttttgggcaagcaggcaatcaatcccatccactacataatgtaagatctccagatcaggcgtcttcatcagggaccccagagggaggcaggggaagggccaggcctgcaccatcaccttcagaacctcgcagcgtctgctagtgaaggcctccacgaacagtggggggaagagctccctgggcagctcatccaggacggagatggccaaggcctggtccctcagcaggctctgccctgccagctccaggagtctgcgtggggcctggaagctcatcctgataaatctgcaagaaaacaaatccagagaagacaaacttatcaggccagtcctctcacaccctgacttctcctgggccaaaagtcactactctggcaggtgtgaaagtccttagtttaccccaattcgactctgcaataattggccacagagacatagttctgcccttctggtaccaagaagagtgtctcccaacctccaaggaacgggcaagatcactcctactccatgaattttcattaatttctccacccaactctattagctctgggaagtgttaccaagaatcttcaaagctcagctccttttttgagaaaaaaatgtcttctcaatttaaggatctaaagcaatggtcatgtggctgggcttggtggctcacaactgtagtcccagcactttggaggccaaggcgggtggctcacttgaggtcaggagttagagaccagcctggccaacaaggtgaaacccagtctttactaaaaacacaaaaagtaaccaggcatggtggcaggtgcctgtaactccagctactcgggaggctgaggcacaagaatcactggaacccaggaggcggaggttgcagtgagctcagacagtgccactgcactccagcctgggcaatagagcgagactcagtctcaaaaaaataaataaataaaataaaacaataaaacaatggtaatgggagtctcctgtggccccaaacagtctacagtctcagttcccacagtgaacttggctgggagagactaaagggatatttttaattagacaccattatgttcactttcaaaagagtaatgaggggccacacatggaggctcacagctgtaattccaacactttggcaagccaaggcagaacaatcacttaagccctggagttgctgaccagcctgggctacatagtgagaccctgtctctccaaaaaaatacaaaaaatagatggatgtgatggcgcacacctgtagtcccagctgctctgcaggctgaggtggaaggatggcttgtgtctgtgaagcagaagttacagtgatctgagactctgccactgtacccctagcctgggcagaacagcaagactctgtcttaataaaataaataaataaataaaatattacccactttggaatggagtctagagaaacaaatggatcccacattcagaacaaagactccattcttgaaaatggtgtatgagaccagtcatgttggctcatgcctgtaatcccaagactttaggaggcaaagtgggaggtttgcttgaatctaggtgtcccagaccagcctaggtaacaaaccaagacctcatcactataaaaaataataataataggcctggcacggtggctcacacctgtaatctcagcactttgtgagactgaggcgggcagatcgcctgagtttgggagtttaagaccagcctggccaacatagtgaaaccctatctctattaaaaatacaaaaattagccaggtgtggtggcacacacccacagtcccagctacttgggaggctgaagcaggagaatcacttgaacccgggaagcagaatttgcagtgagccaagatcatgcctctgcactcgaacctgggcaacagagtgagactctctctcaaaaaaaaaaaaaaaagaaaaaaacaaaatcaaaaaaattagccagttatactagtgcatgcctgaattccagctattcagaaggctagaacttctgagtagggaggatggcttgagcccagaaggcagaggttgcagtgagtcgagatcacaatactgcattccaccaagaatgacgcaggaagacaatgtctcaaagaaaaaaaaaaaaagacttcagtcaattgcattatttttcaactgcttgatttggaactctgaagctgggcatggtggctcacacctataatcccagcactttgagaggcctaggtgggcagatcacgaggtcaggtgttcgagaccagcctggccaacatggtgaaaccctgtctctactaaaaatacaaaaattagccgggcatggtggtgggcacctgtaatcccagct

SEQ ID NO: 1187 - DNA, 4001 bp, Homo sapiens
gggccaggcctgcaccatcaccgtcagagtctggaagtgtctcctgcggaaggcctccatgaagagtgggagatagagcaccctgggcagctcctccatggcagagatggacaaggcctggtctctcagcaggctctgccccgccagctccaggagtctgggtggggcctggatgctcatcctgatagatctgcaaggaaaatctctagaagacaaatccagggaaaatgtatcactctcatggcaaacacaatcatctgcttctactggtaccaggaagaatgtcttccaaacaccaaggagggaggggtcaaggagaccactggcttattaattttcatccattgctccactgaatcccagaaccaccggacagtgccactgaggatcctgaaagccaagctctacctctttgaggaaaaatttcttgtcacttaccaacctaaagcaatgagaatgagagtgtcctgtggccccagacagcctccattctcagtttacaccataaacatgctgggggaacactaaagggactccctaaaatcgatgccattattttttattttgaaaattttctaccagaaatggaccaggtgctgtggctcatgtctgtaatcccaacactgctggacaccaaggcaggcagttcacttgaggtcaggagttcgagaacagcctggcctacataatgaaacgatgtctctactaaatacaaaaaaattaagaatcatttgactccagaaggcagaggttgcagagagccaagatctcaccactgctctccagcctgggtgacagagttggactcagactcaaacaaaaacaaattgataaattaattaattaaaatgttagccaggtgtggtcatgcatgactgtaatcctagctactctggaggcagaggaaggagaatcacttgaagcccagaggcagagtttccagggagcccagctcagggccctgcactccagtctgggtgacacactcagagtacatcccagaaaaaaaacaaaataattcactggaactgtaaaagtggtgtgatggtattccacagcatttggaaggtatgtatagaaatgctaactgtacctgggcgcggtggctcactcctgtaatcccagcactttgggagtctgaggggggcagatctcctgaggtcaggagtttgaggacagcatggccaacatggcaaaaccctgtgtctactaaaaatacaaaaattagctgggcatggtggtgagtgcctgtaatccaagctactcaggaggctgaagcaggagaatcgcatgtaactaggaggcagaaatttcagtgaaccaaaccacaccatggcactccagcctgggcaacaatagggaaactccatctcaaaaactgtaaaagtgctaccatgctattctagagcactgtaactctgagatgaaggttcctatagacatcacttccacatactcacaattacccactttttgatggatcctaggggcaaagataaatcccatgatctgagcaaaactgcactcttgagattgctgtgtgggatacctttaaggattttatgaaaatgaaagcatacttggagaatcacaataacaccaagtctatgaactgtaattgaaaggcacaaaaacaaataacttcaaatgtcaagaaataaaaattcatgtcactgtaaatttttaatatatttttaaaaaacctgcttcgataagaattttaaaatgacaaaaaccaagcacaaatcacaatttgatggatgaagacaaaactacatttagaggaaaaatgaaagcctaaatctgttcatctcacgaaacagacagaaaaatattgtgtgccactttgggatgtgtgtcaccgtccctgactggctggctgctgatcagatgggcatgaccctaagcaggtggtgacttaccagcgctggactcactttgcagagttctgggacctctcagggaaccaagcagtagctccaggaatgagtgctgtgggtctcttctgggtaccctcaggagcttttatagacctttctaaccccacccttcccttctcaatcaccagcttccaatcagaaactgatacctgattagatcttgcagtcacacccagttaatcctgattgagttttcagctttcttctgactaatcgattgaattagatacacatttatggaagtaaaagaataaataatagggtgaaagtctaaaactcattcgttcatttattccccaaatactgatgaagtttggctaatacacgactttcgtagtgatgtagggaagggattaatctgttcctgatattaggccaaaaaaaaaaaaaccttaaggtgtccttattggaggatgtttggccacatcaaaattgtcaaaatgtttcagagctacaatagcctgaagaagatagtgatgtcattcccaagaaaacagaataaaaagctgtgtatatcgaatggtcacctgtgttttatgctatctaacatagcagatcatatgcacattcaggtagaagaaaggaaccactgagagtgtgatctatctcaagactaagtcaaggcttcaccgaaggaaatcaggacaaagtgaccaagtgaggtggggactgagcggaatgagactaggtgttctaatgggaacctgcaaaggaaacaagacaatgtaaaacatggcggttatcttgtgggcatctagatgtcaggactcaaagtcttttgtcaagattgagtttatttattgattgtttgtttgattttcagactgggcctacatctgtcactcaggctggagtgcagtggcacgatttcagctcactgcagcctcaaccttctggttcaagtgattctctcatttctgcctcccaagtagctgggaattacgggtgcactccaacaagccctactaatttttgtattttagtcgagatggggtttcaccatgttggcccggctggtctcaaactcctgacctcaagtgatctcctcaccttggcctcccaaaaggctgggataacaggcatcagccatctcacccaccctagattgagttcagaaattaaaaggagaatcatcaaaagagatagggcagacttaaaccataacattcactttgaaaacacagggggcaggtatagtcttggccctactagaaggtaaagggtgtttactcacaaaactgatgggctcctctcagaaaaccagcttgcaaagatggaatctaagaatgtgaactggagcagaggccagagagaagattggggccagacctgggaagggaggctctcccaagctggaagccacccaggtagaaactgtgggctctacaggatgtgagagagaaatgaacgagggtccatatgtccatcattgttctatcatctggagacctttcctgtagactctgggatcttcccacagtggaacatttcccagcaaccattggccccagtcattttccaggacccttcatccaaatcttaatctcacccactcccttcctactctaatttgataattcatgtttcctccttcttagagtcctttcctgtcgctaatattgaacatagagattcttatcagagcatcaacattaggcctacaaagaaagctcagacccaggcacagtggctcatgcctgtaacatcagccctttgagaggccaaggtgggctgatcatgaggtcagtatatcaagaccattctagctaacacggtgaaactccgtctctactaaaaatacaaaaaattagccgagcatagtggcagatgtctgcactcccagctactcagaaggctgaggcaggagaatcgcttaaacccaggatgtgaagttgcagtgagctgagatggcgccactgccctccatcctgggtgacggcatgacactgtcaaaaaagaacaaaagaaaaagcaagcaagcaagcaagcaagcaagcaagcaagcaagaaagaaagaaagaaagaaagaaagaaagaaagaaagaaagaaagaagaaagaa

SEQ ID NO: 1188 - DNA, 4001 bp, Homo sapiens
ccagggccagaggagtgactgaacaaatgcctcagctgtgctggtggcaacgggaggaaatctagtgccctggcagctcctgactttcagttcctatttaaaatgtctgaattgggagcatcgacaagctcccaaattagctttttaaatagaagctgagagttaaaggaaaagcggccgtgtcatgggggaaaagcaagtgaaaatcccggccaggccgggaccagaggcagagggggaaggtgaggacaggcagtgctggaaagatgcaatagatgactggggactggtgggagggacagcatctcctgggcagcaggactactccagctgcccgaatcaaggggcctcctttctccccatcgcttgctctcattttgcagatcacctggttgtaggaaggactggtaaacaaaacccacactggcctagactagaaatcccagtctttcctattttccctagatggttaagacagaaaggagagaatagtctacagctaccacacttaagcaatgagttacgagcttatgaggaatgagggggcaggtgtctggaccagtgtctggtcttcaaacggagcttacgagtctcaggaggccacaactgtcccattagttgactttctgaggagaaatgatgtgcccaactgtctcctgaagcctccaaacactgaggggggcactcaacccctgagctgcccccaagatgctaaacaacagtgagaatgtacaggagttcaaacctgggcagaaataaaatatgggtttcactttcccgaattgaacatgggatggagtactgaaggaaagtgcccctgcctcctgagtagtgaccacccaggacctgaggcactttatcccaggggtcagagcaactgaggagtgcagttgccagaaaattagcccttccccagaggaaagggaggagggaggtgggagcagcgccagggccttccccgaattcttcccctgtctgccagggagtggcagtgttgttaatcattattactgtatgcaaatcccacacagctccgggactcctggcaaacgctaatggagcccacgcccacctcctgaagggccaattgtgtacctttcaaactgacagactgaagggggctccggaaaaagtaagagtgagtgaatgagggactccaaggtgccaggggccacaagggcccagaccacaattaccgacttccactccttcatctggaagagggctaggggttctcacaagccagaagccccgttccggattcagggaggtccttttccagccctgggtctacaattgtcctagggtctagaacaccctcgcagtctagaacaccccagaggtcacaacgcactttgcatttctctgcctcggcacccacctctccacacccagaaatgtgatctctcaagccaagcgttccccgtccctgctggggcacggagctgcctcgcttccggagcgccaggccgagatccaggattccgggcaccgaggctggagacaccgggaaagccggagccgcgggtccgcccagcggcggggactgcgccctttgcgcgccgccgccctgagggtgggaatctgggccggacacctggccctgtgggcacatgctgaccttcccactccccatcctgggtcgacgaggcacggagcagtggggacccatgggcttcagggagggactgaggggctgggcgggctccagttgtaaggggaccggctcgggtgagagttcacgctcccaagtccagactcccggtctaggtagtgggtagacgtggcgggagaggagggcgaatctcgaccttctgatggtgccttcgtcctccgagaggagagcggctcataggtggggttagaggcagtgtgtcccccgggtacctcttcagcctctgcactcggagctgagagccgggggccagccgcaaagattgcgcggtagggggccccaccttgccaggtcgccgggcttggtctcaagcaggtgctgctgccctgtggacagtcagcgagaaatagacacacagctaggtgcacacataccccacgcgcgcacacgccggccctccctgccacctctccgtgggtccccagccacacacgcccccgaacttacgctcacgccgtactccctgctcctcccccacccccaaacccagctcaccttgccacgctcacccccgtgcccaccctcgctggcacacgcgctcacacccgcgtcggtacactccgccacctccaggcacaccctaggattcctccactcgcccggggagacgcactaggctctgcctcgtctccccaccccccgctcacgcgcgcgcccctctccacacacacagacacacacacacgcactcacactcatacacaccctcgcgcgcggagtcactccccctcgcacgccctcgccctgggcaccctcccgcggcgagactccgggtcctcctcctctcttcctccactgcctggcggctcggcgctctccggcccggcctggggccgctgggcccgcggggatcggaggggagccgagggcgcagccttgccgcctcccccggactctcctctcctccccgccccgcctgcgccgcgcccccaccacctccccccctcgggaaagggacctcgggagaggcagcccgtggccggccgggctccgctcggcgcggcgccggcagcggcgggggaagggagagagcgagggagcccgcgagcccgcgagcggagcggcgaggcggggaggggacgcgctgccgagccggggctggagcggcggaggctgcggcagcggcggcggcggcagtggcggcggcagtggcggcggcagtggcggcgggggagggagggccccacggacggacggacgcacgaaccgaccgagcgagggaggcagcgagcgagactgcgctggcgaggaggagccgcgcgagcggcggctgctgggcgcttccccgcgctgctgggcgctcggcgcctccgcggccccggctcccggccgcagcttcctcgcgcgcgcggggcgccgggcgcggggcccgggctggcttcgcggaaggtaagagggacgcgaccgagccttctggagccaggaagtgcgaggagcgctgctcccacgcctgttgctccggctgcccacgcggcaccctcccactcccgcgcccgggtgggtgggcgctggggcgccggaaggattgggggtggggcccgtgccgtgggggagcagacagccggcccgggggcgtcggttccctcgggctgtggagccacctccgggcagccaggcgctggggttcgggggtggggtgtgaacctctgccctctttccattggcctgtcttccctcggcgggtgccagagacaggtggcgaaggcttgctccgtccccgctcttggtgaggggacaaggagagaaatggctgaaagtggaaacccggagcggtttggggcgcttcgcaaagttctccagctcggcgagccggcggtgtgtctaccagaggctgggggccagtccatctggtcctgcccgacgccacttccaccccgcgagctctgggaaaggtctctacgtgacgccaagggccgtcgcggccccggggagagggatcgaaagactcactctgcgaggtgtttacactggaggtgggggacgggaagggactgggcaaagttacctggactcaactaaattcctgcgcttgcttagtgttgacatttgaataggatccgagatgttctgcttttatcccgggcagccctgatatgtcagcaacaggctgaggttccagacctgaaatcgcactgcaagaaaaagggtccgtatttcttaagagagagcgtctgaactttctcggggtcctaggcacaatgcgatctgtttgtaagaccaggcatgcgttgctgtattttgcatgaatgtacgtgatggtcaaatgtatgccttgtttaccttacttcgagggagcctgtatgtttactgtctgtagaaagggctc

SEQ ID NO: 1189 - DNA, 4001 bp, Homo sapiens
ttccacccgccttggcctcccaaagtactgggattacaggcgtaatcctcttcccggactcattattgaaaatttcaccaagaagctttgaaagctgtgtgacagtgttatgcatcattcgcaagacacagatgtttccaatacacacctcttacgcatgttcaaaatgaaccactttggctgtgcgcagtgactcacacctgtaatcccagcactttgggaggcagaggcattggattatctgaggtcaggagtttgagaccatcctggccaacatggtaaaacactacctctactaaaattacaaaaattagccaggtgcagtggtctgcgcctatagtccaagctactagggaggctgaagcaggaggatcgcttgaacccaggaggcataggttgcagttagctgagattataccactacaatccagcctgggaaattggctagattcaaaaaagagagagagagagagagaactacattggattagacttcttaagctccatccagttaatcatgattggatttttgtctttcttccagattaactatcaaattagatattcatccatgaaagtgaaatatttagggatatggtgaaagtccaggactcattcactgatttactccacaaacatggaattttagtaatatgtgacctttgtagttctgagtgtgagatagggaagagttgaatctcttcctgacattagacagaaagaaaaaaactcgaaagtatctttgttgagagatccttggccacatcaaatttatcaaaatatttcagagttaaaacagttttacaaagatagacatgacagtccctaagaaaacacagtagaaatcttcatgaatccaatgatcacctgggtggtataatttaatttttttcgtgtcggggtagctgagtctcacttcatcacccaggctggagtacagtggtgccatctcagctcactgtaacctctgcctcccaggttcaagtgatacttatgcttcagccttccatgtagctgggattacaggcatgcacctccacacccatgtctccgtttgggtggaagagttacaatgaggatgtgattggtttaaaattaaggtcaaagatcctctttggttaagattttttttctttaatagggcctcgcaatgttgcccaggctggagtacagcagtggtatgagcatggctcactgcagcctcaatcttctgggctcaattgtttctcccatgtcagcaacccatacagttgggaagacagatgcatgctaccatgcccggctaattaaaaaatatgtatattttgtagaggccaagcaccagtggctcatggctgtaatcccagcactttgggaggccaaggcaggtggatcacttgaggtcaggagtttgagaccaacttggccagcatggtgaaaccccacctctactaaaaatacaaaaagtagccaggcaagttggcagttggatgtaataccagatactcaggaggctgaggcatgagaattgcttgagcctgggaggcagaggttgcaatgatttgagatcgtgccactgcactccagccttggaaacagagcgagactccatccccccttcaataaagaatattttatagagatgggtttttgccgtgttgtccaggttggtctcagacccctgggctgaaatgatcctcccgccttggtctcccaaagtgttggggttaaaggcatgagtcactgctcccttcaagaattttgaaatgacataaaccaaagcacaatccaattttttgaaataaagacaaaactgcatttagaggaaaaaatgcaaagcttcaaattgttcatatgagaaaaaaaacaaaacaggatataactctatgccatcttaggctgcactgtcaccatcccagaccagctgactgtaggtcagttgggagtgtccttacagagagattagtgacttaccagatctggactcagtttggagggtgctcagacctcaggaagaactaagcaggaactccagacttgaagactttgggtctcttctgtgggtctttagaagcttttattgacctttctaatcacaactcccacccacacccctccacgtatccactgctagcttccaatcaacaagtgatatctgattgcatttctgaagctccacccagttaatcctgattggggttttggctctccccagattaatggattgaatcagatatccattcatatcagatatccatattaagttcatgaatcaagaaattgacagtgttagggatagggtgggaatcaagaatgcattcattcaagaccgggcaaggtggctcactcctgtaatcccagcactttgggaagacaagttgggtgggtcacctgagttcagacattcaagacgagccaggccaacaaggtgaaaccccgtctctacaaaaatacaagaattaggcagggacgatggcacatgcctgtaatccagctactcaggaggctgaggtgggagaatcgcttgaacccaagaggcaatggttgcagtgaaccaagattgcaccattgcactccactctgggtgacagagggagaatttgtcggaaaaaaaaaattcattcattcgtgaacttcacaaacactgatggaatttcactaatatgtgacctgcatagtcctgagtctgaagcagggaagggtctaatctttcccagatattagacagaaaactaaaatctgaaagtagtattgttgggagatctttggccacatcaaaatcacaaaaatgttttatagttaaaatagctttataaaaacagaggagtcgtccctacaaaatcaaaataaaaatctccatgtattgaatggtcttgtgggttttatatcacctaaggtagcaattttttcactcctgctggtggaagagaggtgccactgaggacctgagtggtctcagggcttaggttaaggttactctggaagaaattgcaaccatacttataaactttataaatttaatcagtgaagaagggagggggagaaacagacataaaccaagcttgcagtgcattcagcattcatcatgaggtcagcttgctctctgacctgcttcctcatggttgctggcagcctgctgtcccaaaatcatgtagaccttagattacagttgcccttaactgccctgcagacaacaatttaggccttgtaaaacattaactttttcatttgacatattctttcaggttctgcatgtcagtgaagctactgatggcaggtgatctgaagggccctgcaaggcaccaactcaccaaggaatgcagttttgacatcctgatgacttcatacctcttactgccaccaaactgcaccaactttccagcctcttgctatccatgatcctctgaaaactctcagtacttcttggggagatgaatttgagggtctcctcccagcttttcattttgccaccctgtgatcgttaaactctctgctgcaaaccctgctgtctcagaatattagtatgctactgtgctgcaggcataggaacctgatggtcctgtaaaaaaagtcatgtcaaaattacaaagggaagtgaaggtggaggctggtcagggttgagctgtgtgttttaatgggatccggggagtgaaccaagacttggtaaacatgttgggggttattgagggcgtggaggaggaatctttccaacattgcactgaggcccccttggtgttgatacttgtgaccaagaatgagtcttccaaaacagtgtatgtaattctcctgatttttcctttcaaaacctttgtcttcctttacctccctgaataatctcacatctattcccattgctttgctcatttcataataaaaatcctttttttttaaaaaagaatctctttctctgtgaagtagaccatatattttattgccacacaacatgagtagcctggtattatggagagaaagggtcaaaaggatcccattccccaccagctgggggtgatataaaggtcctg

SEQ ID NO: 1190 - DNA, 4001 bp, Homo sapiens
gagaggcaaaaacacttacaaataaggaaagagaaacaggctatgacctcatgcttgcttggacctattcaggcatgccagggcaaatacctatgctaaaatgtgggagctaagaacagagtatattgatttctttattacagctagcagaatttaagaatattagcacaggtctttgagtaaattttgcttctaagagaggttactatctattctgaattagactgggaggaatgtccctttgaagaggaacctctatttcattttctacagtatacaatttcttctctagtactttagtaagtccgggttcttttttaattgaatgggaagtaacatttcaacccaggcttctttggaaaattttagtaaagattgtggcaaaaagtttataaaggtttccaaagaacaatttttaatccttagatgatagatttcttttgtgatatctataattgactaagctacatttgcatatgcatttatttagtatcttctggctccttcttctttactcttcttctttaatttgcagtgcttaattttcttagaggaaggatggtgagacctgtgctcccagatcttgtatatcactgatgctgtggttgccactctgtggagtgtttggtcaatgttgttgatcaatgggctttctagatcattaccaggtttttctaaggaggcttgctttttcagctaaaaggagaaaaacaatacagattttatctacataaaacagtagagttcaatactatagtatagttaataatatagttcaaattaaatttatgttctaaatatgtaaacaaaccttattaaaacagcacacatcaattatttatactaaaggaaggttactatagaagtaaggtataagtgcagaggaaatgttatctatatgccacatgtatgatccttatcaccatcagcaaacaattagtgtgtcctatgtttagggtactctcttgggagaaattatttgattagcaaaatgtattcgtttatgaaagaacctcaaggtataacaccataaagtaatagtcattttaaaaataagaaaacatttataaatatctaattcttctgaaggtcaatgaggttttgtttgttttttgatcaaagagcttttaaggttgcctctcaaactatggtgtcatctattggcaaagtgggaaattatgtaatagtttaaaagctccatttctcagaaagttgttctaatattagcaattagtttatagcccatataaaaattacatgacaccttttgtacttagatttcttagatacatctgaaagggttctaagagatctcttgttacagatccttttgtggatgaggcaactgagatagagcaaatgacttacctaaggacccagacagataacttgattttccatacattctcctcatggtagcacactactttttttggtgtgttttgtaacttgaagtagagggggctagatgattctaaggaccttctaattcaatacacatttgttgaacacctagtatgagcaagatactgtgctagatgctgggaatgaatgggaagttgggggaaggttacaatgaggaataaaacacggtaccctctctcaaagaaactagtaatattatgttctaaacccttagagattttgtaactattactacttgtatcacgaattcacctttttttggtgtttcttccatttcttccacaggtaatgcacagacaaaacaaataagacgaagaagacagcttgtaataaattataaatgagatataaacaaccctgaaatatatccatgttagcaaagtcgcagcatagtttatccagaagataaggcaggcagtgagatggagaacccttaactttccaataatgtacttcttctggaagaatctcccatccaacctttgtccagacagttccatcacaaatgcagaaactctccccgaagaagcagataaacaacagagaaaaaatcagcggtagtctttgattagacatccttctttgtcaattgaaaaaaaagtagctaaaatttagctattttaaaatagctaaattagctaaataataaaataaaataactaaattccctacgaagggaagcagaaaataccaggagctattagttaaaatggtgcttcaataaaagcacttcatataaccttgccagtcagcaaaatatgcccagcaaaggatacagtgatgatcattgtaacatcatcagtcatagtgactcagggataagttcagtgacatcataaataaccacattggaactaaaaggtgtcacctgaccaatcacattgagtttcttaaagatacttttttgttgttgttgtgttgttgttttgccagaatggtttgagcttcttcaattttcttaaaagtgaacactttactaatattttgctagctaataaattcaactatagtcatattaatagaatcttatggaaacaatttactcatgtcacctctaacatttcttctgaagcactgcagttttacatttacttaaaaaatagtataccacttcacataacccagcatctgcttttatttttttgtttgggaatgtccttcccttcaaatagttcaacaaatattgagtgcctgtcccttataatatattcctgtggtggtgatgtggtactatcaggtagtgggtgaggggtgaggaaggtggcatggtatatgataaaaagatgggacatagaccttgcctttaaggagtgtacaatctagaggtaaaagcaaaaagtaatataataattaaaatgattctgattttattataaaaaataaatagttctcattttactaaatctaaaaaattttagattttactaaatgagaactaaataaaattataatcacataactgttgagagggcaatgagtcccacttgggggaattaggaaattttgcagaaaaagatatgtgagtaggctttgaagaatgagtagaatttttataggtggcagtgtagagagggtatctaagattggggaagcataataagcaaagacattttgtgtaagcattcatataacaaatatttgctgagtgctgactgtgtgctaaacattgttctaggagctgagaatatatacacaacgtagcccaaaacagaatcattaccttcatggagtttactttctagtagggagatacagaaaataattgtatctatctaaatctatatgtctgtatctgtggagtgctatggtgatatgatatgtcattgtagttttgatttgcatttctctggatgatcagtgatgttgatcaccttttcatatactggtttgccattttgtatgtcttttgagaaatgtccattcacatcttttgcccatttaaaaaaataggattattagatttttttcctattgagttgttagagctgcttatatattctggttattaatcccttgtcatatgagtagttttattccattctgtgggttgcctcttcacttcgttgattgtttcctttgctgtgcagaagctttttaacgtaataatcccatttgtcgattttttctttggttgcctctgctcgtagggtattactgaaaaaatctttgcccagaccaatatcctggagactttcccaaatgttttcttacagtagtttcatagtttgaggtcttatatttaagtctttaattcagtttgatttaatttttgtatatggtgagagatggggtcgagtttcattcttctgcttatggatatccagttttcccagcaccatttattgaagagactgtcctttccccaatgtatgttcttggcaccttcgtcaaaagtgagatttatagatttatttctgggttctccattctgttccattggtctatgtgtctatttttaggccagtcccatgctgttttggttactatagctctgtagtataatttgaagtcaagtaatgtgattccttcagtttttatgtttttgttttgctcaggatgtctttggctattctggg

SEQ ID NO: 1191 - DNA, 4001 bp, Homo sapiens
agccggagctcccgccgcccccgccgctggagaagcagccgcttccgccgctgccgccgccgccggacgacccccctccgtaactcggctggggcgcgcacgaggtctgagtgacctgctgcgaggagacgtagccggagccgctgccgccagaggagcctccgccgcagccagagccgccgccagagtagccgcagacagagccgccgcccccgccgctggagaagcagccggagccgcccccggaggagccgccgctagagacgcctccgtagctctggcactggaccgcctggcccgagaagccgccgccgccggaggagaagcagccggagccgcccccggaggagccgcccccaccgctggagaagcagccggagccgcccccggaggagccgccgccaccggaggagaagcagccggagccgcccccaccgctggagaaacagccagagcccccgccggaggagccgccgcctccggagtacttgacgctcccaccggagccccctccgcagcctccaatgccgcccccgcccccgccgccggaggagcccccgccgcagccgccgccagagtagccaccgccgccggagtagccgcagccagaaccgctgctaccgccccctgagccgccgccgccgaagaagccgcagccaccaccgccgctgccgccgccaccgccaccgccgccagaggtcttcacgcagtccactgggggctgaggggtgggctgctttttctgataagacatcttgtctgagaaggaaggagagcctggaaggggagaagagagcatcgctggaccagctgcaagaggatacttacggaggcagctgcatccataggcaacatcgccatcctcccagggctccttcaggtgcccggagagccctcagcggggtttcttatgattgctgcttttggaaaagttgagttcctcattcccctgcagaaagccttcattatgctttaaacagcccagttagcagtgcccattctttctcccagctctgcctctgaccactgttgtgtgatttgagggcagatcacccacacgcccgcctctttctcatttcctgttaaatgaaagggtttgaacacttcatctttcaggcctcttccaatctcaacactgattctctgagtgcaaatagaaaactaccacaaacctctacctaggataggagattttacccattcccagcacaacagagagaggtttgtcggacttcattctattgagggctgttgcactccatcctctgcagaagctcttagttcaaactcttggtctgtcccactgagctaggccatgaaccaagggctagtcactagaaaagacaggctctgctgtggccctgcctggaaacaggggaaggaccctggtggtcctttggaccaacatccccgaccagaagctattagccatctcttccatgattttctcaagtccaagtttggtagaagggactttgactagtaggaagttgtatttccctctcagaacttctaactctgtaaaacagcaattggatttctgtggcacctgaaatccctcccatctgcaacttttttggatcattctccctactctcttgagagtggctcagcctctcctcctgacaggttcacaaggtctgctcagcctgtgcacaggctgccttggacagcctctgcagagtccttctgtgcccggcaccatgcctgcccctatgcgggtgccagagaggcaggagatagtcttgtctttgtggagtttacattctggccagaagaccagaaacaccatctgcatggcagcagctcatcccctgctcctttcctgaccgccctctaaatgtgagtgcttttgggaaggcagaggtcctatagctcccaaaggggaaagaggccctggtccatctaatctagtcaggcctgggcaagaccagctgggaaaatgagagagtcagtagaaccacacttacccaaagcaccaggaagggtgagtgaggagagaagatgctggcaatgtgaggagcactgatctcctgaggttatatatagagctctccctgactcattgatccaggccagcttcttgtgtttggcctcagttacgtgacccgtggctgtcggccccacctccctgtgattgcaggcacaggatggcccattcatgaaggttttggcattcttgagatgggcagcctggtgtgtgactggccccttctctgatgcaacagtgtggcaggctcatcagtggggtcacccagtcagagtggatggcagacattgtttccaaaacctctggcacaggatgcataccaggtgaccacagggctgtgcttgaggaataggtcccagagtcttgaggtgccctaagagagtcaaactgaagatctcagtgctttatccaaggagtaggaccttctaaatcctactgtttgacttctggtcctgctactctaaaaatcctcaaaactttagaacccgttactcctttgcaaaagtttatctcccaggatttcatgtgtgttttgctggggtgtttctgtcctgcccactggaggcatgagtccccagcacccagctctggactgcacaccatagacagtgctgtaactaatgtgacgtgggaagctactttgattcatccccagagacagcaggcatttgagacagtctgagaagggtaatcaatactgactttccttgcagcagagcaaactaaagagatggaccatgtgatcccacaaaggctctttggctctgttgtcctgtggtgttgtgtggcaaaacactgaccttagcctgaggggcagtcattgaatgggatagacttgagattaggtgacagattgggtgctccctttgctacttgccagctgtgtcaccttgggcagagtcatagctcttagtgcagtacctgcacatgggaggcactcagtaagtacttattgactgtggaatgatcaagctttttgaccctcagttaccttgtctatcaaataaaaatagtagtacctatttcacaggcatgtgaagggagaatagttatgttaagtgtagaaggtgatgctgtcttttttgttgttttctcatataacagcacatccttacttccaacctggccttcccttggataccaaggccagaaaggagtccatggagggattgggcaagtccaattcttctcctaggagaataactcaaaactttcttgttgactctggaccagtagcatcacctctgcgcatgcagaacaggatgctgcttctttcataaccggaagtcaattggtattgtttaagataccacagtcaaactttgttctgcccagttatgttttgaaatgacagctccaataataaattcttaattatagtgcacttttaatgatccagatgatcctgattagactgtggccatcagaaacttgtggcactagtttcagtttggacagcataaacccaggtgaacccaagaggaactcaggtgctctcctccttagaggagacccagtagggagaagacaggatctgttggagaaggcaagtttctctgcttgaagttgaggcagtgtggagaatttggagggaaacaggccgcgattagtgattgctgtgggtataagaaagaacagttttatttagctgggccacattggaaagaggagcacgtgtggacgacggttcccagtactgatatgtgtggtcccttgttggcccattgctatgtgttcaccagtccttagcaaaagtgtaagtaaaaggacgtcagcagggtattcttgggaaagaaagtcttcaattctgaaatcatggccttcctacctcttcctttaaaagatgtggtgacatgaggctgtagttgtttcttttatgtcctgccatgtcaaaatgaaaatttggctatggtgtaatgattaccacttttttctgagggagatattacttctccatggaattctaaaatttgggaactaggccgggcacagtggctcatgcctgtaattc

SEQ ID NO: 1192 - DNA, 4001 bp, Homo sapiens
gagtgtcatatgtaattaaatcaaaacctcaaagtttcaaattctaaagacaaagaaaaaatttttgccaaaatgacctattttcttagttatatgatagtgacaatcaatgtaagtgttgtccaaatagttagacgtccagatctccacaggataactagttccttgctgtctcaaggcacaagagacaactctggaagcttatctcaagtacacaactctgactggcagggtttgctcgctcgtctttttagtatagtccagtttgtttagacaagcctggggttaacagagccaaggtgtgtgtttctaaccgtatcacttctgtcccaaaaagaggaaaactctgtttactggactcaggccactaaatatcagatccactgcccatggaaagcagggttagcaactgttgatggatcaatggaaaatccagcaactcttctcagcgatacaaaagtccatgcattaatgaaacgttgtgcggtacatggaatttgtaaagaggagattgattgtctgtctgtaattgacatttactttattctctgatacagactaagttggaaccgtgagaaagccctttatttctaaacggcatctcaagaccaggtaatgctactttcggaggaaaaggaggaagaaaagcgttgtaatgacaataacaaattacgggggaaacatttcgtggaaattactcagtttaaaaaactgacctagccgggcgcagtggctcacacctgtaatcccagcactttgggatgctgaggagggtggatcacgaggtcaagcgttcgagatcagcctggccaacacagtggaaccccgtctctactaaaaatacaaaaaattagcctagcgtggtggtgggcgcctgcaatcccagctactagggaggctgaggcaggagaatcgctcgaacctgggaggcggaggttgcagtgagccgagatcgcgccactgcactccagcccggatgatagtgcgagactgtgtctcaaaaataaataaataaataaataaataaataaataaataaataaataaaaactaacctacaaatgcttttcagggccattttaatgattaccttaataagactaaattgtttccaatattcacagtcactcctcaaattacatgcgtgcggaatttctaagcaattttgtgtagctgcaacttgttgagggaaagcaataaagtaactctgctacagaacaaaagcacttttgtctcgtggtggtgagggggcataccctgaacaaacaaccccgacagtgttgctagttactagttcccgaatctctagaagcctgcacatggttcaagctgttccccagcggacacagcacagtaccagatgtaactggaggctgaaaaatgttatatccctaggcttcacgagagaaccccagtttcctaatcaccatcgatggcaatgagactgagtttggaaagaaccacgtgtgcaaaggcagacgcaacccgtgcggcgctctcctggcctctgcgcccagcccgccagccctcagcagcggacgcaacgccgattttgcatctagattgctttttgctcctagcggggaaaaaggtgggaaaagagcaagttgtgccatacacccgccgggagagtcttgtcccggggtttggagtgggtctggagcccaggcttgcacgccaggcaaccccgaaaagccgcaggctagagccctgcaggcgccgctgcgccccggcctccccacgacgcacgccctggtgactgcggctcggggtaccctccctgcgcccggaccctcactcaccgctcacgttcacccgcgccgccgagcccgggagcgggggcccctgcggctgccgcatgccctcggggtcgagcgcgacggggcgaccgggcgccgggctccagccgggcgcggagaagcagcggaggacgcggcgggcgggcggagcgcctcctctccagcgacccctgcgacgcgtccagagccaaaggaaagtttggcggtgcgagggagggacctagggacagcggcccctccctgccccgccccgccccgccgggtgcgttcgacgttcccactggagagcgtccccaacctgcaaggccgcgagctgcgctcaaaggggcccgtgcgagccgcgggagggcagcgctcttgcagacgcgttcctgcctgggatcgtccccaggtgggtggtcggccggccccgagagggaaaagcgcccactaaaggaccgctagtacccacaagcctcacggagccatacctcggagctccgtattagaacgcagtccctctgcccctctgtcctcagagatttgtttgaagtggctgcgggaagtgcagcccacacccaccacccccgtgggaggcaggctctactccaagcccgacctaacgctggaaacctcaaccccaaagctacccgagggtgcggacagcccccagaggcaaccaacaatatttaaggttcttgtaagaggtttcttggcctcctggggcaaatagtcctggatactttgtttttcaaagctgaaatataaaacctccactgacccacctttagtaaagaagaaagatgcaaagtaaaacaaatgtcatgaaggcattgttctctctgaattctgcaaagcaataacgaagtcacagaaatgttcaaagttgtgctttcctggtgaccttacaaaaaggaaatactgtgaggtgaagtccttcccactcagacttcaggcccttaggaagcaatgagagttgtgtgcccagatgtcttcctgtgaccctttgccatccatccatccgttcattcattcatcttgcattcaccattaatactgcgcccttctgtgtgccagctaggaacctcatccttgcaaacaacctgttagataatctgtcccctaccatcaaagagattctgttttctctgcagaggatgttttaataaggttacgtcccttactccgtgggtcttatcctatagaccataatagcctaatgtgcctcaaacctccccggggctacagctaagttttcatcagcatgtgaaaattattgtttcatctaagtgttcagaaaattattgcggtgtcttgcagttgaactgtgtagagagaagtacaacttgcgaagctagggctaaagaaagatcatgtgtttacttttacaagcagaagctttgcatatgataaaaaagctcggtggcaaacatggtgaaaacccgtctctactaaaaatacaaaaagccgggcgtggtggcacgcacctgtaatcccagctactctggaggctgaggcaggagaatcgtttgaacctgggaggcggaggttgcagtgagccgagatcgcgccactgcactccagcctgggcgacagagcaagactccgtctcggaggggcgggggtcggaaagagctctctctgtcaagggagagaacagctcagctcaaacatcacggtgctgaagggcaacctggtaaacacagaaatactcaaccaccagcatttactgaatacttgacgcaacaaaggtgtagtatgttgagtaagatgttgcaggctagactgtaaacaccactaagagccttcttttgctgggaaaatctgttctgaatccaaacaacttactaacaaaggcacttgggaaacacattatgttgcattatgttgtaccttgggaacttcctgaactcgaggtaattgcaaagcagaacagggatcccacagagttgaatctgaatccttaaaaaaggaggaaagtgaagagggcatggggagctgtgttgcaaaaggaaagagactttccagatagatggtttttaacagctagatgggtcagatgtgaggggaaggccagaaggtgttacagagaaacagattcagagaggaaaagcagtgataaacaaacaaacaaacaaacacctatggggagaagcaggaaaagaaaagacgaggcaaacgacaactaaaaagaaagatgtggcccccaattcctagttttta

SEQ ID NO: 1193 - DNA, 4001 bp, Homo sapiens
cactcctattcctctaccagagcttttgcagaccagttttaataaatgtatgtcaatcacaataaaaacactaagaaatttaccaatacataattatgaaattatacttctgaaaacattggtcttcctgagattctgaagagaaacccaatagaactgttttctttttatttttttcaatagtgaagacatgaaagcatcctcaacccaaagtgtaatatacatttaatcatggttcctgacaaattttttcttatgcattaaagaaaagtgttctcactcttacctgtatatccagcataccatccccaggaagctaccattcctaaaagccatttatacatgattccttcgatataccagaaccgcttactgtccagcactcgaaggggctgaagtataattacatagcagatgtaggatggaatagcaaccaggttgttgacgaccatgaaggcaaacctcatcagtgctttcaccaagagccagcccagccacggagcttcttccaaagttatagccattctcacactggactccgtcctgtctttctggggtgaaagaaaaattcacttaaaaaggaaaattcattaaatacatctaaacagtcaccaacatagaaatcgcccccagcacaaaataaaacagcgagggtcgaagctttccgggtgtagtacctcggtgatctctcaggggaaattccagagggggacagagagcgagggaggaggagccgcacaaggtcaagggagctgttcaccgaggcacgaagtatgtcacaatatatttagcaaatgataacacaattcccattcagtaatcggtggccgtccccgcaccgtgtctcactgcggtcgtctattggacttagaaaaatagatccactcgcttcagacaacctcaggatctccaaactgaagacacaagtgacatgaccgaaacagggtcccctcaataagatttcccagatactgaggacctcagtctcctcaccaccacgattcctgcacaccgatgcattcctttaaaaggtctctggctctagcgaagagttaccctcaaaattctcatttgtagcaatagggtttttgtttcccttttttttttaagaaaaaaaatggggggcctagaaaaaaagcttacaaggtgagaggaagaaagtagggggttataatgcgaaaaagaggaaggacaggagtagggggaagggagcaaaagccagaaagaggtaaaagccaaggaactggggatgaagagaatgagatttccgaccagagggcaaggaagcaggggatgatgaaaggggcagagaagaggcgaccgcagcgcggggagccggtggagcctgcagcggtttccgcggatgtggaagggtcgtggcggcgggcgcggcccgcgcgccgggctcacctcggcgggcgcggacggcgggcggctgcggagagcgggggcgggtgtcccccgccgaggggtcgcggtcatggacgcggtggcggcccaagcggcccgaggcgctgcgcgagcgggcgcgctggcgccctactcccctcgcggctgcctgcggacagagggacggcggggactcagaggccggacctgtcacccgggcgggtcccggggaggcgggcggatgccccgcgcccccgcctcctccccggggcctaccgcgccctcgtccctcaggccgctgccgcctccccgggccacgcgacgacgacacccccttccccgcccccagcgcctcccctggcccggctccgctgccgctctggggcctgcgaccgcggagccggaggttacctcgggctggccgggccccagccggggctttgggagtcagaggagccggaagaatgcatggccggcggcggggccggcggaagaaggcggtggcggggccctgccccgctccggctgtggcgcggcccgcgcccgttccccggcggcgccgagactcggtccccaagggcccggccgcgttcgcccggactggcggggaggggcggcgggaggaagcggcgggagtcgggactgcggcggagccgctcccacagcgccctctaatgaaagcgccgccgccgctgcctggcccgcttgccccgcctggcccgctccccctacccctgcgccagcgagtcggggccctcggggctacctggacgctcggccaggacctcagtgagtccagaacatactgagggaaagggccgctcggaaagatctaggaatgaacacccatcctcacaccccaggagtgccttggtttcagttgagagccccctttcagccaacacggccgcctttcattgttagggctctcttctctgcccaaactaggaacctgtctccttgacggctaaatgtccacttttcattcttaatgaaacccggttgcactcatggcttttcttcttaacctctgcagtgtattattgtctagagtttcaaattcattctttttacggtcaaaagtcttgtttcaggaaagcagctggaacattaatggcaattccactttcccattcatcgcccccgcccccaccaccccaccaagaaactcagtgggaatgaatggtctacacagagaaactgaaatctggttagtcaagaaggaaaaaacaaccaagtgcctggcattaagtaagtactcacccgcccgccctcccccgcccgccataaaaagaaaaaccgaaaagacaaaaaacagtggccatgggaactcctagacagaccccgtcacttgggatactatagctgcattctggttcaaaggctggaccacctgaaggaaaatagagaaatagtccattgacctacccccttgagcattcttaaatgatctgcctaaattttagtttttaaaaatcctgtttataaaaccttatgtcccttaagcacatttgtaaatggaggggatggggcagggcagatttcacactccctagggaactgccatatttgaatcagaatgccacctattctgcctattttgaaaatgttcatcacagcgtttgctctggactctcaactttctctaatttcagttcctcttaggtccacaggtgaaggaaagatatgccccattctattccttgcattctctctttattgacaaggtagtaagatctttaaataaatctcatgagagagataatatatatactttattattcaaaatatgtcattatattcttcagtaagataggtgaggtacatatttatttccacaatcaagaataaactctaaggattccatctggtccatgcaattcagctttcccacatgctgcgtaaacgttggctgacacctggagagagataacctacaatgggatttacacgtgattcctggatcagggaccatctgccagaggaccagacacagcagcacttgatgaaatgcaattagtaccaggcccagaattcattttcaggctcagaaaagagccagaggttgggcaggacctctggctctttagtgtacaaaaacaacacttgaagtgtctaccaaagagacagattcttcagcatcataccagaacattttaataatctaggtccagtggacctgagaacctgctttttaaaaagcgtcataggtgattctgatgcaagtagtatgcagaccttgctttaagaaaccctgacttagaggtattctgagatgatcacattctcttctagacccttcataattttaaatcatttgatcatatgtgttctcatgtgtgttagtcagctagagctgccataacaaaatactgcaaactgggtggcttaaacaacagaaacttattttctcgaagttctgaaggccaagatcagagatcaaagtgtggggaggtctggtttcttctgaggcctgtcccctcggcttgctgatcaccatctctcattgcagaattctgccatttcagtacctccttatggaaggagtagggaatacctaatctccttgatcttttcagatatcctcatattaactgcttccaacctcattg

SEQ ID NO: 1194 - DNA, 4001 bp, Homo sapiens
cccgagcgagcgcgggtctccccctgggccagccgaacagcaacagccgagccccattaacccgcggctccctgcgcctccagcatccacccccggactggaggcgcaaagcaaacaggtctccgaagctgggcacagaggcacattgttcgctcctgcggctcttacctccgtctgcgagcgcgccccgagggagggccgtctggcgtgggggccgcgcggggacaggcgcggagggcagcggctaccccggccggagagggccgaggccggccgcgagcgggtcctcggccgccgagtccgcgcgggaggcagcgccgcagctccccggccggacacggcgccgcagctcggcgcgtcctcctgctcggccgccgccgcctccagccgagcagccagcgccgggcggctcctggggttaagtcaacattttcccgcagtttcccacacgccgctcttcgagagaggtctttcacacacacgcacacacccccagaccgcacgctcccttaggaaaaaaaaatcgggaatcagagcgaaaggggtggtggaagcaaaagcctgacagaggtgcgcagacttgggagtcccttcgaagcgacgggcgggagggcgccgggggcgcgaggccaactcagtttgtcaggcgaagcccctcagccccccgagcgcccggccggaatagcatccctcgcgccgaccctgcggcctggggcgggaggcggcggcgacccctcctcacatttcggatctcccggccggggctgagcggtggccgctgccccaaggaaggctggcggcgcagactcgggctcggggaagcaaggagtagccgggaagagccacgccacacacagcagcggaggggagatgccccccaacaatcccaaggaattctctggtaagctcccgatttcgccccagcacctctgcgtgtgtgtgagcggagagagagtgagagggagcgagagggagagagagagagacgggggaatgcgaagtcctgacacagactctccgcgaggtctgaactggagtcacctccagcctcctcctcctccttcccccaaatccgccctccccgccagttgggctaatcatataaacatactagcgtgtacagcgtcaaaggacaaatctctccctcctgagttttccagcaaggggctcgggcaaactcaaaagaagattacaggcagctaagtacaaaacgtggagcagataatctataactcattgtcgcccaatggccgttttccactccatttgagcagctgctgcggctgtgcgcccaagcggcggggaggaggagcgaaaggggatacttacgggctcgagcccttcggacggcggtggcggtggccaagcagccgcccgaggaccaggccggccccggctccgccggcggggcggccgcagggctgtccgggcggcggtggcggcgagggacgcgcgcgcacggccgtggaacgcgccccggaggcggcctgcgccagctcgcgcccctccccttctctcccctcccagtcggttcgcgctccccctacccccaggtccccgagctctgcctccagctccccccattaacacacccattcaaccgctaacccctagcccacccccaaactccactcactgcgcgctgggtcctccgcgcgctccgccggcgcgcgctctccatcctgtccacacacatgcactttaaaaacatttattttatttctggagtgggtgaagagtatttgggagagcgccgcgaagcgcggcgctccgaggctgagcgcagggggatgaccagcggctcggggccccctcccctctaggcccaggagcttgctcccggcctggacttcggagaggcgcccgggatgcgtctttcacccaccccgtctccaggttttctcttttctccacgcaccgagccagaggccccgaaacttttagtttccgtagccctccttttgtgtaactgcatggaggagaaagaacgtctgttcgccgcggctgcctccgtccggctgcggcgcgcgggggacgctccagggttaatgcgtctttgatacctgagatttccggcgcgctcgttaatgaaagttacatttttttaaattgcgatgatttttttctttgtagttacgtagagccagctaaactttgactttattgactatatttcacaagagcgttttgtttgtttttgattaaactcaccaggataagcaaaggaaggaaaggagactacaaggctctttactctcaagtatagtcacagagctgttaggtctgtttccctcatttccttacattgaaactgcctttgctcttgtcctctgaacacacttccttgcccctctcggttggcaatgtcagcaaacagccaggcagagcctacgatggacctaagctgaaaggaacagagcaggacagggcgaatcacgctggaaaaacgtttaaaagccagttaagtgtcctgtgcatgccacaaaattcaaacatggattttttttttattgcaaaatttctgagctggaagcagctatgttttcagatgtatttgtaaaccactgattctactaatgaatgcagccatcaattaaataagcatatttacctttttttcaagaaaaaaatgattctccaatatttaaaacctagaaagtaggataaaacttaagctgctttgctttcagaaacaataggtactttttggtgctgcaggaatgttgcaagcatcatacttcaggaatcattccaaacaatgttattaatatgtcaacagcagattgttcaaaatacatgaagatcctaaatacctatcagtattttgtcagaaagccagataggtgtagtactaaagtaaatccaatccaactactggtcaagtttgttcttgacttgtaggaaatcataggttaaatgtacgtgtgtccaaataactagaacatgttcttttggtggtttcattgtaattctcagattaaaaaagaacctttgataatctaatttcttctacctgatgtattgatgttttaatattctcactatttcaaaagataaaaggagcaacttagagcattggtgctttaaactacatacacacttacatctggaatttcttacataacataattcaaatattaaccacgcaggatataaactagtctggataaagtacacttatgcagagctggtgcaaaaccttataacgtacctaagtttttacatatgtcaaaatacatacatacaacagatctacctagcaaaattaaatcaggctacttcaagtcgttgaaaagaaggcagaattatctaattctcagacctcagaggtaattttatgatcttcttaggaatataaaattatttcattcaggattgcaaaagagaataagtcaaactgatagtaacttgcatttaccaaaatattttagcccttctttgttcatctttgaaggttttcactcatctgggcaccattcacaaaagccccaatgagtgcatgcatcagtctaatcctattttcttttgggaagcaaaacttaggctgaagtttttatttagtgagcttagtaagtaatcaatagacatttttgcctgaattaagctggccatatgttggctcatttacttatttatttaactctctcagaaataatctctggaaaaacccattatctatctgcatgatatatttgacattctttgatgctcaggacataagtgaatcactcttcactgtattcttaaagagacaatatcacaaaaaaggaggatgcttggaagggggaagaatttatcaaaagtgaattaaaattatacaaactagaaaaatgccccatagaagtttcaaatcttatttcaataggatgtgtattctatagagttcaaagagttccacacttttctcctaaaaatataatagacttgctatgttttaaaattacatttaagaatactgcttgtgtaagacaatgttttaaatattaaagatttttaattat

SEQ ID NO: 1195 - DNA, 4001 bp, Homo sapiens
gaaatgggtgctccataaatatttgtagaactgaaaagcattgaaatgttggcaagaaaacagacagcattgatagtagtaccagatttggggaacttgggcaaattccttaataaattatcagatgttcctggtgtagtgatttaggcagactctttcccctagggtgttgtccagatagttgggaatttggttgaagctgatctctgaaaagattcagtggtcagaatggaaaatctcaccgcaggacattttaggattaggtactttcacaaagaaatcagttctactgaagcttctggacccagccaatgctgactacaagatactagattcgacagaaaagtaggcaatacaactgtgtctctccctttgttcctccatgggatttaatcataaacttatattgtttgaatatagtttcactaattatgaaatatgatcagtttggacaattacatgaaatgtcaaatagaaatatcccagacctggcatcaatggttataaatcagtgttctagtaatgtttaatgtaccctcaacactttttcagaaaccaaaaacattttattttaatcaaaaagaaaacaaggtatgccaccgatgaaaatgacatacatatttttgtgcttattatttaaagaaaggagaaacatctgaaatctgtttgctaactacagtataatacaaattagcctgcaggcaccgtgtgtgccgtaccctgtctgcttgccagccctgcttagtcccaacgtattaatgagcaagtgcaagtatttgaacaatcagcatttctgcatttgcatgcaaactctcatgctgtgtaattatacacagagctggcactcaaattaattaaagctgatttttctgtgactgcaaactggtcatatcttcagctttgccttcctatgaagtcatcactctacattcaacatgacactctgtccccagcattcttagtagtgctaatgttcgacaattgtgaatccggcaatattttagagagcagctgacaatggctgggtgttcttatgcttttcctctcctatctttcccccttctggagtatacagaacagcttttgaacacttgctttgtaattatctcaaatactaatgcaaacaaattacatatattgtttcagtgggttccctcccctcttttatgacaccacgcacttgattagagcttacaaacaattcatcaaactttaaaaatttgtttatttgatgccaagaaacaattagttgtgacggttttggtcttaattttgaaaaggctttaacaaatgatgttttattttaagagacaaagatcttataattcaaaatcagggagattaggaaagaaacaagcagcaatgactgctagattcgattaagactttttgaatccttatcaaacataatggacttgaaacggagactattatttgccagagagatccgtaaatgttaacttctaggacagaaggctttcctcaactcttccacaataaagccatctcctttggtttctccgttcctctgaaggaaatcttcctgtgacaattcttttgaaaagacatcttcagagcaattaagatatcgttatgattctcttttcataaatttaaatcttgaataaaggtggctactaaaacatcatcatgtagggcctcgggagatgagctgctttgacattttcctctgaaatcacccgttaccacacaagcacagctcaccatcttcctcatttctctgcatttcattagccagaaactgtaccgacagctattgcaggggctggctatctctttttagagcaggcaccagacaattctatccctcaagttcaagatcctgaaatacactggcaagattgccctagtaatctacatttgaaagggaagatggagtagtaggggatttctttatactctgactttaatgatcaaacaaagagatataattgcccttaccttatcagttgtaatgctggatccacatagaacacagttatcaagctctcttcaaattccaactggcaaacaagtgagaaaagagtattgagccttttccagagaggctcctggggaaatcacagtcacaacactattaagatcccaagcctgcccttctgtgtttcgtcaggaatttcctaagcagacaggtgtcatattggcatgaattttgttgccaggtacattttaaaagttgggtgtggctgtgatcaggtagccagttccacctgtctctaaaccctcataacctccattgcttccaatattttgctcaagtacccagtgacttcatgatttacccacgcactgggcccgactaactgaggtgtgggaacagtatcgagttaagcagcaccgtcattgtagtacacaatgctcattgctactggcaaatacctatttgctgaatcaggattgggctgcagtgagcaggactgggctgttctacagctttctgtttgtttcctttttagaatcaccctcttctaattaaatctaaccatttagcaaaaatgggctctttttatgttcctgtcttaaaaatatagctttatttaaacatcgagaatgactgtattttcaccttttctaaagcaactgtttgcaaaacaaaaggcagaggaaaataaaattagagttcctcaaacaatcaaaatgaatatcgctgtgtatgttgtatgttgtacattttgcttttaaattttctaatagcaaaccaaatacatgtgttagttatgatccttttacttcttctaaagagaaaaggataataggagaagctttctgtaaacttattaaggaaaggaaatcatttttgctccctaaggagcagtagacagttaatttattttattgttgattgtggtattaaaaaaaagttggttggctacatatctctttatagtcatgtatgtaaatggaattcaggcattgaagaagcaagaccagattttagaaacatgccaaaattatatgtattatttgtcatgcaagtataacatgatcaaaacaaagtataaaaaatatagggctaaatagatggaaaggtcatgcatttgacttgtaatttcaacccattttgtcaatgtactgtactctagaggtgggattttaattttctcagaccccttgattccttactgacatttaaatcaagcaaactgtgctatttttagattgatttggtctcaaatatcaaagtttcatccaatatcttacccaagcaaaaatttcttacaaaatattgcctttgcttcaacttgcccatcacatctggcacaagattgacatgtaatgagttcaataaatatttgctcagtacatgtttagaggtacatttataactacatatatggaaattataaattatataaatcaactaacctacaaactcttgaaggcttctttcatatataggatgtatacatggtatgcacatacatgtgagcagtaatcattggccaagtaaattaaaattaaataagttgaagataatacattactacctctaagacaatctagtttcattttaaatgagatcttccttatttttgaccaataccttcctgaattttctattctttggtatgagctttttctaaagcttctgaggataaatttaatccttattccacatgaaagttattcaactatttgaaaaatggctatcatttttctctacgtctcctctttcttcagactgaacattccttttaatcattataacatgatatggcttttaatgcctatcaccatattggagagattccagtttgtccatgcctttcctaaatgtggcagtcagaactgaatgcactatttgaaatgtggtctaattatgcaaaatacatgggtactgatgcctgccttgttctgcactctatttctaataatttagaattctgtggaggcaggaaatgcactctgaggaggggctggcatcattattattcttagtgcttgaacttttacaaaactaaaacatctaaaaacatcta

SEQ ID NO: 1196 - DNA, 4001 bp, Homo sapiens
gatggaactcagccattaactgatttctcctagacaaatgtcattgattcagacacaaatgaaatcactataatacaaaactacacggattagccatgcgacaagtggtctgatggattgaacttgaaggcaggtatctcatctttctattccttcaccattttcatcatggaatcttctgctacctacatttttcttgagaaagctctttattatctttcaacaaaaattacctaaaccatgttcccaaaaatctcttgtgaaaagagaaaggataataaatggattcattattttaaatacatagatttttttttcttcttttctatggttcatgaatgcaggggtcacccatcatttctctgaaagttatgcaagtcacatacatctttcttgaaactgaaattatttaaaaaatctatgacacttctacaaaacttccaaatatattgttacctataagaacagtccgacaatgtctcttctcccaagtttcaaggcagtgactattcctcaggacagataagccttacaatcattgaatacagaatctactgtttgcacttcgaagggctaaacctccatatttggctgaaaagatggccagagaaggatatttatgattcagcaacagtcttataattctctatgcaacccagactctaactaaacagaatatagttttgtgcctaaaaccatctgatttccctaaatctatgcaatacaacccttcagtatctgtaatttaataaacctcttgcttaaaaatgtcttcctaatgcaatggagcacagtacacggaatcactgtatctgccaatctttataacactcctatgaattgtttctccctcaaatactgcattttggtaagttagagggtcattacggatacatctgcatttaattgtttatctataatactgctcagcacagtaaatactcagatacaaatcatgtaaaatcagatgatgtcatagatttaaaatattatatatagttatgtatacacacatatataatatgtattttttactgtggaaagaggccagtacattgatgattgatgtttagagatgcagatccaatttcagaagcgtatgtgagcaccaaaataatataataggagaaggatttggggggggggggcaggagcaataaaagcaattaacaatatttgtactatgtaaacaccttcaaccctcatatgccctaggcatagctgtgtgcacacggagttcccgacacgtactcggcaggttgaagacacaaatcccgaaatatgggcatcatggcccctctggggcactagcggacgttgtgcacacaggcactacaggagggccaaggaactaaaaccacactcactcacacaggtatccgttccctgcaggccacccagcagcgacacctctaatggtaatcaccccgggctgacaggtattcacaggcacattcggggagctgctgtgaaatctaggggaagaggggagggtcgggcatttggggacagccgcgcgcgcccggcaggatctctgcgcctccaacactgtccaggacctgaattcgctcaggagatgcccagaggatctgcattatgccaaggcactgggccaactcacctcgacgaaataaaagcagggcaggagggtgacgctgtccttgatcactttgccctttggcctctccttcgccgacatccctgccgcctgcccgggtctgcgtcctcccccgggcgaggtgtgcacagcgcagctgaggcgagctgcctcctccagccccaagcgcccggcgccgctgatgtcacattccccgcggccaccgctggagccagcgcgctgcatgcagcgcccccgccttctccccgcccctttttgcagcaacccagctattccctgagcgggccagtcctcttcctcccctagtctggctcctgctccccgtttttctggcgagagacgacgtccagctccctcctccaagctgttgctgcaatggcttcccctccctgtcaccctccctcagctctctaccgcccttgcgacgctccaaggctgtcggagcttgacgtcaagaatccgaaaaggaggacgcactcctggtttctgcagtagttaggctgaggagctaagccacctagtctcctcctggggagcctcctaggtcactctaggaatgctattaaagaatgctaaggatcagaagccctgctccagcgcgctgacccatagcaagaaaaccaacccctacctccacgaaatgagatcttggatcccatactgaaaagtaggctgaggtaggcattaactgacagcttgttgctacccaggaatgacagctcctacgggggattctctgcctaggagactccttatctcccttccatatcgaagcacccactaacaaacactaccggttgtgtgggaatgatgtgggttccttgcatccagagaggcagatgtgtgaatgcacaggtaatgggcatcctcattgagcccagaggctactgtatgttctaatctcactgtcacacccccagaacagtgtcagtattgcaatcataacagtaaaaagaagtatgtcttcagatattaataatctaaagtccttcatcttgttggcagtatacatggctagtctcaattttgtgattactttggcaaccagaagtatcaagttgatatagaagagagaaagacccagcaaacacgagacatgatattatactaataaagatgacctaattttgtgatcacatgtcccaggccatttccaatatctccaagtctccatttcaagcatgtgatggccaattcccaactcatttatccatttcccttttttagttgctcctccaataggtctttggcagtatgggaccatcctatctaataatatactcatttcactgccaacaccacctcttgcccccactttcttctgccaggcttgggttccaaagtctagcaatataattgcttgtttccgcctcccaatttgccatactcacctgataatatcccggcttagttgaacccaattctctgcccttaccagagcaactgaaagtggctggagaaaaacacacaaccgcatgatgctgtctcacatccaactcatgaccacaaactccaagtaggtcctggagttgcccccacgattctataattttttctgtccagccattttcccattcacaacttctcacttctcaaatctcctcattctcagttcatgacattaactcttatttcacttagaaaatagaagtaatcagaagagaactacatcttcttcctaaactcagtgcttgccctcaccccccaccacacacagcgaccgccatctcttgcctagactggaataacctaacggccttctaactgttctaccagcttttgcatttgccattcccacaacctacaaaccattccctacgcagcagccagaaaggtcctttggaaagtaaacccaattgttttattcccctacccaaaccctccaagagctctcttccacttcaatggaaagtccaaacttcccgtctcttccttaaagccctgcctggccaccttgcctggttctaggacctcattcacatcactttgcacctcaatggtctggccgttccagcctagcctttcactgcctcaggagctttgtacttactgttcctttgtccaagaactctgttccgccaaaattgcatggcttaacccctcatttaattcatatctctgcacaaattttaactcctcagggaagttgtgtttgatgcaccgagtagattcataatctcagacctctgttactctttattcttttatactattttattttccttcatagaatttgtcaccatttgatagtatatcaagtatttctgtgtccttttttatcttgtctgcctcacccactagtgaactctgtaaagtcaagcacattttcattattatgttttctggtaactacaagtgtgcctggcaaagagtaggttgtcag

SEQ ID NO: 1197 - DNA, 4001 bp, Homo sapiens
ctggaaaactgtacatgggaaaccccgatctccagaaagtaaaaagggcccccaaaaatcgacctttttttttttctctgccagcttgtcaaatggagaaaagagaacacaaacatgaaggctggatttggggcttctaacacattttagcaacttattttacatatatatatatatatatatatatatatatatatatatatgtaaaacattatctggggcaaggtctaacacatttcaaaccattatgacagaggcaatttgaagtcaactatcacaggacatgtgataaagttactttaaggttatcaagaaattacttgatttgttcactgatttctatcttatgtgttaggaacttttcattattttacaaattagtaagtcattgctcctaaaattaaaaaaaaagatgaacatccaaacttaatggattcaacagacattcttaacattcaatttacacatttagctactgaaaataaaacttcattcttcctttccccttcattttcttatttcccgtttgttatctgttgagggagagagagagcgcgcatcacaggaagggaacctccaatactttgtcaatattaaaggaaccataaaatatcaggttttctaaagaaacaccaacaattctcctaagaataaatatgtagcatattcacatatgtaaattactataataaaattaatattattatgtgtaatttatccccaataatttcatatgtatatatgtgaggtgtgtgtatacacgtgagtgtatctgtatagtcattctttctctcacacacacatacactcaataaatccaaaaggcatgctctgtgaggttctaagagaaaaggacttaaattgcccagggagcggagcagcctttaaataaatctgaagtgctcttgtaattgaggtacagctcctgcttttcagcaaagcactggtgctgaggcctcttcatttagaaattctcaaattcttttttcagatatttgttccctggtcagcttagtcccattggcactttcacctgaaaaggagggaggtggcgaaatagaaatacgtgccccgactcgggaagtgggagtccctttcacaccccagcaattgatcccctctctcctcgccggcccgcccgccgctgctcttcttccaggcacaatcgaagaggaggcagtgagcgagtcaaggccacagagtggatggaatcaaggttcacccccaaagctcacctcctttgcaacccggatccccactcctcaccacctacggcccctcttcccttccatccccgcccagtcacccaacgctgaagccaccgcggggtgtgggggggtgacgtgtgggaagagctgggggcttccttcgcacccaccctcacgcgccctagaatgtcctctggggaaggggctgcccataacttggaggaacttagaaggcaaaacctactgcgccccaacccttagaggggcctcaaccccgaaggcgaggggcgagatcagggactcggcgacgagggcgagcgcccccgggcttaccacgagcacggggaccccggcggccagcgagtagaggagcacggggggcacggcgctgctgtcctccgggcccgggtagggtttgcggtaggcgctgtcgtggcagaagaagccctgcacgttcacggtgaacgtgtccgtatactcgaagtagtacgccagcatcaccgtccctgccatgatcaccatctggaaatagagcatgctgctggtgagcgccgcgggcagcaggggcatgcacgcctcccgggccgggccgagccgagccgagcgggcggtcgacgcggtgggccccctccccggtccgccgaggcagccaccgggggcgcggcggcggaggcggcgggaggacgaggcacgggaggcgggatggagccgctggaggaagaggcggaggcaggtccgggcttcgaggcgccggcaggctgcagaggaggcggctacccccggacgagccccctctcccctgcccgccccctgcccgccgcaagcgccgcccgccccggcgcggggtcgcgagggagggcggggagtcccgggcgacgggcagcggccgctgcgcccctgcacgagaccattcgagaagcagcggcgctgggtcaatcccccaggctagcccggaggaggcgctgcgtgggcggacggggcggcagccggcgggacagcggcacctgtacccctcacagggcggacgctgtggggctggagaagctcctggcgggggtaaaatcaaaagggggggaggggaggcagtagagatggagcttccagaaactcttccgaggcaccagctgagaggtttaagaaacccgcacaacgcctgggaaaatggtgcgtggacgcgtcttccgagcgcaaagcccaccaaggcgcaaagtgccgatgcggcgcccagagtttcaaccggtgcgttcagcctgcatccctcgaattccttgacccagcccggggctggagcctggcggtggtttctaggcgctgttagaaaaatctcagcgaggtttctttgcctcctctgcagcttcctagggctttgtgtatatatatatgtatatacaaataataatagaaatcatagcccagtagctcccgaagcatcatctcttgtacagcggccccttcctggatccatgcattctcttgctcatcttttcagtctgtctttattagctgcttgtgagaggaggcattgcagattccaggcactgagcggtcccagccaccagggtaggaaaaaggactatttgcctcatctcgttctttattccctgaattccagggaactgcagggattcctcaggggtcgggataaaggagagggagaccaatgctggctcacagcacatgcatacaaaaattcatccgtccatggctatccacgcctatgcgtgggtatgtaactaactatggaactgcatatgtgcaaggagcccgttctgtcatgccatgtgggtccctgctgcaagcttagtcagcagactctcaaggggtctttctttgagcctcaggctgacactcctctactccagtgagcaggtgaggaagcatgaatacaagcaagaggaggaaaatatttttagagccctgccctgctcattaaaacctggaatcaccttagcagggttctagaatgttggttcattgtaataggctgtagcttgatgaattttagaggtgggcctttatcatcaggaaaaacaaaacaaaacactgttggcttaaaaatctgttgaaatttggcaaatgattggtagttttgggatgggatagtaaaggcagtgtgagtttctttaatgtagtatcatacatacctcaccctccgcattgtcgtaaacataattccacaactaattacttagagctacaagatagacaacactaagcaatgtgtataacaagcagttttgggcagtgggagtaagctgttccaaaatggacatgagcagcttatattatgaaaatataactactacaaagatacatgttttaaggcttcattaagaaaatcattctgagactgtaagggtatttaaactggtactctggttctaagtaggaatccccccaaactatctcattcgctgaggaatgcccctgaagtcttgtttatagacatttttccaatttttggaagaatgatgttaatttttaagggcaactcatttcttcagtctaatgaaagtgagcattattttcacaattaagactcattgtattgcgttgttaatgtgtatggagtgcccagcacagtacatgcaacacagcagagtccttgtctgacctgttcactgctgtgtccccagcatgagcactgcactgtattgcacattatggttacttaagaaaaatttgtcgagtaaataaacgaactgactcctctaagtacaatgggaaactgttttcacgtacaaaatttgtcaagggttaaggagtcagaatccggataaacacagcccacat

SEQ ID NO: 1198 - DNA, 4001 bp, Homo sapiens
aaaacaatgcataaatcaatgagttaatgaactcaaaatgacttatgaatgtaatttgtaatttaaaaatctccaaatccccaaaaggattagaaactggataacagagttaagggtacacacacacacacacacacacacacacacacacaaagtaaagttgtttatcttactttttgtatttaaaaatgcaatcctaaaacaaattttctataaattaagctaagtcagaagtcagtaagtattcaggtactaaaataaggctgcagaaattaatcatttaaaaagtaattctactttctcatatgtacacagggcactctctgccccttcccccaaacttccaccacaaaattaaaaaaaagaaaaaagaaaaaaacacacaagtacaccaaaaaatggctctttttatgatttgaaatacaatggttctatcttgacagttcaacagaattttggctcattactattagtgaccatttccttttataatattgcttttaaggactcaccattacttacggtctttattgcaatggagttttctacttgcaattaaagaaaactacctgctgggctaaaatctgtacagaattaaagttgtatgcttataatagtaatagttaacatttaaattgtgctttactattttcctacacgacgtattttacattatttcattctcctaatctttaaaatatttctaagtgctattatttacagactggaaacaggtacctggcctcacaaatgctaactagcaaagttgagattaaccccaggtagcttgattttcttcaaacgaaaatcctcttccatgagttttgcatcttagttcttcattttcttattagagtctgcagaccctattttttcctcatcacttaatctactaaccatgtgagagtacaagtgaaaatattctgctttagctaacattgtttccaattcatttccttgtaatacaatttaaaaaaaaaaacccaaaaactaagttactgatcatctattttctaactttacaagaatatcttccttagaaatactggactctcctcatgccaaatataaatagccaatgaaatggcacttcattacaccctacttcaaaaaggctgttcaaaaggactgactttacacgaggatttctccagtcttacttctctctcttcacataaaactattacttgaaattttaaatattcgatctcctcattctaaagccctttttcttcaatcacacaccctttctgtctcactattaaaatctattttcactgaaggtccagcgccaccagggctgcacttgctaatccgtgctgactgctgcgtttctgcgtgtgcgtgagaatcttccagaaggtttgagtcacataagagcgtcggccatcttggttttcatctcccgtggagatctactcggtccgcctattaaacttgagacgctggggtcccgcggagccgctgtgtcaggctctaaagaggttttacatttcccagaggaaagcgctctatgggctttaagcgccgcggagacaagcgcttcccgcctgggtggcgcactctgcgggctccaactcctctcaactacacagcgtccggaaacgacggccgactccacatccctaagacggacagaggggcagccgtggggaggattcgaaaccggtacttaccaacgcgaggcgttgcctgaattttcctctgcgggtttcaggaagaccctccgtaggttatttgacattttagtggggagaaaggggacacctcatccagaaaagtgggaagcgtggggccgagtttcccaatggggcgagaaccagagcgagggaatgttgggctggagttgcccacagcaactgtgaggggttcgaccttaacggagggcgacagcgggctctcgagagggtgtatccccaggcttcgggacgaggtcgcgcaccgcgcagaaaccggaaggctcctggcggtggactgcgccctcacagccctacgctgagagagaatcggcgtgagtctccgccctcagagcctacgacaactctccagactccgccggagcaggcgcagggggcgtggccttggtggcaccacccccaacagagcctggtcagtgctgaagactgcgtcagtctggctctgccgccccgcccactgaagccgatagctggagcaaagctcggtcgggcgtcttccggggtcgtcacgtccggttgccaaggtgactggctcgctaaagcccaacccttatgatgcaatccaatggcaagtgatatttgctatcttttcttccggatcaaggaacaaatcgcaaaagaaagctctcccgacacctacgcaaaataaaatgtttccggggtcaatcataaattttctgcttctgtgctcgccgctagcgtacgtttttctctcccgtcagtgcattaaaagacatcggcgcgcttttttggagtcatgcacttctggcctgagaaaacttaaaacgcctgcctgtggccagcgattattgttgctgcttctctgaaggtttcccatttactcctctttcctgaagctttgcctctagacttacttaactctttcctccagcctacgttcatcgaaactatcacttattgtcatatagacctttatttctgaagggagatctgggagttgcatcagaacatccattgtattcattaaatcatttattcagctgtccattgcagttgatgctctttatctcacactatttgagaatttttcctcgcagcactattaattagtccctcatcttgacgccattggcaatatactttcctggttttgctcctacctttttgtctacaccttctcaatctcttttgaagatatctcccttttcaagggagttcctttcagcttgatcactgattctcttatgttttcaaactgtcttgtctcgattcgtggttttattcatgctcctggattgaattaccacctccacccattattttaccaccaaacacatgtatgtccttggcactgatttaagtgttttacaaaattaatttactcctaacagctaataaaataattattatatgcagatgaagtaactgatgctcagagagggtgaacaaatttttagaggtcatagagcttgtgagtgatggagccaggctccaaatccaggttgtctggctaaacacaccatgtactactgcattatgctgccgtgtgactcataaatttatgttcccagttctgatttctctgagatctatacctggatgttcaagtgaattgttgagatatcctttttgctattttaaaagccccttcaaatgaaacatgttcaaaaccacacttatgacttgcttctcttccccccactacacgttttcttttatcagtgctatctcagaaagaaagaaagaaataacttccttccattaaagttgcctaaatcccagtgtcatccttaacactttcctttttttattccaaaatatacaattcaccaacttttgcagattttatcttctaaatatcttacaagtctgctttatatttctattactactactgtagagcaagcttacttggtctagtaaagctttaacggataccctcatatccactccttttttatttatttatttttttagagggagtctcactctgtcacccaggctggagtgcagtgggcaatctcagctcactgcaagctccgcctcctgggttcacgccattctcctgcctcagcctcctgagtagctgggactacaggcgcccgccaccacacccagctaattttttgtattttaattagagatggggtttcactgtgttagccaggatggactcgatctcctgacctcctgatctccccgcctcagcctcccaaagtgatgggattacaggcgtgagcctcatatccactcttgtattcctgtaaatgctgcagccagagataccatatggaaacacaaatctgatggtgtcatctcactgcattaaaaaaaaaaatcagt

SEQ ID NO: 1199 - DNA, 4001 bp, Homo sapiens
gcacgatctcggctcactccaacctcgccctcccgggttcaagtgattctcctgcctcagggtgtagctagtattacaggcacgcgccaccacacccagctaactttgcatttttagtagagatggggtttctccatgttggtcaggttggtctcgaactcccaaccttaggtgatcagcccgcctcagcctcccagagtgctgggattacaagcgtgagccaccgcacccggcccctcttcctccccgaccctccctccccccagacggagtctcgctctgttttcaggctggagtgcagtggcgtgatctcagctcactgcaacctccacctcccgggttcaagcgattctcctgcctcagcctcccgagtagctgggactacaggcgcacaccaccacacccagctaatttttttgtatttttagtagagacggggtttcaccatgttggccaggatggtctcgatctcttgacctcgtgatcggcccgcctcggcctcccaaagtgctgggattacaggcgtgagccaccgcgcctggcccattgatgactctttcttaacgactccatcagaaatctgtcagttaataaacgtgctgctcagttagtgacgagaaataactgtatgttagtggttaagaagccccataattgcagcatttaatacctgctgttgttcctaataccaccaggctgactcagactaaggagccctccaagttccactgtctaataaagacctgtcaaagtgaaaactcaacagtggaaactccagaattcattcaaccgttgtacctgctttacctacataaataagcagaactgatttttgggttctttgccacaagaagatgcgctgaaaacaaagcatcaaatggttctgcaaaaaatactcctcctctttacagtgaagtttaaattagatcaagaatgctacttacaaagatattctgaattacaggatctcctgattcatcataatgaacttttcaaccctgttaagtatcaaaactgcagcacaaaatcagccaacatgcgaactaaggactaaagacagttcataggtctttggcgattgtgattataaaatcacgtgcctgaggaccactaagtctgaggtacacaccaaatcatgcagctcaagataagcagaaagcactgttccgtgctcaacccaccccccgccccaccaaccatccaaagtcaatgctggtgcccaggacccgtgagtccttaccattaaatatgcccgccccatttcctccccagttgaggaaatcacagactccttggccccaagaatcttaaccctcgtcttcatacaattctccagaaaccttaacaccggcttttttaggctcccaccacctaaaacaaagttcataaaatcctgacggcagtttccttcagagcttaggctctcgaccacaccctccgaccaggcctgtctccctcctgcctgccccctgtagagggaaggctccccctccttttggtcactctgcctggccgctctactcacaggatagcggtgtcggggggcagcaagcccgacagcgccctccagctcggtgcgggcaatttcctgcgactgcagtccaggagaggaatgcggcaggagcagggcgcggggcagagacctgctccggcggcgggcaacaggaggagagcggtctgggcaatgaagagtaaccgagaaagcactctagatcgacaccccagcaactgctcctccgggacgcctaggggcgccggcgccattttccccctcgacctggacgtggcctagaagagctgcctgctagaaaaggaggatcggcggagaagctcagcagagatgctcggtggctgcactgtctcccgaagccccggctgaaggctgtaccatctaaaggcatgcaaggagcagacgcagcgcgacagcggggtcgacggcctgggacacacggcctgacggacacctctcgtccgcccctccccacggcgcaacgtcctcacgcacaggggccagccaatcggtgccataagatgaggttgcgcccggggcggaactcagtgaggggcggggccagacgcagccgagtatcttgaggagaaggactttaaagcgttcagggattttagctgccgctgtggagttccgccgctgttcttccgctggagggcgcagtagttccttaagagggaatggtgcggcgaatagctgtgagttcaaagtcctgactacaggtatatctactgtagtagaaaaggatcttttatttgctctgggctttaagaaaggggagtggcagaagggctgccttccaagtcgcacacacgaatgggtcacgggagcttctatcctggctttggccagatcggcctccagagccgagctcgagcctcttctgccccctgctgcttggctgtagcccctgctcttctgcaagtaggcggcaactgccatttgcataagatcaatatcactctctgttaatggccttgtaagctcctgaaggcagaggccctgtttcttcatcggtgcacctccaccttttgttctagcttggagttcaataaattttggtgggactgcacctgcatgtctatataaaggaaatacccttctctttggagggatgctgtcaaggtcactctcagaaaagcaagcgagacaagagggtgttgagcagtcaacaaagcaaagactggatgtgaggaaatttatttctcctaaagcagaggctatggaaaacttactaggaacagtgaagtctggccatcttatgctcattcagccatccaaggttgtaaataagactttgagaataatagtgatggttcacttatacgtagtgaacttttcaaagggcgtttgcatctgttatcttgtttgctccttcagtgactgtgacattggcaagacaattattgctgatgatgcaacaagccccaagaggttaaaccaagttactcttgaggcaggggcaggttcgacattaacatgggttttctgacataaattgaaaatctgagcaggttaaaaagaatgataatgcctaggttagggttctcatagaaagtaactgaaagcaatctttcccatggcagattatggagtcataattatgtttttaaaaacctttttctgttttttttttttaatattgaagtatatattggaaacaaggccatatccaatgctacagtccaaaccaaacttttaaagccaagacagcggaatgaaacttactcttagccttcttcccttagctgttgagcagacttaacaaactctggtaagaaatccggcataggcaggaaccttacaaaaaaaaaaaggaggcagtttagttcctttctacattatagtttcagagctttcctatgaaactataccaaatggggccattagaaattaatgctctctaacctgtatcctccgcagtaagtggctcactgcaatctctgcctgccgtattcaagcgattctcctgcctcagcctgcctagtagctgggactacaggtgtgcaccaccatgcccggctaatttttgtatttttagtagagacggggttttgcctttttggccaggctggtctcgaactcctgacctcaggtgatccacccacctcgggctctcaaagtgctgggattacaggcatgagccactgtgactggccacaaatacacgttttttttgttttttttgttttttttgttttttttttgagacaaaatttcattattgttgcccaggctggagtgcaatggcacaatctcggctcaccgcaacctccgcctcctggattcaagcgattctcctgcctcagcctcctgagtagctgggattacagtcatgcgccaccacgcccagctaattttgtagttttagtagagatggggtttctccatgttggtcaggctggtctcgaactcccaaccttaggtgatccgcccgcctcggcctcccagagtgctgggatttcaagcatgagccaccacacccagccgc

SEQ ID NO: 1200 - DNA, 4001 bp, Homo sapiens
gctagcaggaaagcgcggtctgctaaccagggtggctcaaaaaggtcttcactgtgactcggcagaaaagcggcgcccgagccccgcctgcacctaccaccctaaggatatgcgcgggggtgtggccggggcggggccggggcagggcagggcggtgcccccgcgcccagggaacccgaatactacacatccgtctgctccgcgattggccgctccggccacgggggcctatggggtggtcctcgcccagccaatcaggggccctggggagcccattcattcacaaaaactgagcaggaaaaggagcgcagtgcggcccggagctgcgtggaactttgaaacacgcgcgcgtcccgcggggccgaggcaagagtccgagagggccgtgtttcgggaagctagacctttgcagggactgccgcgtccccgcccacagctccggttcagtctccccagcatggtgcgccttcctcctccggcacactgcccggggctccgccccggccccaccaggacacgccagctttcctgcccgctccgggtcgctaagagccacccggccccgagggaggcggtgcccaggcggtttcccggtcgcaggctccggcggcaagtcccgcgcaggtggcagcgcggcggctgcagccacgtgcgcgccaagcatggtgccccccaccgttccttttctctccccgggtctgagctccctggcccgccactcacggcagtcgtcctcgtcgctgtggtctaagcagtcatcgtcctcgtcgcatctccacacagaggggatgcagcgctcgttccggcactggaattggtccttttcgcaatccttggccggccctgcgagggggagggagcgtgagctggatcagcggactcggccccactccccaccatgcagtccgggccacccggaaggacccgctggggaggaggaaagggggcgattatggagaccccgggggcttcaggcacactccatccaaagggagggcacgatggcaggggttccgtggatgtcgggccgctcggtggcacggcgagaccaggcacctacttaaagtgtcacacgacctgggtataccctccattcagacgcactcacccgcacacgcgacccatagtcagagatctgctcagatacagcccatagggagtccccgcgcccgcgcgccaggcgcagtgggagccgcaggcacatcaccctggcaggcagccccctctctctccgccgcgcgcaggggtctgcggaaacgcattgtcaagcggagaagccgcccggctctgctcattaccgccgcggagcgcgcgtgtcaaataaaccccaacggcgagaatcacacagctcatccggaaccatgaatggccgcccctccggcaaagttccccgctggccaagcccccctgcacccctcccccaagatccgctgcccagagggcagagccctcaacaccgaggcccgcgggggcggggggccgagggcaaattcaggaatagccgcttcgcgtggagcctgtccgcccgggagcccccgatagccccgggttctggacccctccccgctccggcctcccggccgcgctttgttggtggctagggcggagcagagccgagtcagagaccggctgcacgcaccttggccgccgagcagcggatcagccgctgccgccgcaagatgctggagctgcagcagcagcagcagcagcagcagcagcagcagcgccagaagccggagagggcccggctcggggaggcccatggcgggcccggggctccggccgccgcgccccgcgctccccgcgccgccgccgccgcgtctcagccctccgagtccttgccgcggcgccggggttgccgctgcccccgccgccgccgccgccgccgctgccgcccgccccggctcctcggctgcatttcaagcaggttcggtgacgctcggcggcggggcgggctcaggctgggcgcgcggccccggccctgggcggccgccgccagcgcgcgcgctccctcccgctgccgcctccgccccacgctccccctgccgccgcctcctcgccctcctccctcctgtctttcgtccactcttctctcagcgggcgctccacggccctgctctgggctcgcctgagtgctgggctctgcagacgcagggatgggccaggcgagcccctcaccacggaggtagcaggtccagaggaagcagcagaggcttcctggaggaggtgacaggcggatcagaggctgagggatgtctaggagtgagcctgggcgggaggggaaatgatgttacaggacgaacaggcctgtgcagtgtgcgcgtggggcgggggagggagggataggggtgagatcccaagatgtggatgagcagggagaagctgggggcgcagggctggacccctgcacctgtcatgggctccggctgggatattataaatccctgtggctggtttggtttccgtgccatgtgcatctgtgcatgttgcacgctcatgtgatcatggggacgtgaggcaggtggattgggcctggtgcacagactattcatcgtcgttaagtacgctccaggcccctagtcagaggggcaaccagggggggcccgcagggaagacaaggaatcctcgctgtgatggagaaagacgaggtctgtggggcgggccgggcgggggggaaggggagggcacggaagggatgccatccctgccgctaggggccgcgcacctaggcccgcgctgtccgcccctgctgtcttctgcaggaaggagaaggcacctcttcctctggagggctgcagcccgcctcacccacactggggagaatgggtgcggagagcgagctgggattcgatttcagcctcagacttgtgagccgggtccaacccacacaaccttctttagagaatgagattccagggcattggccactcaaaacaaccggcctgcaggtgccaagagccagtgttaggtccaccctccctcccctcttgccccttcacctccctcgcggatgggcaggtgctgttagcccttggcctggaaaccaccctgtctcctcagcagcctcctgagccgtagtcccccaaagggcagcccagcggcaatatctgtggccaccccaccagaaagggacttagatccccagagagcccggcacggtgctcctgccatcatcacccctcctgtcccttgttcattcagtcattcagcaagcatttcaggccctgttctgtgccaaccctgtgctgggcctgcgggtaccaaggtgaatcaggcatggtgccagccccggagaggtccctgacctgtggggagacagaccattagcacacagacaacgaaatgcaggcgtcctttcacctatatgtgccaaacgcccttcaaggctcaaggatacagtggaaacagataaggttcctccctgctctcctgcagttatgtcttagttggaagagatacacacaaaagcaggaaaacaaaagattatttcaggtcatcataacttctatggaaaaaacaaaacagacccaggtgagagcaatgggggtaactgtagaggtgatcaggcaaggcctcacagaggaggtgacatttcactgaatggcaagatggatcctgacccatgaagatcaggcggaagggcattcttggcaaagggaatggcaatcaaggtgggccggggcctgatgacagggaaggagtgggtgcctcaggtgaggctggagggagttggcaaggccctgatcaccagggctttgtaggccacagctgggagtttggattctgtgtcaagcacaatggtgcctgggactgtgggataaagatagaagcccgtcttgctgcccaaactgacctatccaactcagtccctcctcctcctccactctgtggtcttaggaaagtcaatcctatctcccagtctcactttcttatctgggaaatggaagagataaggaatttctgaggttcattccaactgtaagattagtatgtgggccgaa

SEQ ID NO: 1201 - DNA, 4001 bp, Homo sapiens
aggtggggactctgcaccctgcaggccagatcgttttaggaatttcagccagcctgggctgaaagtgatggctcaggggcctgcatttgctgaagagtgagcaccccgaagcatggggtgtgtttgatgacagttgggaatgaagatatgaatgcaggagttcagcacacagatgaacagcatccttgatttctccgtaaatggaaaaaaaaatattctgaagctaaatctgcatgtatgtcacctttgatgatgtgcgccttgcagctgtggtcccaattctgctgaaatcttgggagcaaggcaggaggcagagttcagctctgagaggtcactgcgggcactggtgctcacagggtcacaagtgggaggctggaatccacttgggggaaggacacccacctgccacctgcctcctcactctgggtgctcatccctgtggatgctggggtcccctccttctcagctccacccgtgctcccttcctgcgggccttaatggagccccttaactccctccgccctggtgttcccatctgccaagtgagtttttatgcccacgccgccattggaagcgtgcaccaggaaagcaaagggggcaccagccctctacattttggttcagctttttcacatctggctgaaaagccacagagaactacaaatcattactgcatcattggctcttaatgggctgccattattccacatcagaaatcttcctcacccatattagacagaagagcaaactggagctgagaagctgagaggccaggttaggctcgggaagctgctggagagcccttggaactggctgactccccgtgcacggtactgagaatacggccgtttcccatagagtaggctgcattccgcttaccagggacgcataagtaatccacacccgccagtcctaggacccaaagcccagggagatgatcctgggcatcccgagaaggggaaggtccctaacttggtaaagtgagttactggagaaacaggggaagaagtacagcctcagggttcagaaactccaaagaattccagatgcgtccctctccacccacttccccagcagagacccaggaaaagttcaggatcccccaagcctcctcttccaaactcaacccacggctcctcccacccagactggggtctggggtggcctctccctgcccccctccctccctcccccagcctagccggctcggctcacctttgggcagtttggatgcgttctcctggatccaggagaagaggtgggcgaagtcacagtcgcacagccaggggttcccgtccagacgcagggagcgcagcgcgggcagcgcggccagggcggccacgctgaggctgcgcaggttgttgtcgttgagctccagcacctgcagcgactccagggtctcgaaggcgtcctcgtgcacgcccaccaggttgttgttagccaggctaagcttcaccagcctcccggccgagcggaaggcgccggcgcccagctgggtcaagttgttgtagctgaggtcgaggaacacgagcttggccgagccgctgaacgtgccctcctccagcgagcgcagcgagttgttcctgaagtccaggtagaccaggtcgccgtagaagatgaagaagtcctcggggatccgctggatgcggttgccggccaccagcagcttgcgcacgtccagggggaaagggtctggcacgctgggcagcccgcggtcgcggcagtccacggtgtgcgggtcggtgcaggcgcagcccgcggggcacgcgtgcccgggcgcgagcagcagcagaaggctgcagagcccgagcgccgcggcggcgcaggctggggctcgggggcgcatggccggggggcccgcgccggccgcggcgagaaggaagcggctctcggagcgagccctggcgcgggacggcgcggtgaggcactggctgccgggcgcggggagccagagggcggcccgggcggggagggcgtgcgcccgggcgtgcgggggcgatggagcgcggcgcggacggactggggagccgggacagcagggatggagaggggaggggcggggagggaggggcgagggactcaccaaagggtttacccggacaggaaattaacccgctagaaaaatctcttgggagaggcgggagcggcaggggtggccgagtggccgtcgccaaaacgcggccccaccctggcagctgatttccgagatctggcagtaagacgccgcgcgcaccgggcgggctgcactcgacgtctaagttcagctaccaagcccaggagcggtttccctaaggcgtgtcccgggcgtgcgccctgccccctcgcgcccgcctggtgccaaagcacgctccctgcacgccaccctatgtcgccaaagggagtgggacctgggtcactctgactctgctccgggggcaatccctgcaggttctcgggtgccgcgccagggtctgctggtctgaatttgggcggggttccaaggggagagagtgagtgactggtcttccctcttccctcccccacctgcacttgaaccatcttaggctggagggtgagcgaggcaagtggctgccagggcccccgctgtggcctgcagggccagtcagcactttccatgccggccccgaacttctggatggaactggcatccatgcaaggatcagctgctggtctgagaggtccagctgctgaggctctgaggcctggagtcaccaggcctggcttccaagctgtgtggcctcagaccagtacctctgcctctgtggacctggtagctccatttgtgaaatggaaaaaggtaatatatatctcatcagctttgggggaggaccaagaagtcaagaacaaagttcaaaaattatcttttcctctctccccctcaaaaccccaccttggatagcctagggaggcagtcaggaacgtgccaaggctgagatgaaaggacagtgaggaaatgctgatgtcagcctctgacactggcaggaaaattccctcttcaccaccccgatgccaaactcctttctttctgtcccacctcattctagaaacttctatatggggaggggtccccacagagctaccaagagattgtcccgctgttggctattttggtccaaatgccctagaattgacagactcccactagaccaaaataacccagggaacagctgttgggcagcaggctcccagagacccttccctggcccctggccatgctggggattggtggagcctcggattctgaagccataaagctaagccctcggccttcttccaaaggtacaggccgacttgatgcctctgagccatgggatgaaaaaactgatcccctgggatggagccaagggctcaacagatgagcatatttgcaggagccctggggaagaggcgggggagacccagggggaagctttgaggcacctggagtcctgcagcttttcccctacttacattccaggccactaagccagacctccctcagttctccgtctctgtctccactctcccagggtgcccaatttgccattgccatccccaacttcaagggctcagcttccccaccccagtctcatgctcttgaagaggcaggtgtcgggaggagtggtctgaatgctcccagagtggatgaaaatgcttctgcctacataaatgatgtataaattattgaagagtcacacaaagtgcaggcaggtggcagaataaacacatctcccacccttgcaactctgcaaaagcagcctgaaccgaactgttgcactctgccaatctcaggcttggttctgcctgctccctcctgtactgaggggaacctattactggtttgagcccttagcatcatggtttcatgacacccgcatttggttgggctgccatcttgcacgtgcatgcccgcgtgtctgtatgtctgggtgtgtacacaagccctccctgccaagtggtctggttggctggagcactgacctatatgaatcaagaccctgggtctggtcctggccccacca

SEQ ID NO: 1202 - DNA, 4001 bp, Homo sapiens
taaaattagccaggcgtggtggcacatgcctgtaatcccagctacttgggaggctgaggcaggagaatcacttgaacccgggaggcagaggttgcagtgagctgagattgcaccattgcactacagaccagacaacaagaatgaaactctgtctcaaaaacaaacaaaaaaaaggaatggcagtattcatccattgaattataaaaatagctagaattaagggggaaaaaactgtgtgacattggagatatggtgaaaagatgaaatttcttctcccaataagcaaaaagaaaggcagtcagaaattgtgttgaggaagacactgtacaagaaagccacagtccatatatagagccaacaaaatgtggcatgattttttagcatttattgaagtgcaggaaaggagaatctattttaacattcttctttagtacaatgaatatgacattgatactgagaaggaaatgttggctctgcagaaaacagaaattacatagtaaagtctatgtattggtcttaaacttttgaaataaatcaatctataaaaaagtaaggaagacttattgagggttacagaacagaatataaatgccatatatcttgaaaacataaaagtgacagtacttttaacagaatatggaagaaggaaataaggaaaagaagtaaatgataagaacaccgatatccacatcttcgaagtggggaatcaacagatactgtctgtaccttatggaacaagaaataaagattaaagtatttgcttaaagttattaaggtaatcaagagagaagctaaaaatagggatataactctatggcagtgtaagggaacttaatccccacctctcataatgaagctccacagatgtttaaagttgattaaaaatagcatgcaattgtctttgaaaaagaaaaaaaagagagaaatatggagataaccactgaaaactaaattccaaaatggttaaaatgattacttctagggagcaggactggtgatagagaggaatcggatagataatattgcttttcattattaacctcttctaaattattgattttttaaactaatattatgcagtatatatgtgtgtgagacagtcaaagaaagaggagaactatattacagaaaaaagtttaaaatttcaagattgataaataattggcataggcaggaaattgttgagagaatctctaagcaaggcatgccgaatttactcaggaacagaatgcgagatctctttgctgtgaagaaaccttgggatacatacactggtaatccaacttcctgagcatattgcaaccaatttacaatttattgtctctaatttaagaaagtttgaagtttttgctaaatactcgaataaaaatatttttgaattcccaagtatctacatgtatacatgtattttagaagacatgtaaaacaattcatccatttgctaattcatttcctcatttgccattaaatgttgctcatccatcagttttcctataacaaccaacttcccctagggaaacacaagtcaataatgatatatttcttcctccagcacaggactgctctctactctgattagtaccataatagaaaaaaagcacataatgtgacaagtgaggtaagcatagaaaagaattgcagaagaattgtttcttacttctggggaaatctatcttccagaggagcacaattatatgagtgaccatgaacaccccgcaaaaaaacttttaaattctattccagtttgtttggacattccaaccaatacagacacagtataggtatcagcagcaatctatttacatgtgaagaagaaaggaaaaatgtttttgaaaaatacttaccattgtcaaatacttaccacacataaccaaagttagcgactatcagttaagagtagattgcagggggaaatttttttttcagtgtggctccaaatgattaaaatccccagtcagctgtaaccaagtgaaatgtaatgtcagcctagttctaattttagttcatggacaaagctgagaatagaaagaatcacatgaggcttctttgcgacggatcagctgataatgtatgtgagtgcgttctgtggactgcaaaatacgctacagacattataaaactatcaggcataactatttctaagatcttgaaaaataatgcctattcaaagtccttctacttttcacagcttaatcatttcacagaatttcatgcatctattccatccaagcagagaaacttggaatatgttgatgtatgccacaacaaaaattctacccagtaaaccatggatctgcaaatatttgaactaaagacccagatgctttagaaaaagaaaaaataaaggtgtggataagcatgagtaacacagaagccccaaacttctgctgtacctgggcttcaaattaaattacctctcactttgatctcttcagctttcatagataggacttaattccaggttcttaaaaaataaactatatctttttttgaatttataatatatgcacatggaacagaattcaaaagctcaatctccactctctccatcccccaccccttccaccatccctgcctccagtagggaggttctcttcaagttctcttctctgaaggcaaccactattgccagttctttgtgtacctttacaaagatggtctatgaatttacgagcttaaatatgcctatatcccttaaaagcacacatatgtgaaggcatgcacacatacaaaaatggtagcatactatatacattgttctatactgtcttttcttcactcaggatatcttggaaactgtttcatattagtatatttagagcagcgtcattctttttaatggctacatagcagtttagcgtgtaggtggatcataatttatgtagtcatttggacatctcagcaatattaatgctttaaaaatttatgcctgattatctcacagaaattctccaacacttctataatgaattaagttctaagagttgtgggactgctcaagatcacagaaagagtaaagaagccatggccacaattgaaactctaacttccctgtcccgagagtgtacaccacccaacacatacagagtgcttgcatgtgttcataagtaaaaatcaagatctcacacctgtaatcccagcactttgagaggccaagatggtaggatcacttgagcccaggagctggagaccagcctgagcaacagagtgagaccctgtatctaccaaaaaaaaaaaaaaaaaaaaaaaattaaagtagccaggcatggtggccctgtctccataaaaataaaaataaataaaataaaataaaactagccaggtgtagtggtgtgtatatgtagtctcagctacttgggagactgaggtgggaggataccttgagccagggaggtcaagctgtgatggtgccactgcactccagcctgggcaacagagccttccttgtctgaagaaaaaaaaaaaaaaagagagagagagagagagagatccagggagttttgtttcagttaaaaagaacagtatattgttaccttggagaaaattaagatttctttctgcctttggcactacgtacaattaaattttaatttgacagtatttatagagaacccacaaatttcaaggcatctctcttctccttcccttatctaccttttatttcccatccccatggagtgacttacactaaagaaatgcccgggaggatagggaaagtgaatagatgcctgagctatttatgacacaaattagccagaattttggtgactttggagggatgtagaaagtgaatgcaaagagacaggcactatataatgaatatctatctgtcatttacgactgtccaaaatattttgaacaccatccacatttttataatcccccacatcatgaatcctacctttccaaggtagaatttgagggggaaaagaaatcccagcctcccctgctactggaatggggtatgtgactaattttatacactactaaggttccactaa

SEQ ID NO: 1203 - DNA, 4001 bp, Homo sapiens
tgttatgactcctgcataataaatgagaaattagggcacagagtgattaaccatctcaatgttatgtgagcaaagataggaagataagaagcacgaccccgtaacgaactacaaacagttcagaattatagtggtttgcctatcaaagtttcactaacaagtgatgaaactgagggctacatacagccagacagagaaagactttctatattatagtaacagggattccttttttatatataagctacaaataccatgagtttctgccatttatatctttccctcctatgaaatgctgtttattcactcatttaaaatcattttatgtaccaggtaaagtgttaggttctggttatataacaataacctaagcagttctaatccatatcatcacggacctaagagtcagaatccatgtgctctcttaaagtttaacagacgaaaccacctgagtctagtcaataagtacattctagcacaccacttatgatttgagaatactcattcacttacttattgcttccgcaaaatttaataagactctactatgtaccaagcactattttcagtgatagaaatacaacaaagcacaaaacaaagctcactgacttcatgatattaaccttttggttggagggcagagaaaacaaaaaacataaatgatataaattctgatagtgataaatgctgttaaaaaattaaacaggtaagagaacagaatgttagcatgataggtatgcaagtttagagaaaaatgtttcaggttttggggaaaccaagtagatatatatatatgcacaactgtagtttgaaaatgagtatgttcccattgatcaaaaactcttttaggtggagtaaggattctgtgtcttttcattcattcagaagcatttgcttgcctaatctactttatacatgtcacaataagaaagcaatcattagaaggaaaatggaaggttttaatcagtcttaaaacctaaatataaatgaagaaaaacattacaggaaaaatgctctatttctccatctctccattcccctccctctctctcttacacacacacacacacacacacacacacgacaatcagaagagcatctggccattcattcatggtacccagatttgtgcttcttggtctttaacaggtttctcaggatgtccccacattcaaacactctgtgtggcatctatcctgatcttcaacttagaaaatatactcattattccttgtaagtagaactctgcacagctgcatacagaagagcgtctcggcagggaacagtgcaggttcacaaaggggccgataaaacatataattttagctttggtaattgcccttgaagattacaataagaggaggaaaataagggccaaagaaacaaaagatttgcccgtgatttgatagctggtttcgtcacatattatgttgcttatcccacagaatgtgggaatcccagaaagcgccccgtttaaatttagaccgtatttttagcagggtccctttaacagagattgcgggaacctgggaaggaactgaactgggctaaccaaaccggtcgaaatgagcacagggattagattagagcacagaaattctggctagcagtctgagaaagggggccaaagccagcccagagaaaagggaggttgcctgggccaaaggctttctgacaggagacacaatagggtcgtacctctgggtcttaccttcactgaggtttctacccgacaggtttaactggccgctcttcctcgctgccttcaacagcccttggggtaccgaggtaccgcagtctcttccacctgctttgaaaccagcgcggagatcctgccccgctatccgcttcaggcgcgacatgttcaaagtcctaggtccagaagctgcagccccacccgtgacgcttaaaggtggcgccgttgggatgccccgctcctttcgtgagcgcgcgctctgggcgctgggctcgcggcctcgcgctgggccttcactctctgcggcgcagtccagatgtcgtcagcaccagcgcctgggctggaggacagagaagccttttccgttgccggtgccggcctagcgtcctggaattacttcaatcaagtaagtgcgtttaacgggcttaagaggggctttcgggtttattgtttgcactgttactgcgactccaaccttctcctctgtgcttccaccgtggcgagggtgtggggaaagagaaccctctcttctcccctctcctagtctgaacgtgggccttgactaaaacttgagatctgggcgcggtcggcagcgtttctggaccccagcctgtgtttgtcgcttgtggtggtggcgccagacctctggcgtacggagtaaaagaaattttctgttcttaaggcttgtactctgacaccattctcgttgtattgagggtatatagcttacccagcaaaggaggtaatgtgaaatggaaggactggcaacatagaagacaaaaacaaaaatccttaaaatttaataaatgttctgtgtatcagacagtttagggagacaagtagtggtacatgctttagtgaagctcagacagcttggatttttgagccctaaaaagcaagttcaaatctcagctgcttctttactttagaaactgttaactttaggcagtttactcaaccgcttttaaagctcattcctttttttcattactttggggataattcctaccgcataaggtttttgaaataagtgaagataaaaactagaatcttgagctctcggtgagtccagaataatagcaaatgaaaattttgttcaatgtaagtcggtgtttcctaggaaattaaaattttcatctgaaatgtacaacttcttgattcaacaagtaattattaagattaatcctgcctagtatgtgtactatcctgggtgctagacttttcttttgcctgaaatgattttgttttaaaagcatatgccagggaataccattctaacccccatcaagtctactgaggattggtagaatagttgaaagctaggatgaaggccctttgatcaattcttcatcacgcacttttacctgagtccaggttattgctacctgtaaaattcggtttttaactctaccctttttgttcttatttctgtggagtcctttacactaatatcgaacaagagaaagttaccaatagttgttaccctactaaaaaagcaaagagtggatttttgtcttttttttttttttttttttgagacaaagtctggtctgtcgcctaggctggaatgcagtggcgtgatcccggctcactgcaacctccgcctcccaggttcaagtgattctcctgcctcagcctctccagtagctgggattatagccgcgcaccaccacacctggctaatttttatattttttagtagagacggagtttcgccatgttggtcaggctggtctcgaactcccagcctcaagcgatccgcccagttcggcctcccaaagtgctgggattacaggtgtcagtcgccgtgcccagcctgagttttaaaggaaaacgaccgtagcagcttttgcaacgttattaatgaggtccctggtcagcttgtcttcacagtaatggtaatagctgccttattgggcccataccaggctcagtgctaataatacctctgtttgctatttcttatttaacacagtgactaattttgcagataaggaaattgaggctaaaaggggtgaagaaacttacccaacctcacaagtttctctgaatagcacgaccaggaatttgaacctagatctgtctccaaaacctttctttttaatcaccatgacttccctagtggcttttcataattcccaacttgcttttttttttaatcctgtaatcattgtaagagacacttcagttgtttttaagaagatttctttattaaagaaccacctttttctctttatagtaacaacctacctttggggaagaaacaacccacctttggagaattgaattgctcgagtacaaaatt

SEQ ID NO: 1204 - DNA, 4001 bp, Homo sapiens
ccccatgccctaggacttttctgagctccctgctcagctctacggagcctttcctcctgttccccatgggtcggcctgccccttgtcttctcagccgctggctggcctggggcctccactgtcccctccgcacaccggccgacttctaaaagcctcttccaccaccactatgcaggacactcaggcctcatggtactgggctccactcccacagccaagggcctccccgaccaccctccagcttatcccggagcttcagtccccccaaactccagggccttttccccacaccccctcctcatggcataactcaaactccgcgccctgcaacctcgagtcctcaaagtcctcactcctgtcctgaccagggccttcctcctgcaaagacgccacggccacccgcaaggcctcctggtggaacctcccccgcgccgcttccaggcccggggcctgctctcctgcccccctccccagcaggcctcggccgggcctgccacctcttcgcccaactccaaccccggcctcccgaccccaccctcacagagccagcagcctctcaggcccgaggcctcccctgtccccagcgcggctaggcctgcttggcagagcctcactttcccctctttcacttgccccacgtcggacccaagtttccctcgtcagcggccaggccgcggccagcggtccccaacccacagccccgcctcccagcccaactggccggttcgccctccccggccgttcatcccggcgccccaggccgccctccatccaggcccggccctttggtcccggccgccttcaggcctggggcccccgttcactcccattcagcccaaggcctcttggcggcgccgcgccccctgccacggcagcccggcagtccgggatccccgggccgtcgccccgcttggggcctccttggcccttcccgcctgtccgtcattcgagcctccctcgcttgtttaagccgctccgggcccccctccactcgctctccggtccctcctcgccgctcgagccgatccgagtggcctccggcgctccctgtcctgcgggtcgcacggtcgctcggtcgcttagtcagtttggcacccgagaccccggttgtcggttcgctcccgtcagccctgggccgtcagacaggccgcggcgccccgaccctttcgttcggcctctccccctgccccattccctcgctctccaatctgctgtcctcccctccgcccatcggcttggcctccggaatctcgacccccgtggcgtgtcaggcagatgctggagccccggggccatcagtcaggttcggtggccccgggcctggcctggccttgccttaggccgggcctcctaacctcggcccctgccctagggcagccgggccatcgctgcccaccggttcgacatccgagactctcctgcccggcccagccgagtgtcagttcgcgcggcccacagccgcaatccagcctcagtcgcccgggcccagcctgcttcgctccagaccgggcctcctggcctcgccccccgcgcccccgagccaggccgcggtgcgggtcagcctgcccatttaggtctccgtctttactctgtccagccctgtcagtcacaaaattcattctccgatcctacgagctggctttcagcgccccaggctgggccttgccccgggcctcccggcctcgccccccgcgccccccggccgctgggccgccccttgctcttagccagaggtagcccctcaccccgcgacttaccccacaccccgctctccagaacccccatatgggcgctcaccgcccgcccgcacagctcgaacagggcggggggagcgttggggcccgaggccgagctcttcgctggcgccgcctcccgggacgtggcctccatggtcgttgccgccgctacctcacagaaccagcaactccgggcgcgccaggcctcgggcgccgccatcttggggaggtgcgcgagcccgagagtgtcgcccgcggaccgccatcttgaaaaggtcagcagttaggacggctccataagcgatatggggaagaatgtgaattattctaaagaaatttcgaagaaattagcacactttccaagtctcttaggagctactattttagataaactcctagatcaattatacttgggtgtggtatgactaaggggatgtttcttagcaaagcctcctcgggtgcaaacatcagctacccctaacctctgcctgcggctggtagtacatgccaatctgagcatgtgttcgcgaccacgatgagtgtgccgcacttccggccagatcgccggatttccgctgagtgacccttacaagtccttcttgatcctgaactgggttaggtgccgctgttgctgctcgtgttgaatctagaaccgtagccagacatgggactggaggacgagcaaaagatgcttaccgaatccggagatcctgaggaggtaaggcaaggcgatccactcggccctcttctctgccctgaagcccaggacctagcccgccaaaacacgcacggggccctcttagcccccagtttaccctctagggtttgcatagtcgggagctctagttccctcgacctttccccagaattcgtccggtgactttggacagatagatgactagtttttctctgggcctcggcttctgcattctgtgaatgtagtgaaggtttgagagcgaaaatgttttgtggactaaagtcttgtaaaaatatgacctatgtttgcagtcagtcagatgttctgaagcccgcgtttcacagatttggggagcaaacagaccgccttgccccagctcaggttaggaatccctaccacatcttctatggaggttcggaagacctggccttgtgttccttttctttgaggaaggtgtgtgtctttggggacaatgaaagaatgtacgatgtgattctgtgatggaagagggagctctttcccagagaaagagtgctgctataattattgactgcttgctattccaagtgctttatatgcactaattaattttttttttttttttgagatggaatctcgctctgtcgcccaggctggagtgcagtggcgtggtctcggctcgctgcaacctccgcctcctgggttcaagcgattctcctgcctcagcctcccaggtagctgggactacaggtgtccgccaccacgcctggctaatttttgtgtttttagtagcgacgggggtttcactctgttggccaggctgatctcgaactcctgacctagtgatccgcccaccccggcctcccaaagtcctgggattacaggcgtgagccaccgcgcccggccctaattcatttcatctacacactattcctatgaagtaagtgttgggtactattagtgccatttttacagatgaggaaacaagcatagaggttaaatatcttttctaaggtcatgcagctaccaaattggtgcagccaggaattgcggccaagcagcgcggttctagaaccaggactcttatcaattttgcgacacagctactagttgtttctaatctcatttcctgtccgtctgttctctggtcacttgggggcagccattctgggctgtgggttcagaataattggagacttatttatcccttaatttttctagtcttattatttctaaaaagaaatagaacctgaggccgggcgcagtggctcacgcctgtaatcccaacactttaggaggacggccgaggcagacaggtagcatgagtccaggagttggaccagcctgggcaacgtggcgaaaccccgtctctacaaaaaatataaaaattagccgggcatggtggtgaacgcctgtggtctcaactgctcgggagtttgagcccaggaagtccaggctgcagtgagccgtgatcgtgtcactgcactccagccgaggcaacccgagtgagaccctgtctcaaaaaaaaaaaaaaaaaaaaaaactaaagaaagaaatggagcctgcctcagaaaggtcagcaagatcca

SEQ ID NO: 1205 - DNA, 4001 bp, Homo sapiens
ccaagcaaaaagcatgactatgccagtcaggtggactgggattgtcagggagcccacagggtaaaattgtgagctgaatctacggctaatttgaagagaagaagaagaaaatatctaacttcagtagataaagtaagataaaaatcccctaagaataacaagttgtagcagtaactatgatgtttaatgatactggatgatggctaccatttattaagcacctaccagttgccaagcactgtgttaggtactatataaaatgatctcatgtaatctttaatgatcctatgaggtcagtattgccttttaatagacaaagagacccacggaaataaaataacttactctagaacagagctaataagtggcagagccagaattcaatctcagggccgcattactccaaagctcaagctctttccttggcatgatgctgtttctcaagactaaaaatatgacatcaaccttaaggataaaaaaaatgtgaaaaattaatctcacccacctgttcgatccctctagtattcactggatgaagcctggggggagggggtggggataagattaaaaaacaaaagcaaacaaaaaaacagtgcacatctggggaaagagctagtgggaacacagccaggacatttacaacgaggcctcccttcttccctcagccaggcccaaaatgagctacatccatataccaggagaacatctgccaacccatggccttcatcccaaggctgcagacacttttggtttatctgaaaatgcagtattcttgggaaaatttctaacataaaaacctaaacagaaactaaactatgggtagttctaaaccaccaataaccaacaatccaccttcattgttctgtgtgtccccattcttcaattttcaactttcctcactacttttttcctataatatgcactttcctacctgccttctcacccataccctttcaggctccctacttccctccaagaacatgccagtctctcccacaacgtgacactcttaccaattctagcgcttctcacaccaaaaatcctaaccccactcccttcgcccaccccagctctcctgcccctttcaaccttcagacccttccagcccttccgagcccctggtgaaaggtggcttgctgtcccacagacccaaccttccaacctccgatctcccaaccttcacctgcctccccttccttccccacactcctccaccccccactcctctccttcaccatctattcttcccttcttcccactctaggggcttccctctcctaggaccccaatctctccatccctttccttgccttctgttctcaatcttcaagaccctcttccttcacgcctcactatccccaacttggcattccacacccccaacttttcttccctgcccccaagaccccaccctctctattcctatcctatctcgtttcctccttgaacccctaaaatcccattcccttcccccttccttcttcccgctctctccccaagcatgcctctccccgagtccacccaggctaatcctgctccctgtcccacccaggccccgaaccccaattctcacacgtccccatagcctgcccccgcacccctacgccacccttaaacccatcgcccccaccagtatacctcatcctcccctcaacccgcgccccgccgtccctctggggcgtcccctcccccaccccgcccctccctaacaccccgcccccgctcccacacgcaacccggggccccgcgagcggcccggcccgcggccgccacctacctgtgcccctgcccggggcagcgagcggcagctcctcggtgacggctccctcctcccgcggcccggctgacggggaagggctcagcaccccgggcacaaagctaggaagggtgggacacagtgaaggtgggaggagggagggggctgggggcaaccaggcgccgtgggaccgcgggaccggcgggggcgggagcaaggctgggccggggaggcgcgcgtgcgcgggccccggcacgaaggcggggccggacctggaggcggggccaggcccagggcaggcgacccgagggccgagggtttggaactcgcagaggtgggccctgcgcgtgcgtgctcgcgggagggtgggtcccctgggtcctgcgggccccggggatagagctgagctgggggagggtaggcagcgcgcgccccgggactggcctggggaaaggcgcacaggagtggtttcgcatcttggcccgcgaagtaatgggagccggagagggcggggccgattgtgggcggggcctgtgggaggcgtggcgctaagagctaggggtaggaggggccgaggccgccgcgagggggcggggctgaggcggggtggggcctctgggaggcgtggcgcgaaaagctcggggtaggagcgagcgcgcccgggaactcggtggagcgagcgcgcccgggaactcggtggaggccgcggtggcggggtggggcggggctgagggcagggcggggcctgtgggagtcgtggcgcaaagagctcggggtaggagcgcgcgcccggaaactcagcggtggccgcggcgaaggggcggggctgagggtgggacggggcttgtgggaggcgtggcgcgaagatttcagagttggagcgcgcgcgaccccggactccacggaggccgcggcgagcaggcggagctgcgggtcgggacgctctgcgtggggcggggcgcaagggaggtttcgagcccggaaggtccggcgcccagagctaacgggagtcccaggtgagcgggtagcggggtaggcaggctggcaccagagggtatgggggcctggccgggcaaggcagaaggacggggatgttggtgggaagggagcaacagtggaggggtggtgaagagacgcgcggcgggaggcgtggaagggccgcggcgggaggtctgacgcgggcccgccttttcctctagaccctggaagcgccactaccagcccacgaaactctttgaggccagaaatagcgtcttgaccccccaaaagggaaaaccagttgtaaatcgaaattaattagtctaccaaaatgtaatgtaagctgtcagccgcaacgtaacacatctagctataaattgtacctaaggtcgggggcatttatatattctttacataatttggggcgggcctccacaagtctgaggctttagggccttgaactgaggaggagggtttgggatggaggtgagaaggtggtgccagggctggtttgccttggaagccgtggccctggcccctcggagacagaagccttaggccgggtccgtgttttctaaagtacaccacgttcccaatggatgatgcttgaagaaagagcgtgaggagtccagctgtagcaccagaaccaagggagctggtcagggagaaggtcctctaaggacttgacctgaagaggtttggggaaagaaggaccacaaagggcatgtgagctagcgatgaaagggtgaactggggacgaaaccagtggcactggtttagaagacaggataaggcatcagggaataccagggtcagggattgtaaaaaatggaaaggatagcaccccagagtgtaccacctttggtaaactgcggccctgaggaaattgccttgctctaaaggggtgggggattagactacctcccaaacctgcactttgttttgttttttggagacataatcgctcgtcgcccacgctggagtgcagtggcgcggtctcgcctcactgagcctccgcttcctgggttcaggagcttctcctgcctcagcctccggagtagctgggattacaggcacctgccaccacacccagctaatttttatatttttagtagagacgaggtttcaccatgttggtcaggctggtcttgaaccgctggcctcaagtgatccgcctgcctgggcctcccaaagtgctgggattacaggcgcctgccaccaggtccggctaatttttgaatttttagtagagagggttttggggttt

SEQ ID NO: 1206 - DNA, 4001 bp, Homo sapiens
cccagctaatttttgtatttttgtagagatggggtttcaccatgttggccaggctggtggtgtgacctcaagcgatctgcccgcctcagcttcccaaagtgctgggattacaggtgtgagccaccgcgcccggccagggtttgtctatatatccttatatagatatgttacttgtaaaatgagttgcaatgtcttgaggaattgctacagcaaataaatagataagctgctaaagtgtatacgtattttattaagaaatgtccacataggccaggcgcggtggctcacacctgtaatcctagcactttggaaggccgagacaggcggatcacatgaggtcaggagttcgagaccagcctgaccaacacagtgaaacccgtctctactaaaaacacaaaagttagccgggcgtggtggtgtgcgcctgtaagcccagctactcaggaggctgaggcagaagaaccgcttgaacccgggaggcggaggttgaagtgagccgagatcgcgccactgcactccagcctgggtgacaggaccagactacatctcaaaaaaaaaaaaaaaaaaaagaaatgtctgcataaattcaaagacgaaaaatgggggaagaaatgcaggactgccttaaggatgaaaccaaaagagaagatggagagaacatctggctgggtttaggtcgtggttctgccatgtggcttccctactttcttttaggcaacagattcaatgggcacctgttataggccaagcattatcgcggggcctggggatccaagattaattagtaaacagacgctggacaatatagtctggagaaaaacccaagttacctgctgcttactttgggcaggccctttggctttctgtaaaacaggaataaccacccctaccttggaaagctgctattaggatgaagtgaaatataatcttcaagatcacagcatgtggcattatgcaaaatccagggtgcccccttcaccaccagactcactctcaagtcacttcacaagtactagatacaaaaaagacaggtctctacgctcgatctacaggagaagccaggtttgctaacaattacaaaatagcgtaccacgtgtaaaagtccagttaacagaatgcgggggagttcagaggccacctagtatgttggtgtggccaggagaagggggagttggaaggcggcatctgcttcccaggggtgatgccccccgcagctggctcctttcagccttgtaggaattccctgggcccagtgccccagggggcgtcactaggaactgctcggccccgagaggggttccttctccagggctactccaaggccccatcccgccccgcccgggcagcccccgctgaccttgagcgaggccaggtgggcgatgtcggggctgagttctcggaggcagttgtcagcagccgccagttcactgagcaggggcagcgcgccggggcgaaagagctcggcgggaaaggagtctaggcaattgccggtgaggttgaggctctgcaggcgcggggcgcagcgcgccaggtcggctggcagctcgcgcagccggttgccgctgaggttgaggctctgcagctgcggaaggcccggcggctcggcggggcccaggccttggcccggcggcagcgcctccagcgcgttgcccgacaggtcgagcacccgaagggcaggcagcggcccgagctcggggctcaggccgggccccagcgcgttgcgccgcagcacgaggctgtgcagctgcggcaggccctgcgccaggccaggccccggcgcgcgcaagctcccgcagccgctcacttccaagtagtgcagcagcggcagggtgaaaagccgcggcggcagctgcccacccgccgcccgcactcgctcctccagcccgggccccgtcagcagcagctcccgccgccgctcgcgctcagccagctccagctccggccaagactctgacaccgctgccgccgccatggcgcctcagctgctggcaggcacccacccaccagggtgcttccggggcagcgcgcgccacttccgacctgtgccggaaaagcccatagagaagccacctggctgctagagtgccgccgcgcgtgccatagaggagagtggcctctcctgcgtagagccggggaggggctggagagcggctcgctctctccgcgggtaggggtgagggtgggggttatgaacccaaaaatatctgagacaggactcaatgaaatgtaaaaagtttattttgccaaggttaaggacacgccagtgtcacaaccctaggagatcgtgacgatggtgcccagggaagttgggatgcagcttggttttgtacattttggggagacgtgagacatcaatcaacacgtgcgagtgtaccttggttcagcccagaaaggctggacaattccaggagagggctttcaggtcacaggtagagaagagaccggagggtgcattcttttgagtctttgttcagcctttcgctgactgcacaatttattatgcatgtgagacgcgggtagaggaatagtcgcttatgctttagtctggcttactgaatcttcatttctacgtaaacagtagagcaaaggaagcgatcagatatgcatttgtctaggtgagcagagggatggctttgagttcagtcctttgtctcgcacctgtgaagggaagctatcaatttgcattgccagggtgaaattcaacagaactgttttagggtaaagatcttgaggcccacagagaatttctttgtgggcaaattgtgagggaggtgtgtagctttaaaaatatgtatttgtaactatcttatttaggaataagacgggaggccgatttgcccgaagcagttcccagcttgactttttcctttgacttagtgattgtggggttttgagatttattttcctttcacagggtggggtgcgggcggatggaggagccagagtctgtgctctactgtgccccgaccggcttgttttggaattcctgcacttttgagtggtgtaaaccaaaaccaaaattcttttttttttcttgagacggagtctcgctctgtcacccaggctggagtgcagtgatgctatcttggttcactgcaacctccgcctcctgggttcaagcaattctcctgcctcagcctcccgctggaactacaggtgcatgccaccgtggccggttaatttttatattaaccgtgttaatataatttttatattaaccggttttcgccatgttggccaggctggtctcgaacacctgacctcaggtgatctgctcgcctcagccccccaaagtgctgggctcacaggcacaagccaccgcacccagcccccaaattcttatttatttatttatttatttattgagacagagtcttgctctgttacccaggctggagtgcagtggttccagctcggctcattgcagcctcaacttccctggctccagtgatcctcccacctcagcccctgagtagctggtaccacaggcatgtgccaccacgcctggctaatttttgtattttttgtagagctggggttttgccatgttgcctaggctggtctcaaacccatgaactcaagcaatccacctgcctcaacctcccaaattgctaggattacaggtgtgagtcaccaaacctggccaaaaaataaaattctagaggctgggcacggtggctcatgcctgtaatcccagcactttggaaggccgaggcgggcggatcaccaggtcaggagatcgagaccatcctggtgaacacggtgaaaccccgtctctactaaaaatacaaaaaaaattagccgggcttggtggcaggcgcctgtagtcccagctactcgggaggctgaggcaggagaatggcaagaacccagagggcggagcttgcagtgagcggagattgcgccactgcactccagcctgggcgacagagtgagactccgtctcaaaataaataaataaaaataaaataaaattctaagccccccaaccatctgagtgg

SEQ ID NO: 1207 - DNA, 4001 bp, Homo sapiens
caatgtcttattctcagtgcactcgctctcagtgcctccttaaattttgcctcctaaaagccctgcttgcctcatcccagtccagactctgccaggaggactttttgagacacacccattgggaagccaggagggcacgttttttacttactgtcaccacttgattctctctcccccagttctccttgaagtctgtcattctggccaggattatttctagcatattgccacctgggcagtacttcatggtggaagtttcagcaggagttttatgaagctgcgtctatgaaaacgttttcaaaggcaaacacccagggaagacagaaactacatggttttgacaggatttgattttctacccagagtccaattttgccggattacatcagtggctccagactttctgtgaggagttatttctcatttttctgaagctctgactttcctgggtaaaaatgctattattggtggagagaagaattggagggtaaggatgagacagtaaagtccctaagataaagagggaatgaagcacaggggccgtggcaggccgggtgaggacagcgggtagagtggtggcaaggagcttggaaatctcccaggtaagagctgagcatctatctacctgtaagactagaatctctctgcttgacacagtgagcactggaccctttctccattgattcatgccattctctccttccataggaggccagcatcttcaaaacaaagcagctatcaaaagccctttcttccttcttccctccctctctcactgtctgggtagctcacgtgcccctccttccatctttatgttaaactttcctttctatatatcataatcctatatgaatgactgaatttactttttgatcctggaaaaattcagttgctgaattaaacagattaaaacagtttaccaacagaatacagtgtccctatattaccttgtcactttgcaattagagtacttcatcatttctacacacatcatatatttgatgcaactctgtgccttaggtaatattattgtccccactttatggattagaaaactgaggctcagagaaatggtgacattttcaagggtagccaactggtaagtgctgagtttgggaccagaactcagctctttgaattcctatttcagaactttttcttactgctactccagtcaacccaagggtgggccctgcagagtaataagaatgcattcaatcagcttcacccaactttttctcccattctgaccatcttttgagttcaccttttctggagccacttcaatcacatcctcttccccacacccaatcaagccctcacctgaggggtccatatggaacactattaagaagatggcgaagtccaggaaagagcagttgcacttccaggggtttccactcagaaacagggtctccagagtagtgaggtggtataaggcagcactgtccagggtctgcaagccggtatttctgaggtccaggtacctcaaagaggtggtgttggcaaaggtgaacttgtgaagcgataacaggtgagggttgttggcaatgttcagctgcaccaggttgctgagcaccgagaaagtgaatggggagatcgaggttaggttgttggagctgaggtcaaggtagatgagtttgaagaccccgatgaaggtataatccatcacctctcgaatccggttgttctgacagtccaaataaacaaggtcactgaggagtcctagatgcattgctggcaaactagtgattctgttctcgttcaggaacagcctccgggtgttcaggggtatgtcaagggggtattcggttaactgcttccctgtgcagattacttcttgggcttgacacagacaattatttggacactttgaccctgataccagccccattccaaaggaaaagagtaaccacccagggccagggcctgaagcaagggacatagtaagaagccacaaccaccctcctttcaccttcctgcgggctctgtcctctgatccgaaggctgccggtgggggggtggggcgggggaggggctctggaaagaactgtaacactttagctttgtgcaaagcaattttccattacaggagaactgaacagaaattgaaacgcgaggctcaatgccctgccgcccagcttggtggctctgtcgctcgctcccagactgctgctggaagcttgcccacttggcagctttgaaaggtctcaccctttccctgcgtttgcaagtgaaggggagccaggggagagccacatgacaatgaggttgccagttgacacctttgtgatgtcagcagcctcaggagactgcctggctgagggaaagagattcctcacctctccttctgggtggtgtgagggtgttttatgtgtcttggtaagccagctggaactccctgggggagttggggcctcatgggtaggggcctgcagcatgtgtgtgttggagaccaggctgggttcagtgtgtggatgtgtatagtatctgtacccgctccccatggagctgtagtagattaggtgacattggaccccctaatctgcaggccatagagggaacatgggacatctccaggccaactccttttcttagtgatgagcagtgacttgcttgaggtcagttctcagtgtgggtcttttcttggatattgatttggatgggtgccagtttttcagtgttgccagaagaagatgggaaagggggtgtttcttttgaaatgaggcaaggggaattcctctgataaagtggtactcttttcagactttattcctaggatgtatacatctctgtctgcattttgaatatatatatatgtgtatttttaaaaagtttttgaataagtgtaagctactccttctaacacaaaacccaaatgtatatataaaaaatctgagtgcaacaatagaagtatttttttaccactcgtattctcctaggacttttaaaatagtgagtgcctctctagtacttctagtgtgagtttatattcattaattacttgtcaggtgattagtcttttggagcgagggatagaaaacctggaagctgaagagttgggatgtatcacacaccccgtggaggaaggcatatcaggcagaaataagataaaacatctgaggagttgaaacttttatttttgggaaaattggatttcattttttaaaaacattcatatatactgagttgtgaatattagtaacatattgaaacctaagcacagtgcctggcacctggtatgtaataaatgtatagtgaatgaacaatgtgagaatgtttctgatggtttgcttccttctcttgcttctttgccaagagagaaattaataaagtcagatggatttgtggctagttagctaatgcttgattgtttacttactcagcattccttgggtgactggctgtgaattaatatgatgacttaggcgtgtttaccaaattgaaagtgaccttatttaagtagacatttcaaatacttaaagtaatgaccccaatgatagctgtactaattgaagcatgacttaattgatagggcagacaccctttcctcataattaaaacaaattctattaaaatataagttcctttctagatcttatgtgattgccgaggagagaaatctagcacatgaagtctatagaaaagaattaatttccaaagtgactgctctgggagctgtggcgagggtgtgttttgctggtggagtgtggcagggatactttgtttggaagggctgtgtttgttgtctgcttcctttccatgagaaatgatcactgattcactcgccaaagctcatggagtgattttgctgacgtgtcaccttttcttttatgccattctccctctttctgacttcttcccctcagacggccccatctccaggttgccctacttcatttccagcctcattatccatactagctttctcaagatagtagtctcaggattaggcctacctgtttggccgtatggttacaagtgctctgcttagaaaagcc

SEQ ID NO: 1208 - DNA, 4001 bp, Homo sapiens
accagattggcctagggttgctagatttagcaaataaaaatacaggatgataagttaaatttgaacatcatgtaaataaaaaaaatttttttagtgtaaatgtatcccatacaaaatttgggacataattttacaaaaatgttgtctgtttctgaatttaaaagtaaaatataactgggtgtcctctatttctttctggcaatcctagattggcctgacctagaaacccgccaccccccatgcctattttcctaaattagaatgggttaccacatttatgacttatgcaaacttatatacttttgctaatcaagtcctgtggcatatgaagttctctgcattgttctctcagtcagggacaacagagactcagtatctattatgtgaaattcatcatgcctgcccatgtaccaggaaacagagatgaatacggtgccatctttgcccttaagtagttcctcatctggtacaacagacagtctatttcactccaggctttagttgatgtgcaatcctagtgtgaatccatgtagtcaataatattttttataggcctgacctacctctaaaaaatacactatacctgtgtatagtgtcatctaaggaaatatcccagatgacacaatacacagattgtcaaaaatgaagtatattgtttttgaagtacatgttaaaaagttcttaactttgaagtgttatgtaaacagcacaatttataattctacatttgatcttagccaaaaggccggcaaatgataatttataactttaaataaaaataattattcataatttattttgatcagcatattgaaatatcagattctgataattaatttcaagtttttattgtggaagattctttttctgattactgcatatttaatatacatttttactttttagcataagcaacagaaattgagtgcatgacgtttttttcccttctcagccgtataaatccttcacaggtaaataccatgctaactacttaatctgggttacttacttaggtgactgttaggatcccttgatttagattttgaacttctctgctgtgtggtcttggtctgctttagctaatctcttatcatccagtcttttctgcaataaggactaaggtcacaggagacctggttttctttgcatggcacaatgccataatggcagtgtgtgtgtgtgcaggtgtgcacgtgtgtgtgtgtgtgtgtgtgtatgtgcacaaagtttgatagtttcaaattcctagtaaactttttactagttttatgccacatacatccagtgctacttgtaataatcaaatattttacatacaggtacaaaaacatgtttttcataatagcattaatgtgtgtaaaagcatttcttagacttacagcatacaattcaaggttgtaatataatgtcaccttaatatacaacatagaaattttcagttctggagtagtgtcatatttttcctttctttctaaacataaactattgatctcaaccctctactctatatttttatagaggtcattttaaatgaagataacgaggcataatccatcaaatggtggtttccatagagctcaatttgttattaacagaggcccgtgaaatcataaatggagtaacattaaaaggtaatgagaatattgggggaagttatatcaatttcaatgacttgtcagttacctagataggagcccatagttcacattaccattataataaagtatttgaaaattatgaaatactcatttacattgtatattttaggttgtcaaaagttaccttgggtagttcttcaatttgattggcatctagataaagctcctctaatgttcgttcgaagttaaagacctcctttggcacctgctgaagactgcagtgggagtaatctaaaactgagatgatttcttcttcacctcggaaacatcggcatggcaccagacggccgatgattttccgtttggtggtcatctccaggcactgcactagagaaacgcagaaacaaaacaaaacaaaacagcttatccagtgcccttggaaggcattcttgtaatatttaaagcttagaaatttaattttggtatacagtctagaatactttaaagtaggacacacacacgcattgtatcattaaatccttaaacagccctgcgaagtacgtgaaataggttttattcccatctagcaaattcgaaaatgggctcaaaaagtgcgagagatttcccatcatcacacagctttggaatggcagaatcgaattaggatacaatcctgtctcagttcaatgctactagcatgcttacctcctcacttgaaacatggagctataatatgttttctatttttacacaaattacagtgtagaacagaaacttccagaatttgcggaaaaaaacatttctcccatttctgtaaaaatattcatgtttcaatcccaaagtttatgatgtactctttgtagcccacaaatttcatcggtgaatagatatttactgaataacagctgttttaggcactgttctagtggagacagtgatgcattgaacaaagaccctgttttcatggagtttttattccgttgaaactacagattataattggattggttattcacttccaaatggggatctatctttacgaaccttgtaatatgggataaaacaacttgtaattatggtagaaattcctgtgacactcctgacacatctttctcctattcctctaggttaaactgaccaaatgccatgaaattttgcgaagacttttatcatggcaccttcaacattttattcaatctactgtttttcatgtattttttcctcctaaacagtaaggcctttcagggcagtgattattttgttcattcttgtatttatcttggtacttgatatatagtatgtatttaacaacaattgtagaataaacaaatgaaagcatgaatgaataaatgaatatacttaggactctcctcctaatcaccgtcagctactgataattgcttgaaaaacttattttaacgaaaaggtcactatctctgtgaatgtcttcctaggaaagatgagtagcatctttctctgagttcccacaccactaatcatattgttttcctaattgtgtgggctatttccccatgtatcaggcaagttctctgaggagatcttgtttcacttatccttaaatttacagtacatagtgcagtttgccaactacagaattaaaacttaataaacatgaatttgaaacttgcatttaacttgctaatgtatttttacttagtaacacaaatttattgcttacacagaaattagtaacatttataaaaacaatgtagcattttgtttttaaaattgctcatgttaagtcaaatttggagacaatcattatctagcaaattaatgcaggaggagaaaaccaaatactgcatgttctcatttataagtgggagctaaacactgcgcaaacatggccactaagaagggaacaatagacactggggcctacctgagggtggagggtggaatgagggtgaggattcaaaaaactacctgttgggtattacgttcattatctgggtgatgaaataatctgtatatcaaaattctgcaacatacaatttacccgtgtaaccaatgctgcacatgtgccccatgaacataagtaaaagttagaagaaaaaaatatttggaggcaatcaagtagaacatgctttaagaggtgctagatgttcagcctaaagtgatcctttttcattgttcaacttctgaaattaataaaaggatattctagggacaggttcatgaataaatacttatagacgattgtttgcacatggtaatctgtagaaggctgaataaaaacatttaaaaagttgacctttcttctccattactttctgtctctccaactcctgttcttttcatttctgggaaccagaatcgcaagattttgtaactattgttttacataaccttacttgaaattcttgattgtaggattgatgc

SEQ ID NO: 1209 - DNA, 4001 bp, Homo sapiens
gatggaaatgggctctctgcactttagcagatagttacctgtcacacagcacagctcttttccccttccacacccctttcttatgctcactaatgatctcacctcgtagcttcttcagaaataaaagccattagataggatttcctctaaatccctacaccttcctatatcagccatcactctctaccggacacgagcccacatctgcccctgccacagcacacagttggtgtctgctaaggccaccatgacctccatgttgtcctatccaggtgcctgtgcaggcatcactcccattctctcctacctctctgctggctgctcaggtttccctgccatcctctacaacctgtaaggctggatcctgagccctctcctcttctctaattatactccctgcctccttgaggggtctctttcattgccaggacttaattatgccagaacatcagcagctcccaaagtcacaacttcacccaaagtcacaactccacccctaacctctcaggcactgctgacccatgtgtccagctgtccagctggcatcaccccttagagctcctcccttacatgcacctcctttggcctttcccatctccatgaatggcacttcctcccacccagtgcccagtccagaagcctcagaatctttcttgctctgtcactcactccctaccctgtccagtccttcgccaactcttattacttctacctcaaaagtgtttctctgaggagcctaactcaaccaagcctcaccattctcactgccctatcccaactcccactgtccccagactaggctgttgaaatagtccggtaactcatctgtttgcctccttccaccctgtattctatacagcagccatgtctgtgtgtgtgtgtgtgtgtgtgtgtgtgtgtgtgtgtgtgtgtgtgtgtgttttgaatgtaactggcttcgtacctgtaggggattgtatactgtcttgtcttcccttccagaagatgttgtttctccagctcctataattccttctccccatccaccagcactgacaaagagatagtacctggctaatgctggatgatcagatctttttcccaagttgttttacttcgattccagagacagcaagttcttgtccccgtgatgacgaagctggcagatttgtatcaagaagacttcggatacatttccccttcatgcttagtttgattggggttctatcacttgcaacaaaaagggccatacctctacttataccattctactcattttcttttcccagaggatgtaaaccccatgggggcaggactgtgtccacctcgttctcctccgtgacatatctggcctcatggctggcatttggaaagtaattgttgaatcaatgaatgaacatctgtaaactctgttcaaaggcacctcctggcaacacccctgatgccctcaccccctgggccttcctctcttctatatcttatcacatcttattggtatttgtcaccatcccaaaccagagtgtgggttctttaagatcaagttcaattgaaacatctatcaagccgagattcaggaactcaacgtaggtatgtatgagttcagccataaccttggagcagtgagtagctagtgggaacccgggaagacgcagcctggaagcccgatccccaaaccccggcgccagcgtaccagggcttttgggctcctcctcccccacgggaggcagaacggtcgctggcttctctttggccgcgcgctctccctttttggtcaccgcgccagaagacttctgggtccccggacgcggggccctgggtgaggcccccggcgcgctctgctcgctcgacatgctggtgttgtccgcagcgtctctgggaccttcgtcggggcaggaaggtaagaacgcactctacggggctcagtctgggggtggctgaatcaggggatctctgttccgcgtccagggaccggatccgacccgtccgcggtggcgtagcctacgcgtccctctccaagacaaccgcgcgaggcgggcgggcccgagggaaaggggcaaccgcagagagcacgcggggccgacagggggcgccgcagggcagagcaaggcgaggggagagcccacgagggcgggtggcggagccagaacccgaggggcgggccaggcccggcggagcaggcagggcgaggccggccagagatcgcaggagctgatgggtcccagagggccagggctggccgagcctgtgctaagagagaagggctagggtgacctaggacctgagcggagccatggcgaaggaaacgagtggatcttaggacgggagcggggacagggatagggcgagggcgggcaatccaaagtcatcctggaactgggcctgggggatcggggcggagcctgggggagtggggtagtgggcggtcggaggatactagggagaatccaggtgggggcaggtccactctccagagtccaccccgctgtccagtaaggagagagcacctggtgaaaggcgtctagagaaacccatctagttggtgtggtgctaggtttatattctcgacctccatctgtttagcctcctggaggtctctggggactcagttaatcctctaacgagttaataaggtgaatcacactccttacaaacctgggattcaaagtcatcacctgactcctactctagaccctgatggttctgccctggtgggccccatttgagtaaaggcatacccccaaaattctaagggttgggttccagactactgcaataaagctaatatggcattaaagtgagtcacaccgcttttgtttttctcagtgcctgtaaaattacgtttacactatactgtagtctgttaagtgtgcaatagcattatgtctagaaatgcatataacttttttttttttttttttgagacggagtctcactctgtcgcccaggctggagtgcggtggtatgatctcagcttactgcaacctctgcttcccaggttcgagcgattctcctgcctcagcctccttagtagctgggattacagacgcacaccaccatgtctggctaatttttgtatttttagtagagacgaagtttcaccatgtttgccagtctagtcttgaactcctgacctcaagtgatcctctcacctcggcctcccaaagtgctgggattacaggcatgagccacagcgcccagcccaatgcacataccttaattttaaaaatactttattgctaaaaatgttactatcatctgagcctttagtgagtcataatcttttcactggtgcagcgccttgctttgaggttgatggcggctgactgatcagggtggtggttgctgaaggttgcggtgcctgtagcaatttcttaaaataagacaacagtgaagtttgccacatcgattgacatcctttgacaaaagatttctcaatagcatgcaatgctgtttgatagcatttaacccactgtagaactttttttcaaaattggagtcaattcttcaaatcctgccactgctttatcaaccaagtttatggaatattctaaatcatttcttgtcatttcaacaatgcttacagcgtcttcaccaagagtagattccatctcatgaaactgctttctttgctcatccataagcaactcctcatccattcaacttttatcatgaattgcagcaattcagtttcatcttcaggctccacttctaattctagttctcttgctatttctaccacatctgcagttacttcctccactgaagtcttgagcccctccaagtcatccatgagggttggagtcaacttcttccaaactcctgttagcatgaatattttgacctcctcccatcatgaatcacaaatgttcttaatggcatttagaatggtgaatcttatccaggttttcaattgaatttgcccaaatccatcagaggaatcactatgtatggcaactcatgctttacaaaatgtatttcttaaataatcagacttgaaagtcgaaattactcctcaatccaca

SEQ ID NO: 1210 - DNA, 4001 bp, Homo sapiens
tcatgtcctttgtagggacatggatgaaattggaaatcatcattctcagtaaactatcgcaagatcaaaaaaccaaacaccacatattctcactcataggtgggaattgaacaatgagatcacatggacacaggaaggggaatatcacactctggggactgtggtggggtgggggaaggggggagggatagcattgggagatatacctaatgctagatgacgagttagtgggtgcagcacaccagcatggcacatgtatacatatgtaactaacctgcacaatgtgcacatttaccctaaaacttaaagtattaaaaaaaaaaagatataccaaatgagatagatatattaaagccttatatatgagttaataatagagaaacagctgctctgcctctgcacagaactatattggtggatgaggggaatgtagtaatgtgattagatgttcaaatcaaggaaagtaaccattactgagatatagggaaggatcaacactacaaggcagcatgacctgatcaaatgaatacccaactaggtgttaggaaacccacgttctactcctcactttacatcttactgacggcataatgttggccttgtcatctcacgtaatctaattttccttacatgtaatgttagagagaacaaatgattgatagagtctctacttccagtttcccacaatgctatgagtttattaactgtgattggagctagggaatatctagtctgaaagactcctctggagtggtgaggattgagaaggggtttaaaagttagaacaccaggaaaaacaatggtgtaggtttccttagaaaaggagtacaatgtctacaattgtcaactcataaactggtctctttgaaaaagcgactaaaaattggttatagcaagaaaaggtcatcaagccaagcatataatggaagtattaatttttaaaatttatttatatgtttacaaataagtaggatgcttcaccatgtggcttgctatggacactcactctgcctcacatatacacaaaaatgtgtgtgggtgtgtgtatgtgtgtacatatatgtgtgtgtgtgtgtgtgtgtgtatatatatatatatttttttttttttgagacagggtctcactctgtcatttagctgagtgcagtgttgcggtcatggctcaatgcaccccaccttagcctcccgagtagctgggactacaggcacacgccaccatacccagctattttttaatttttttgtagagacagagtctcacaatgttgctgaaactcctggacacaagcaattgtcccacctcggcctcccaaagtgctgggattacaggcatgagccaccgcacccggcaggaagtactaattttaactgaagataaaaaggtattaggaccatggaaggttcctaatactagcttatcccttaagcattggggttcagtcttgggcctgtagcttctctactcacacatatgctatgctcgggtgacatcctgagcattatgcttaaggtttcatccgccacctctgtgtatatggtgagcccagctccctaaccccaagctgcagaatcatctccccaacatcttcctggctatataccgagatgtgtggaagcaactcaaacagcatgtcccaaactgcatctaccgtttcctcccacacctagatatcatacctgtccttccttgatccccgaatctcaggttgatagcaacatcaagggctaaggcattgactgctatggtttggatgtttgtgtcctcttcagaattcatgttgaagcttaatcctcagtgcaacaatattaagaaatggagcatttaggaggtgattaggctatgaggactctgccctcaatgatgggatttagtgccttataaaagggcttgaaggggtaagttctctccttccgtccctgttgcttttctactcctacaccatgttcaacgtccagaaatcaaatctgtagtatcttgatcttggaccttccagtctccagagctgtgaggaatacatttacgttacttataaattacccagttttaggtgttttgttacagcagcacaaacagactaaggcaggcacctaacccagaaactttctcttcctctattccctcaaatccaatggtctcttaaactagccccttctacaatcttgctaccactgtcttggatggggcccatgtcatctttgggctggacgactctgaaattgcctcctttcttgccctccttagtcccatttccatactgcagtcagagagctctttctaaaacatgtcacctcttgacttgttgctttgttattataaagacaaagtgatgtctcagggagggttggggaggcttgccaatgggaagtgaggggaaagagtggtgatctccagcttctcttgctttctgttttattggctcttgctgtttccttcccaggagtgctaagtttgaccccaaaatgcagggcagactggattatgaattctgtgatcacagtgatcactgatcacttgacaacagtgcaaacatgacaacaggatgcttcaccctgtgactcgctgtgggcactcactcagcctcacagttagctatggccacctcttgctttatcatgctgcctgtctcatggattccaatcagtttggaaccctgctgtgatggcaagggatttttttttaagtctctggctttatttctatctatacttcactggtgtctatgcttacagatactaggcatttttacagaagttttcttgacttactggtcagcagcagtcactgctgtgagagtcaaccctgcacatgttagagtaattgctctacttgctgatctgttactgtgtaaatgttctagagctgttttaggtaagtataaatttcctaatttcaatgttccccaagccgtagcaggggaacacacaacataaaaacacataaataaaaattaggaaaaacatataaataaaaattaggaaacttttatgtatctgctgctgactgagtacagtctcattttgtttctccgctcctcgcactagtgagagtgagaagcaggggctggttttccatggcagcagtgtggaaaatgaacactggactgagtcccaggcctgcctccaccatcatctgcatgggcttaaatcactcactaaatacaggcctccatctcctcagctttaaaatacagataatcacactggctcaagaattgatattagtggtaaaataaatatcatggaagcactctgaaatcattgcagtagcaaacagatgcaaaagagaactcttataaagaaacctaattcttttactagcaaagtgatttaaaaagaggatgcttttggccttgggatggtatctttgaaaaaaacaacccaggaagtgagctttatttatgccactgtggttccagggaaacaaaatagcaagtgttgcaaagacattgacatttcatcatatttgggtcctactgtgaagtcaaaaagaacgcttcaaaaaaggcattgaggcccaggggttcagaagaactatgtggcccaaacatagaatgtcactcatttgtttcactgtgacaaaacaaccatctcagtagaaaattcttctccaaatctgccttgcaataatggaatgataatggatcccttaatgtctgtcaactggggatttggaaaaagacaaaaacagaatgcgcacaatctctggctcactgtgccaatggagtgcacacgcctaactgcccaacccagagaaggctttttaaaagattccagtcagccaacactgcttatctgttccagctcctattttccatggaggaaggtgtggggaatgaagcattgggcaagagcattcagaaagaaaccagtctgttttgaaagagcaagctcttatgtcacttatgattcaggtaaaatgtccatttttaccttggtgttaaattaatgcttcatatttgtaacttggttaatggctgctggtagtcaaaatcactggttgc

SEQ ID NO: 1211 - DNA, 4001 bp, Homo sapiens
ttggaacaccttaccaattgaggaaaaagagaacacatttcaaagaatggtaaacttaattccgacatgcagatttaaaaatgttgttggggatactaagtataaggaaagtgccatgacccaagggtgcactcaatgacaacatcacccccattcaagagacctctttttagcttacagaaatatcagacatgttagggcttatattctaaaattacacaggcccaattaccttgggggttggctgtcactttatattctctgagtagagctgctgacaaggaaagccaggagaaaaagaaagtcacctcggcacccacaattcagagagcatttggggtcacacctgtaatcccagcactttgggaggccgaggtgggtgggtcacttgaggtcaggagtttcagaccagcctggccaacatggtgaaaccccgccaccactaaaaatataaaaattagctgggcgtggtggcgggcccctgtagtccccgctactcgggaggctgaggcaggagaatcacttgaacccaggaggtggaggttgcagtgagccgagatcgcactactgcactccagcctgggcgacagagtgagactccgtctcaaaacaaaacaaagaaacaaaacaaagagcatttggggttctcaggaggtgtagcctgtacacatagagggtactggaattgtttaaaaaattacactgcagtttgacttcttttccatcctcactcctacacctaggtttaggggacagaaccatctgataaagataaatctgttttaagatttctggggtgttctgcaaagactactatatcatttgcaaataggttgtcttttaataaaaatcatgctacgtaatgtcttcttaatatacgctgaacaaattgcctgttttaatttggctatatatctacaatttaaaatgttcatactgttatcttttaccagtggagtgtttttttgtttgtttgtttgaagtctttaggcgaagtgaatttattcaaggaagttcacatgtcggttttgttcttttagaggggtgtctttttgaccacaaagaaaaaaaaagttttccacaaatgtcatctaactaaaggcaatctatggactttaggaagtcagttgagcacacagattaatgagccaatactgagcctcctcccttctgacctctcagcacctgctcaactaagctcaggggaaactcttgagtcttcttcttaaattggtaacgcttgccctttctttctcaaacaaatcaacgcccaacaccaccaccaaattataggcaaccaacgcgtatccaacagcataaaatagttcccaagagcataaaatagttcccaacagcgccagcgcagggggcaaaacagagcgaccaaatgggggcaccctcaggggagttgcgctcatctggagcgagacgccagcctgggaaagcggaacccctttcccgccccgccccgaggactcacgctcaggtgcaacgccgagactcccgggggaaagagaggtgaccgtctcggcgcgaccgcccacacctcttgctccaaatgaccccagcacacaggagaggtcctctcagcgtgggactccgtctctcccgaaggcagggagcacaacgaagcggccactcgtctctgcagccgcgctaccggcccgcagcctggctcgcaggtgaggcgtgaacaggtaaccgcacctgttcggccagccccacctgctgcgtccccgtatccggtcctcctcctccaccacctcggtcggcgcggctcgccctcctggaaccggggtgtcacgctccgacctacctgcgcgactccagccccggacgcccgcgctccccgcggcgtgctcctgggccgctccgggcgggcaggctgcggccccgcgcccgcactttcccggctgccggaggctgcgggctcagcgggaagccccggcgctgtccggctcgccgcctccgaccggctccattgtgacgcgacgcgttccgctggccaatgggcgctcggcggcgcgaaccgctgactaagttcgcgggtggaggaggaggggacggggcggaggcagggcgcggaggcggctaccacggtggtggcggtagcagtggcggaggaggaggaggaggaggaagaggaggaagaggctgcagtcgcttcggtagctgctcctgctgtgaatttttcagctgcctgggcctgagtgtttgcccagctctggggctgcgggagccagtgactcacctatcactgctggaaacaaagcgcagctgccatctccccgagcgcgccatgtggccatcgctgccccctcgcccagcctggggtccgcaggaggtagcgcacagccatacgccccgcggagcagctggaaagagcggggactgctttccagaagcgggagggaaatgggcttcggcgtgtcccccaggcgcgccacaccggtgacttcggcactacaccgcgtgtgtcgggccccagccttctcacgtgtgcgtccctgagtaacttggcatttatataacgcgtgttgggccctgagggaaaggtcgggtgcagcacgcgggaacctcctcttcgaaaaggaagtccccttacttttctttaccctgcttagaaagattgcagggcccagcctctgtgagggagggtttacagttgtaccaactaagcggcttaagttcgattctggccttccaataccattggcttctctcaaatgtcgttatcctcaggatagggaggggaccacatggccgaggggcggtccctatactcataacctgcctttcactgcgattcaactgcagagacacctcaactactgcccgcttgcttctctcccaagtggcactgcatttgaaggccaacaatattccttacgaaacagaattaatccaaacccacaaattctagggacataaatatttttatcatcctcatccatttccccactctcacccttaccccagttttaactcagtctctgccctggctattatcttgagcacactgattcaattaggcaagatttatgtcttttagttgctatggtggtcacatctccatttaaaaaaagaaagaaaaaacaagtttgtaccggcatctcccaaaggaataaaatgaagacgaacagactcagcatttggggcatctgagcagtttgtgtaaatgggagtatagcaaatgccctatcgagttaatatgagacaagagttgtgtctcagactgttcagatgaggactacaatttgagtcaccctgaaagggaaaaagaaggctgtctttgtgtcactgatctgttcttttcttgttcactcagtccattctggaactgcagatatcttttttctgagtcttgaaggaaaagctgaaagaacatttcttcacttggtcattcgataaatttttattgagtttatatgtgtgagacactgggtatgcacagatctacaagtctaatttaaatttaggtttgatccttacaggagtatctgaaattctctcagggactttctgattaattatttttggtagaagaaaattctaaaagactctgtcactactttcacagccagatttacccaagtctaaaatagtgattaaaaattccatcatggattttaagcaccaaaaaaatgacaggcaggtctcaatcgttttagaggtttattttgccaaggttaaggacattccccaggagaaagcacaaatacaggaacatctgtgatctgtgccttttgcaaagagagtttttgaggacttcagtatttaaaggggaaagagccagcaggaggggaaggagaaaagaaagaaaaaaaagggaaatgggaaggtaggcaatgagggaagaagttacattcttgtgaggctttgattagtgcccagtgaattcacattttgcgtgtgaagagtgggtagaggaatactgattatgtgttcctctcatgctcagtaaatctacattttacataagataaatgtgaaaatagggg

SEQ ID NO: 1212 - DNA, 4001 bp, Homo sapiens
tttaaaaatacatttcattaaagtgcttaatctgagaaataatagattagtactattaataaaggcttgattttattaataagaaaattgttaaatatacttggtatctctgatacaattgttgggttgatgggtcctgtctgtgcccaatctattatgtgaaccatggcaaatatccatctttgcaaaactgccctacatccccctcaaaggaaacaaactgaccccaagacagaacttaatcactccagagtaaagcaaaccaattatagccttggccttccctgttaaagcaagtcacaagaaatgcaaatatcctagactagagctgtatacatttaatgtttgtttacacactcaacacattgtttatgaattgagcgagttttatgcagctcagattacgttttgggttttcaacaaattatttaaaaataaacagaatttataaatgtataaaaattattggctctggcgattttgcagcattgtgctaaccaagaggactactccacttttactcctttttcgtctaaatggcatcttaatgacctgcccacgctgaagcctcatcgatgctttgggaaaccatcacatacctgtcgggaaatgtgactgttggttaaggctacgtttctcacactaccgcgaaagaagtatgtgacttacaaacggctgcgatttcctttacctattccttccttcaaaggctgctttaaatggaggtaattcaagcctccccgtgccaaacaccggcactccaacaaagatggattggttcttattttttactttgaggatgggaacctgaaaatgtttcctaacgtttgctgaggctttaacatgtttaaggaatttgaaaccaagggaagtttagccgtaatactctgaaatatccgcattaggatgcgggctaggtgtccggctgttgcaaaactacggaggatgcgaggtttggaagaaactgtttggactttgctgtataccgggcaggcgtgggggttggggagggaagaaccggctgagggagaaaagaaaggcattcgtgtccacagaacacatctaaggctcctgagttgctaactccatccctaatcatctcattggtgggaaccagctggaaagggaaagatcagcgagcctaggcgtgggatgaaggcagcggttttggcctcaaccgctggcctaaacacctggcttctggggcccgcccgatcaagctgaaccccttccctcctgtcctgcaggtgagcacacggtgctctcacgtttcttcgagaaaccttccaattcctttccctgcccaaaagtgctaacttcaagggttcggaggtggcaggggggtgatagaccggaaaggactggccccggggtctcagagattttcgaggtaggaaagaacaacgatcgccccggccacggacgcatttcccctcgcggaccgcccccccacccccgcgcccagtctgcaggacctgccgctgcggcgcggcgttgggcgccaggctgagatcctcgcgcggccgctcgggctagcgcggattgggtggggtaggggttggcgggctcctgagccgcagtagcggaaggttcccagcaccacacgccgggcgggcaaccacattctgcctgtctgagagccggggggaagcaaggacgcgagtgaggcggggcgagtcccggtccggcgcgcacagcggaccgagcgggtggccctctgcgggctgcccctctccatccctccgcggatcccccgcccttacctccgggcgcgagagtgtcgactggagaaggtgctagggagcggcgagctgcctgggggtcgggctcagcggctgccagggacggcggcgtcgcccgcggggtcgctgctcatggcttgtcgcgcccgagcactgcggccgcggccacggcggcgccttcctcctacttctcttcgcgggcttccagccgggacgcagctaacgccccagccccgcaagccctcctcccctccgcctccccggccgcggacggagccgcctccagcgccgccccgcacgcagcccggctagcggcagccagcgccgcccagcgcccggccccggggtcgccaccgcccgccgagtcgactccgcggtgccagccccgctgtgacgcaggccgcgccgcccgggaacttcctcccctgcagagaccacctcgctcccgggactcgccagcgagggatgccgccggccgccgggggccttctccaggaccaggagagaaatcctctctccgcttcacgacgcggccactcccacccctgagacgcccacctggcggactctgagggaggattcggctgcgtctaataccacctccacccctcatccctcacaatgcgcggaaaaccacaggcggctgtgcgcgcagcgtcggctcagccaccgcagctcctcccctgggtaagttagaggggagcagccaccactaaaaatagcccttctgggaactcctccgaaggccagggtcaggatgaagataacccctccacaggagaagcgaaggcctcctaagagaagggtggggaggggacggtgggatagaatgaggaagatggagaaggagaaaagcaaaacccaatatccttggatcatgaagcccttgagccccttgacaaccaagtctcctttcaggccggaatccccaactgcaccgcccctgcaatacgggctaaggggcagattccagggagactcagttggaatgccccgcctacagctcccgcataaaggagttgacggtgcacagcaaaaccacctgttgtttaacgagtatggagggaggggttctctctcattgattgatctgaaccgtgcttttcttctccccattttcccacccaatttcaggatgaaaaagcactctgacgtcttgaaagctggcagctctctgtttggaaaatctctgcccagtgaaaaaatgtaccgacaagattactaagtaacacagtcttctgggaatgccttatcaatgccagctatttgaagagcacccaaagtcaaactagtgctccgcgctggcagtctggaaaaggcagatgtatgtgagtagagaaactgatagacaactagttgctggccagttggcctgttttcgtgctacaagccttcagaaaacagtcgcctccttttaccacgtttctatttctaaaccaaaatgaaaaggacgtttgttcaaaagatattctcttgggctttacattgctttccccctgctcactcagcaaaatcctacactttttttccaattccaatgctgctgttgggtgtccttcccagaagacaaccttaaattctcttaggccttaggagctgaatctaacaccagtcttaattaacctacaacaagacaaaaatttaggtccgggcttacctcctagtcagcagatgggaaaaattcctagagagtctctgggaaaaaggcaaaggctaactttagcagtttgctagaaaaaaaaaaattcaagtaccttgtaagtcaccagggtagatgcagcaatactctctaaggtagctttacctcttcaattctcttaccttacctgaatttaaacacagtgaggcaagtaccaaggtcacaaccctcctgtggagggccttattctgcaagggctctctgatatacttctatctttgtaccgttggcacctgaccacaagcttaggcatccctgaaatgctcccttgctacccagtgtcaaggaatcattgaaccttagactttgtactcaggtgaaccaggatgaaatccctattcttccagtttaaacttaggaaatttactgttctttttatctgccccctccccaccacccacatccccttatcatccctataggtatagtactacagggtgctgtgagaattagctaatatgctcaaagcaccaagaacagtgccaatcactttgtaagtagtcagtaaatgagagctactattgtacttaactactcttcactgaaagcaaaagaaccag

SEQ ID NO: 1213 - DNA, 4001 bp, Homo sapiens
ggggggctccataagtaacctacagagaccaaacaccccaaatcaacttttcgtgacccctgttttaaccacctaattttcatctcagattcctccccatcttgcacttggattttaacagggatttagttagttggtgtcaagacagatgaagcaagaaccccaactctcgcctagctgacagtaggtgtttggtcactatttttggactgcaaaaataaatgctgcctgaggaccccatttacaggatatggtgcagggttcttcccacaggtctgtaagaagcagaggtcccagatgctatggcgaggaaggtctgatcactctcattcttggcactgggaggggccccttatttgtttataaggtagacagccctcatcattactgcaaacggggattccctgcctgtccagactcttccaaagtccggtacaaaccacgtaataggtgctcaataaacgctgcctgtacggaattttactatcaaagctgccaaggaaagtttccagaaatcagctcttccaaaatatgtcctcagagttttctttgtccaacaaaaaaatatttttgaagatccaagagcaggaaatctgcgaggcaacgaggagccaaatataagccaagcggctccagctgggccccacattccgctaggactccccagtacctattccccatctctccgcctacatcctgagtgcgccctccctctcatctcggctgtttccttcccacaaccctacctccatactttcggccacacacaccccaagtgcgtgctcctggaacctcacagcccacctctccctctccagcaaggacctacctctcttcccctcgacctgcagcagttcttcttcactgcagctggctttttaagaaatcaaaaaatctcatttatctgcaagggataccccctagtaaagggtgacggaaaggagaaggcccctatcaaccctccagtaactggaggtgctggtcctcccggcaaccacccccaattctcctccttttcaagcccctggacaggatttgagcagaagtcccgctcccaagagcccacgcctccaaacaagctagaagcggattataccggtacccaacccggagacggcccgcggacggctgggtgcacctgcgggcccccagctccctcccacaggcgcggggggcggggcgcgggccttcacctccccgcccccgcccgccgggctcccagcgcagcccaccctgcacaggaaggaagcggaggggaggcgattctggagaagttaaagggctcacctttggacgccgggccagcaaggccagacaccaaacacccacctccgggaggaaccagcagagccgaaaccggctctccccgcctttccgatagggcggagggaggtgagagaagggagcgcgcgcgaggggttcaggagccaggaagccgcactcccctcccgcagggccggccgcccggggccgaagcggccgacgctcagactgcagaaagcggaacaatctcccaggccctggcggcagcaaacgggagcccactccgctcgccgccacctcctcccgacccccggacgtccccgaatgagttcccggccgcaaccgcagctcgggccgcggcgcctgcgccagggttgcgcgctccggctcggcgcggctccacctgcgcgtcgccttccctcgcagcccccggcccctgccgggagaggtgcgcaccaaccttggggtgcagctcggccgccaagccacggcttatgctgaggccggaggtggcggcatcacccgcggcgggcggcggctgcaccgggacgcgccggggcggcgaaggcgcgctgcaccctggaccctgctcccgcggccccgcccgcggctgccacctcgaagcgcggcggaggagccggggcaccacgggcggcggcagcggcagcggcagcagcggcgacgggagcagcagcacatgactctgtaacgaggggaattagacaaagcgtaacatggactccgggcccgtgcaggcgctgcagctctgggaccaaccgcagccggcgagtgccgcgactggcccggccgcagccaatggggcgggcccgggcctccatgtgattgcgagcgctttctccggtggccctgcagcgcctgaccggacggggtctgtgtggcgagggaggggacccggggttggagactggcggcgagcgactgctagatgcggagcaggtgcttgggaggggaagaacggcagcctacataaccatcgccgtaatgctctcgcaagcgtccacctgggcagggctcggtgccgggcaggcgcagctgccagttagctgcgaggcatggtcaggagccttcacccgtcctgggcgaaggaggctgtcccgtcgactaaaactctgatattaagacttggcgctgggggtggggagttgaattacgttaaaaagtcacttaagtgccttccaactctaaggagaagtacttatctgagctttggggcacacacaactactacttggcatggagagtttctcagcttcatgtgttccgtctgttattgaagctgtattggaaagtcggttcttgtttttatctgagcccgccgttttcatcccattcttttcgtcaaaaatatgttacatctgaaagaggcagatgaaaagattattctatgctaagagggttttgcagcccgataatgtcaccgttttttgttgttgttgttgtaggatcggggttcatttgcagtcttttttgtgggtgagcagaggcaggggccaataaataaattaaggcgggatatttggagttatttggttgtaataaaatatgtggttcaacccagtgctttcatatcttcttttatctgaatccatgtgtttctgtaaaccatcggaagtctaatctgtcttctaccaatatctctccatgtcagcaaatgttcaatcaacgtttacccagcatctaaatattcttaataagcatgctgcacaaatgttacaggtactcaggaaggtgtcggttcagagacagtgagacattaaagagaatgattgtccagggtttcagaaaaggattcagagaggagctgatagaattgacccttggatggtgagcacttggccctcaggcattggacgtgaagaagagcagcccaaacaggaacatgaacagagaggtccagaatacactcaagggactgcccgagacccgttacaagatgccaccagattctgagccctcggcccttttgctctcactttccttccccgaccctccttgccagcagccactcctgttccacacactgccaagaaggaggtgtatgggcagggagtgtgtgtaagtgatctaatcagtgtcagatttgctgatctaagagatgagaggtcttttaaaacttaacaactagtggtgtgatatttttattgaaaacagcccactattataatgaatatggaatgttttgctgtttgtaaaaaaaaaaaaaaattataggccgggtgcagtggctcacgcctgtagtcccggtaccttgggaggccgaggcaagaggatcacgaggtcaggagttagagaccagcctgaccaacatggtgaaaacccgtctctactaaagacacaaaaattatctgggcatgttggcacgcacctgtaatccaagctactcaggagcctgaggcaggagaatcgcttgaacctgggaggcggaggttgcagtgagctgagatggtgccaccacactccagcctgggcgacagagtgagactccatctcaaaaccaaaaaaccaaaaaaaccaatcttctgtactttgttcttttgatcttccctgggttttaaattgtgattctagacttgaaaaacatgattttaagattggtataaatcgagaaaagaaaaaagtgatattcagaaaacagtcaaatgtggagaaatagacactcacacactgtaaaagtaagaggaaattggacaaacccctttggaggacaatttggaaat

SEQ ID NO: 1214 - DNA, 4001 bp, Homo sapiens
tagtcgtatattctgttccacatccctgaccactgtcaaaagtcaattcagatttccactcctccctcagcatacttcataaacttttatctggttccacacaccctggattcttagacaactgtaactgtctgcttctgctggcatcctcatgtgtgcctgtcttatctgctctctgtgattactacgagaatcctctcctgccttgttaagatcccacagcacccactccagttctctgcttcctgctggcactcaacaaatattaactggtgtttcttagaatgtcaaacaccagctccaattaaaaataactgaaatctcttacaagctaccacttcaacaacataataatcatgattacaaagttttgacaaacttttgactttaatagctattttgtctacagtactgagaacagaatcgagtctaatttccaaactatagctaccaaaacaatttaactatttggacatgacaaacacatcagaattttctaaaattaatttttaaaaatgctgcataatataaaaattaagggaaaaggggcctagtttttttcttttttctttccattaaactttagcgattttgagaaaaaaagggccaagttttgaccatgttttttaaatgctggaaaacacagcagggagaaaatgatatgaatatggctcaatactttaagtgttgcatcatatgctactccacatggtaatggaaggctgggtcatctaaggacagtttcctctccaaccttctaatctgttaggttttaatcaacacgcacacatacactctcaataaaaacgagacaaatctaacatagtgttcaaatatataaataaactgtgccaattcaagattttggaatttttccctggctccatagattacctaatcattttatggggggctccataagtaacctacagagaccaaacaccccaaatcaacttttcgtgacccctgttttaaccacctaattttcatctcagattcctccccatcttgcacttggattttaacagggatttagttagttggtgtcaagacagatgaagcaagaaccccaactctcgcctagctgacagtaggtgtttggtcactatttttggactgcaaaaataaatgctgcctgaggaccccatttacaggatatggtgcagggttcttcccacaggtctgtaagaagcagaggtcccagatgctatggcgaggaaggtctgatcactctcattcttggcactgggaggggccccttatttgtttataaggtagacagccctcatcattactgcaaacggggattccctgcctgtccagactcttccaaagtccggtacaaaccacgtaataggtgctcaataaacgctgcctgtacggaattttactatcaaagctgccaaggaaagtttccagaaatcagctcttccaaaatatgtcctcagagttttctttgtccaacaaaaaaatatttttgaagatccaagagcaggaaatctgcgaggcaacgaggagccaaatataagccaagcggctccagctgggccccacattccgctaggactccccagtacctattccccatctctccgcctacatcctgagtgcgccctccctctcatctcggctgtttccttcccacaaccctacctccatactttcggccacacacaccccaagtgcgtgctcctggaacctcacagcccacctctccctctccagcaaggacctacctctcttcccctcgacctgcagcagttcttcttcactgcagctggctttttaagaaatcaaaaaatctcatttatctgcaagggataccccctagtaaagggtgacggaaaggagaaggcccctatcaaccctccagtaactggaggtgctggtcctcccggcaaccacccccaattctcctccttttcaagcccctggacaggatttgagcagaagtcccgctcccaagagcccacgcctccaaacaagctagaagcggattataccggtacccaacccggagacggcccgcggacggctgggtgcacctgcgggcccccagctccctcccacaggcgcggggggcggggcgcgggccttcacctccccgcccccgcccgccgggctcccagcgcagcccaccctgcacaggaaggaagcggaggggaggcgattctggagaagttaaagggctcacctttggacgccgggccagcaaggccagacaccaaacacccacctccgggaggaaccagcagagccgaaaccggctctccccgcctttccgatagggcggagggaggtgagagaagggagcgcgcgcgaggggttcaggagccaggaagccgcactcccctcccgcagggccggccgcccggggccgaagcggccgacgctcagactgcagaaagcggaacaatctcccaggccctggcggcagcaaacgggagcccactccgctcgccgccacctcctcccgacccccggacgtccccgaatgagttcccggccgcaaccgcagctcgggccgcggcgcctgcgccagggttgcgcgctccggctcggcgcggctccacctgcgcgtcgccttccctcgcagcccccggcccctgccgggagaggtgcgcaccaaccttggggtgcagctcggccgccaagccacggcttatgctgaggccggaggtggcggcatcacccgcggcgggcggcggctgcaccgggacgcgccggggcggcgaaggcgcgctgcaccctggaccctgctcccgcggccccgcccgcggctgccacctcgaagcgcggcggaggagccggggcaccacgggcggcggcagcggcagcggcagcagcggcgacgggagcagcagcacatgactctgtaacgaggggaattagacaaagcgtaacatggactccgggcccgtgcaggcgctgcagctctgggaccaaccgcagccggcgagtgccgcgactggcccggccgcagccaatggggcgggcccgggcctccatgtgattgcgagcgctttctccggtggccctgcagcgcctgaccggacggggtctgtgtggcgagggaggggacccggggttggagactggcggcgagcgactgctagatgcggagcaggtgcttgggaggggaagaacggcagcctacataaccatcgccgtaatgctctcgcaagcgtccacctgggcagggctcggtgccgggcaggcgcagctgccagttagctgcgaggcatggtcaggagccttcacccgtcctgggcgaaggaggctgtcccgtcgactaaaactctgatattaagacttggcgctgggggtggggagttgaattacgttaaaaagtcacttaagtgccttccaactctaaggagaagtacttatctgagctttggggcacacacaactactacttggcatggagagtttctcagcttcatgtgttccgtctgttattgaagctgtattggaaagtcggttcttgtttttatctgagcccgccgttttcatcccattcttttcgtcaaaaatatgttacatctgaaagaggcagatgaaaagattattctatgctaagagggttttgcagcccgataatgtcaccgttttttgttgttgttgttgtaggatcggggttcatttgcagtcttttttgtgggtgagcagaggcaggggccaataaataaattaaggcgggatatttggagttatttggttgtaataaaatatgtggttcaacccagtgctttcatatcttcttttatctgaatccatgtgtttctgtaaaccatcggaagtctaatctgtcttctaccaatatctctccatgtcagcaaatgttcaatcaacgtttacccagcatctaaatattcttaataagcatgctgcacaaatgttacaggtactcaggaaggtgtcggttcagagacagtgagacattaaagagaatgattgtccagggtttcagaaaaggattcagagaggagctgatagaa

SEQ ID NO: 1215 - DNA, 4001 bp, Homo sapiens
ctgtatgataccgtcctagatccaataaatactctatttaatattctgtatgatagaatctaacacatcactctgtttgtctcctcacaattgttaccactggattttttatttggttacttcttccttctttatttcaccttattagaatatacagaccccaaacatataggctctgctgaccttcactcccttgggacctcacttagttccacagttaaaattaattctatcttcttgctgacaattcccaaaattgtatctctagcccagacctctctcctgaattctagactcgtatgtataatgcatacagacacatacacacacaaacttccattacatattcactgcatacacatgtctctttattccacatgtccaaaatcaaattctggaccctattaccccaaaaaccttcctcagtcggaaacttacccatcttaattgatggccaatccatcccaaggcagtcattttgactcctctttttctcttacagtccacacccattaattccatcagcacattttattgtttttgtcttaaaaatatatccagaatctgaccaacttctcaccattcccactgctaccatcctggtcaagccttcaccagctctcacctgcaatattgcagtaacctccaaagaagtctccctgcttctatcattgcctcatcccccattataatctattctcctatctccgagtgatctctttaaacataagccaagtcacttcaaaaccctgcaatggctttgtttccctcaagagtaaaaaccaaaattcttcctatggccctttgttctctctctgaccttctctcgctactttctcctttggttactttcactcaagtctctgtattttctaaatgttcttcaataagatactgtttttttaattaatgaagttttaaatgtaaaactatgaaagagtaatctaatctgccattttatccaaatgtttccactattagaacacgattgtataacaagtctgagaagaaaaactaagtaaatttatgacaagagtttatggtgccctgaatgtctacgtacctaatgaagacgttgatacagagaaatcgtctcaaaaaatcaaacggtatggtgaaataccacaagttctgggtttgggattgaaatatatttcttaaatcttttattacttactaattgtgataccttgactaactcactattctctgattcagttttcttctgtgtaaagatgaagtggtctgtaaaaccaagaaacctcgtgttctataacaggaacacctttatatagctacccaaaaaaacacctaaaaaggctgacttattcctaagagtgttattgaacattctagattaatctgcatatacaaaagaatgccagagaagaaaccaaaataccaaaaatatttggagcctggttgcggactgaattttatacaactttcaaagacactatttgagaggctgtcgtgtgtagcctactaagaaaaaacagaggggtggggtggctcactctctaggaaccacaaacttaaggttcctagaaagagcagagattttaaatattcagactgtgtatgtatcatgacccagggttgggggcagatggcccggggtggcgggggaaaggagagatggcggagatcttctatcaggctatcctggggaactgctccaggctgaaacaaaccaccagttaggacgaaccgcctttgatgtgaaagctgggaagctagaatgtagtttcgccttatccttagcgggtcggttctaacaattttgtcacccaaactgaaccactcaccgggtcaactgggctgcaagcccttatgagttggagacaagtggcccagccccaacacagtcagacaaatcgctgggcggccatctgctcctgagaccgttgctagagaaacaagacaacatccaagttctccacatcatggttttccgggcgccagccaaggcgctccgggggcgtggttacgtgggcgacgcacggagggggcgggtcagaaacaaccgggcggaggcgcaccccagggcgcatgcgtgctgtgcggcgcggtctcagggaaggtggggctatggcagctgctagggaccctccggaagtatcgctgcgagaagccacccagcgaaaattgcggaggttttccgagctaagaggtaccagagaaggcaccggagttctcctgggcaatgcagagggagggtgcttttacgtgccaggaggtttgctggactgtcacttcccgtttacttctcatctgtaggcctatgacgctccccaggagtagctagctaataatccttttgagttttttattcttttcactgtccctgcttgacatgcttgttgcttactttattcttagtagtatagatattaaaaatgagggcggaggaagaagaagaaaatcttactagtgaagttatgcattgattagctcattaataaaagttgctttaaataaatctaaaagatacgaagcacagtattttgaactttatgagtagatgccagccccctatctacttcacgctttacattacgttcatctacttctgtaatgtaaccgtttgttgagggagtaacagaacatggaggaattatggattaaaaattaaaaggaagaaatttgttatcaaaaaattggctatgacacttaatccctgtacacctgtctaataaaagtgattatatttgtgttgcagtgactgcttaaaaaatactgggactaattcttggataacagtaaaactttcaggactattagattctagctgacaagttctgtttgttaactaattaaaatgctaaatcattttgtttatcaataaagagattccaactgtctactaaaagtgcacactgtcttttaaagatgtcatcagagagttgggaccttctgttatccagaattttatgttatattctaacagcctatgtaagtttgcatggttcatcttaaagtaatagaaaataaagtacccacatttataaacagcaacattgagggaagggatctttgggttgtgtctttcttagtcacctaacaccaagtgtccgtgatacataagaattgatttgcaaagctggagatttgtttatgtttatctcctcttcttattgaagaattgaggcaatagtctttggcaagttaaaagtcgctctcttaatcaagaaacattatgtcattcagaatttataattaaattggattgcaaaccataaaaggagggagtgatctaaaagaaaaaaaaggaacttgtgaacagtcttcattataactattttgaatcgtattaatgcaccactaattattccctaactttcaaaagccaaagatacattttggaagatgataatggatattaccttctttatcatctttctcaataggcaaacctgtggcaactagaaaattctgataatttttgttttcatttccttgctttttccaaataggcaaacttgtagcacgtggagaattctgggacatagttgcaataacagcggctgatgaaaaacaggaacttgcttacaaccaacagctgtcagaaaagctgaaaagaaaggagttaccccttggagttcaatatcacgtttttgtggatcctgctggagccaaaattggtacgcgctttatggtcagttttataatataggtcctaagcagaataatcattgaagaaaaggtttctgtgacttacagtgtataagctgcatatctctacccacagctttacaaactttaaaatttgaacataaattgactttttttagaaagataaaaggaatagcaactgttcttacccattatgacttaccttgaaaaacttccagaatgttacttaaaagaaaattttattagttttaatgaaattcacactattcagataggaatactcctttggaccttatcagtagaacccttgaggtcctctccactccagagttcctccagcaatttacatgaagaaagcaattagt

SEQ ID NO: 1216 - DNA, 4001 bp, Homo sapiens
ggaggaggaagaggggaggcacagggaaaataggatgggaagtgaggaagaactgtgttgaattagagagggaacctgctgtactagcctggatggaattagcagatctctgagatcttactgccactcggtgtttccccgggaggagactgcattagggagagggtgtggatttgggggtgttcctaggtgccagaccctgggcagacctcaatctcccaggcactgaggcctttagttccatgctttgcaaataatgaggacccatcccaggaccagagagagccctccgcaagaaggagaagcctgagtcagcacaggggaaggaagaaggcctaggaggctcagatccctagctctgcccttctgtttccatcgtttcgccacaacagcacctggccaggaaagtgggtcaggccacccacatgtggctttttctggtagccacagggcccaaaggcaagggggctccagtgcccagtgcagagcccacctctaccctccatgcccagtgctcttttttgaagggatctttaagaagcagtgggcaatgggaggagctcctggccttcttattcagggacaaaacgctgggccagagcccatcctagactggcgggaaaggggggcacggagcctgccatcggcctgggtgcatggggagacctacatcttcccctatgacagtgaccaaactggcagggagtcacctctactgccctgacctagggaggctgttctcctcaccaccctaggtcctggagttctcaagcagagggcctgtcagtccatctctggcaactgagcgctgtgcccagcccaccccctccaaccctgccagtcgcccagttagaagctgcgttggctccaacagatgggagctgcggcagcctgaggaacagagcacaaagcccagctgacattttccttcctgttcgtttgggtgggggaggaagggtagggagcacagtgctacccccggggcccctccccaggttccgggtctcctgcacctctttagcttctccgctcggccccagatggagctcagttccctcaccccgcggctcctcgccggctgggcagccagagcctgcgccaccctttgccagcaggacagacggcccacctgtggctggccagcccatcctgtctcctgggtcctgcggtgggctcagagccacccttccgtttccgcttccccctgaccgagtccccaggctgagccccaggccggcccatcccccaccccaaaggtcccatcccaggctgcggtcggaccccagccagccggcccgggaggagcctagctcctggttccagatacttcagacagacccaaggccaccttgtccctccgcacagactcgcgagctccaaggaggagaaagtccccaggctctggagcgcttccagcctgccagtccgcccgtgtcacgccctccctaacctcactgccacctctcggctcctccacatctccagggccccactctacccagcaacagtttgggggaggttctggcctctccaggcgaaggcccaggcgccctctccctggccgcttctgggcattctccagccctccgtccctctgcccctcggccgcctccctctcccaagtctccggctcccccgcaggcgtctcggcggaaggcagcggccggccctcctctggcccccacccgggtcaggcggagctgcggtgccggggcaggagccaggagccctgaggcggctgctccggccgctcccgccgcgtacgcctcggccacgccagcgacctcggtgtccacgattccccggcggcggcggcgctgcccaggtcagccccgaagctgcacactcaccccgtgggcgccgggcaccgtctgccgtctgctgcccgcgcggccgcgctccgctcgccttccgcccggggccgggctggggacgctggtccgcgccctcccgccgcgcgcgccgtctgcacaggccggggaggctcggcgggcgccctccccaacgtggagttatcctgggagcggctccagggcccagccggtgagggcgatggcagaatcccaatccgtccccaccccctctccgcgccctgggcgcgtcgcggccggaggctggcgggcgagagccaggcgctccttgagagcgccgcgcgttcgcaggtgcccggagcaggccctcgcggcgcccggcaccccctccacgcgcgcccctcttcccggcttcgcgctcgccctcctcactcgcttctccgccgctctcccaacctccccagcccactccggtcgcctcctcccagtctgcatgccacgccaaccccctccagtcccgctgccattttaactcctgagtggccagaggccccctctacctaacgcacacacacccgggaggaaggagttgggtggggccagacgctaacgcttgagctgtccttgtgcctagagacacaaggcttggctgagagaaggggcacagcccttgggtccgggaagagaagggttggcttctctcatactgcctcggaccctcttgcaaaggccaggagacgaatggggaattcagcagctttgtgaggacaggtgcagctcacagtcacagcatgcacctaagatcacatttttgctttgcatggtgctaccctcccgaagttaacagtggactaaggaatgtagtggggtgggtgagaatttgtcactgggcccaggcacctctcaccctaaagaatggagtggaagacccctttagttgtcatgcttttccagcattgcatcctgagccgtgcagctctagcattctggaagattccgtcctggctctcaatgaaggaggtcaatttcagtcaggaactggcaggcccagttaggggtttggcttcagggttccccactctgccagctggacatcatgaagactgggggaggaaagtaagaaggtgccaaaggtgggtgctaggctgctgcctggtggcttagaaaagctgggtgactgccactagaggagggcaaaggcccaatgcccaacacccatgccttggtggggacttcagcctggaccactcagaacagacatcacaaactcggctccatggcaggccacaccctactgatgggtctggaccagagcctgcagaaccaacaacaggggaatggatgaggtggaggccaaggtgtggagtcctgtgaggagtggcttccctgggctgcctgccgtcatccagtgcttgagcttctggccctgtcttttccaagggtacagccagtggtgactgccatgcctggtggcttttgtgaagttggcttgaaggtctgagttctgtatgcacagaggggattctcaccttcatatattgaatgagcacatattaagttcccactaaaccacccccatgttcccactctccacccctgctacggagcataatggcctcaaggagctcagagtgacaggttggaactatatgaaaccaattttaatatttcaagacgatggaagtgccatagaaatacaaaaagaaaccaccttaatggactagcattattcacaaaaggtttaacggaggagctgagtctccaactgagcctagttggagggataggatttgaactggaagagaatatggggaccagcaaaggcaggaaagtggagacaagcagagtagaatgggttgtctggagggtagggggcaagggaggaaaattatagagctactattagatgccagccttttctcatctctgtcatcttagactctgagttgactaatatccccttttaacagaccgggggatggaggcccagatcgtttaaggcagtagcccaaaatctgtaggcagaatgtgagacctcattttcacagtgcgacaatgccacattgagtatacagggtgggagcagctgatgaagggcccgaattgccaggctcagcagtttatctgtggacccatcctcaggtgatttgggatgaaagaggcaggaggatgggagactattgaggtagc

SEQ ID NO: 1217 - DNA, 4001 bp, Homo sapiens
tctggggaagaatgaggagggtgagagaagaggaagagcagtgtgagggggaaaagggaagtgaagagtgttagaggaggaaagtgaagagtgaaggaaggagaggaggatgagggggaggaggaagaggggaggcacagggaaaataggatgggaagtgaggaagaactgtgttgaattagagagggaacctgctgtactagcctggatggaattagcagatctctgagatcttactgccactcggtgtttccccgggaggagactgcattagggagagggtgtggatttgggggtgttcctaggtgccagaccctgggcagacctcaatctcccaggcactgaggcctttagttccatgctttgcaaataatgaggacccatcccaggaccagagagagccctccgcaagaaggagaagcctgagtcagcacaggggaaggaagaaggcctaggaggctcagatccctagctctgcccttctgtttccatcgtttcgccacaacagcacctggccaggaaagtgggtcaggccacccacatgtggctttttctggtagccacagggcccaaaggcaagggggctccagtgcccagtgcagagcccacctctaccctccatgcccagtgctcttttttgaagggatctttaagaagcagtgggcaatgggaggagctcctggccttcttattcagggacaaaacgctgggccagagcccatcctagactggcgggaaaggggggcacggagcctgccatcggcctgggtgcatggggagacctacatcttcccctatgacagtgaccaaactggcagggagtcacctctactgccctgacctagggaggctgttctcctcaccaccctaggtcctggagttctcaagcagagggcctgtcagtccatctctggcaactgagcgctgtgcccagcccaccccctccaaccctgccagtcgcccagttagaagctgcgttggctccaacagatgggagctgcggcagcctgaggaacagagcacaaagcccagctgacattttccttcctgttcgtttgggtgggggaggaagggtagggagcacagtgctacccccggggcccctccccaggttccgggtctcctgcacctctttagcttctccgctcggccccagatggagctcagttccctcaccccgcggctcctcgccggctgggcagccagagcctgcgccaccctttgccagcaggacagacggcccacctgtggctggccagcccatcctgtctcctgggtcctgcggtgggctcagagccacccttccgtttccgcttccccctgaccgagtccccaggctgagccccaggccggcccatcccccaccccaaaggtcccatcccaggctgcggtcggaccccagccagccggcccgggaggagcctagctcctggttccagatacttcagacagacccaaggccaccttgtccctccgcacagactcgcgagctccaaggaggagaaagtccccaggctctggagcgcttccagcctgccagtccgcccgtgtcacgccctccctaacctcactgccacctctcggctcctccacatctccagggccccactctacccagcaacagtttgggggaggttctggcctctccaggcgaaggcccaggcgccctctccctggccgcttctgggcattctccagccctccgtccctctgcccctcggccgcctccctctcccaagtctccggctcccccgcaggcgtctcggcggaaggcagcggccggccctcctctggcccccacccgggtcaggcggagctgcggtgccggggcaggagccaggagccctgaggcggctgctccggccgctcccgccgcgtacgcctcggccacgccagcgacctcggtgtccacgattccccggcggcggcggcgctgcccaggtcagccccgaagctgcacactcaccccgtgggcgccgggcaccgtctgccgtctgctgcccgcgcggccgcgctccgctcgccttccgcccggggccgggctggggacgctggtccgcgccctcccgccgcgcgcgccgtctgcacaggccggggaggctcggcgggcgccctccccaacgtggagttatcctgggagcggctccagggcccagccggtgagggcgatggcagaatcccaatccgtccccaccccctctccgcgccctgggcgcgtcgcggccggaggctggcgggcgagagccaggcgctccttgagagcgccgcgcgttcgcaggtgcccggagcaggccctcgcggcgcccggcaccccctccacgcgcgcccctcttcccggcttcgcgctcgccctcctcactcgcttctccgccgctctcccaacctccccagcccactccggtcgcctcctcccagtctgcatgccacgccaaccccctccagtcccgctgccattttaactcctgagtggccagaggccccctctacctaacgcacacacacccgggaggaaggagttgggtggggccagacgctaacgcttgagctgtccttgtgcctagagacacaaggcttggctgagagaaggggcacagcccttgggtccgggaagagaagggttggcttctctcatactgcctcggaccctcttgcaaaggccaggagacgaatggggaattcagcagctttgtgaggacaggtgcagctcacagtcacagcatgcacctaagatcacatttttgctttgcatggtgctaccctcccgaagttaacagtggactaaggaatgtagtggggtgggtgagaatttgtcactgggcccaggcacctctcaccctaaagaatggagtggaagacccctttagttgtcatgcttttccagcattgcatcctgagccgtgcagctctagcattctggaagattccgtcctggctctcaatgaaggaggtcaatttcagtcaggaactggcaggcccagttaggggtttggcttcagggttccccactctgccagctggacatcatgaagactgggggaggaaagtaagaaggtgccaaaggtgggtgctaggctgctgcctggtggcttagaaaagctgggtgactgccactagaggagggcaaaggcccaatgcccaacacccatgccttggtggggacttcagcctggaccactcagaacagacatcacaaactcggctccatggcaggccacaccctactgatgggtctggaccagagcctgcagaaccaacaacaggggaatggatgaggtggaggccaaggtgtggagtcctgtgaggagtggcttccctgggctgcctgccgtcatccagtgcttgagcttctggccctgtcttttccaagggtacagccagtggtgactgccatgcctggtggcttttgtgaagttggcttgaaggtctgagttctgtatgcacagaggggattctcaccttcatatattgaatgagcacatattaagttcccactaaaccacccccatgttcccactctccacccctgctacggagcataatggcctcaaggagctcagagtgacaggttggaactatatgaaaccaattttaatatttcaagacgatggaagtgccatagaaatacaaaaagaaaccaccttaatggactagcattattcacaaaaggtttaacggaggagctgagtctccaactgagcctagttggagggataggatttgaactggaagagaatatggggaccagcaaaggcaggaaagtggagacaagcagagtagaatgggttgtctggagggtagggggcaagggaggaaaattatagagctactattagatgccagccttttctcatctctgtcatcttagactctgagttgactaatatccccttttaacagaccgggggatggaggcccagatcgtttaaggcagtagcccaaaatctgtaggcagaatgtgagacctcattttcacagtgcgacaatgccacattgagtataca

SEQ ID NO: 1218 - DNA, 4001 bp, Homo sapiens
tttggttagaggggtgggcccaggtatcctattttgtaaaagctcccggctgggcgcggtggctcacgcctgtaatcccagcactttgggagaccgaggcgggcggatcatgaggtcaggagatcaagaccatcctggctaacatggtgaaacccccatctctactaaaaatacaaaaaaattagccaggcgtggtggcgggcgcctgtagtcccagctactcggggggctgaggcaggagaatggcgtgaacctgggagacagagcttgcagtgagctgcaagtggagtgccactgcactccagcctgggcagcagagtgactccatctcaaaaaaaaaaaaaaaaaaaaaaaaaagaaagctccccagataactccaaagtgctgaggggtactggttagaaatgcgcaatctcaggtctctccccaagcctgttctgagataaaatccactccttcactgagtggctcactgccatcttccacgctggctggaaacagactgcattttaacatgaccccctacgtgaattagatacacgttaaggtttgagaatcattggttgacaccagtagttctcaaacattagtgtgtatcagaatcatctgaggggcttgttaactcagcttgctgggccccactcccagtttgactcaggtctgaggtgaggcccagagataaagtcattttgaacatgttcccaggtgatgctgatgctgctggtcaggggcccacactctgggaactattggtctacaccatgcagctgttatgtaagtagaaattaaggtaatgaggccgggtgcaagggctcacgcctgtaatcccaggattttgggaggccaaggcgagtggatcacctgaggtcaggagttcaagacccgcctggccaacatggtgaaacccagtatctaccaaaaatacaaaaattacctgggcatgggcgcacctgtaatctcagctacttgggaggctgaagcaggagaatcgcttgaacccaggaggcagaggttacagtgagccaagattgtgccactgcacaccagcctgggtgacacagcgagactctcagaaaaaaaaaaagaaaataaatctggataatgaattggggaaaaaaacccccaaccggtattatataaggtacataggttttgaaggtagagaaacctaggttggaatccccactccacccctaattatgaaaacctagaaaagttaatgtctctgaacctgtttccacatttattaaactacaggagaaacaaagctaccagaatcacactccactaaaggtactctcctttgatttcaacatgccctgataatgtattagtgcactatgtcttacctatcccttattttcagacctgagttaaagggggtggaacgctctctctttacgacctcactcagcatcccgtccagggctgtgcattgtggcactgagcgtggcaagccagactaggccagtgacgagggggcctgggagctaggtccctgggcatggcctaacgaccagccacccggctgcagcctgatgaatctgcgatcaagcaaaggtatggggctgctgctgcgactgcaaagagcagtcaccggacctcgagtcaggcccgggttctagaacaggctttgccacctcctaggagggcgatcacttagcaaaccacttagcttctccaagctagctaagctaccggtaaaacgggatgagcaccgcttactcagagcagcgggagcgggtctggggaaaggagctatactcggtaaatggggaagaaaacgcttcctgggctccggcacctccttccggaggtcctggcatcccccgcattccgccccggggctccctgcaccgccgacccggacccaccacgcgacattccttccgctttccccgtctgggtcgccgccgaagctagcgggcgcctggactggctgcctcccgccggctgcagcaggacggagaaaccatgccggcgaccgggccgctctgtcctccgggcgcagagtgcgtcagtgctctgcaagtcaccgcgtcacggagaaactacaatccccagaatgcttcgcggcgcggggctcgtgctccgcaaatcccggcctgcgtcattggagtctctttcactagagtcgttcattcattccgcacgcattcattgaaccggcgacctgggccaggctccttcccaggctccggcatggagcagtgaccaagatcaagtggctccctgagctgatggcgctgcaggggagagagtcttaagaaaacaaagaagaaaaatagggaaaaatttcttcagaagattaaaggtgtgatgtgatggtgacaaggtggtcttttattggattgtcaggggtgccctgagaaggtgacatttgagttgagattagtgacatgaagccaagcttgtgaaaactatgggaggagcattgcaattagcgggaacagtttgttaagtaaaatttataggaggcagggccgggtgcagaggcccacacctgtaatcccagcactttggaggacaaggcggaaggatcactggagcccaggagttcgagaccagtctgggcaacaatggggagaccctgtctctacaaaaaatagaaaaaattagcccaccgtggtggcgtacacctctggtcccacctacttgggaggctgaggcaggagaattgcttgaatccaggaagtggaggctgcagtgagctcagaaagtaacacttcattccagcctgggcaacagagcaagactccgtctcaaaaaaaaaaaaaaattggaggccattggtttgaacagggctcctgcaccaagcccaacagaaccaaaatggagtcactcatgctaaagttctacatcaccaagtggaaactaagttgtttatctgatattccgataaatcagaagagtgagagatagctagatctccaaaccatcctgttttagctggcaggataaggaagtcccctctgctttagccttcaaagttacaaggaaagtaactttgaaacaaccaatctttttgttttctgtttctgctttcctcagcccttttctggctgtaaaaccaatctcctctgctcagctcatttgaacactcattccattttatagaatgaagtgttgcccgattctagagttgcaaataaaagtcagatttaacaaatttggcaaaaaaaagtcaaatcaccaattaaaagttaaattttttcttttcacagttcatgcaaagaacctgggggaaatgaccttgacaatttaggaacacaggaaaggccagggaagctggggagagtggtataacaagaggccagagaggaagcaggaaccagagcatatagggctttgtgagccaaggtaaggagtttagatttcatggttaggagtgcagcctccggatacagtgcctaggttcaaatctactcctggctaattgtgactttgggcaagttagtatcttctctgtgcctcagtcttctcatctagtactagaagtgctatgacaggctattgaaagggagcgaagtgatttgatttacttgtagagacaggttctcaccctgtcatccaggctggagtgcagtggtgtgatcatagctcactgcagcctcaactacctgggctcaagtgatcctcctacccaagcctcaagaatagctgggactacaggcacacgccactgtgccccacctgatttacattttttaaaagtcactctgtatagccttggaaaaattactttcttcctcagcctcaatttgcttgttatgaaaacaaaaaattaggcctttctcagagaactgtaagatttaagtgaccttcattaatgtgtgaaagcatctggcacagagaagaagctcagtaaattaggcttcttggctgggggtggtggctcacacctgtaatcccaacactttgggaggccaaggcaagaggactgtttaagctcaggagtttgagaccagcctgggcaacatagtgagaccccatctctaaat

SEQ ID NO: 1219 - DNA, 4001 bp, Homo sapiens
tctgttttcttttcttttctcctccctccctcccttcctcccttcctccccttcttccccttctttttttgagacagggtctagctctgagctctgtcacccaggctggagtgcagtggtgcgatttcagctcactgcaacctcctcttcctgggctcaagtgatcctcctgcctctgcctccagagtagctaggactacaggcacacaccacaacacccatctaatttttgtattttttgtagagacagggtcttgctttgttgcccaggctggtctcaaactcctgggctcaagcgatctgcctgcctcggcctcccaaagtgctgggattacaggcgtgagccaccatgcccaccctgtgcctcagtttctccatctataaaatatcacttaacagggttactgtggagatgaagagagcatcatgtaaagtgctcagcaagctgcctggcacatgcactgggtgaaagttttcaaagcaagtagacagtctagataggctcttactaggccttgagctaaagtttgtacagtgaggcaaaggcaagcccccgcttaggtgggtacagtcacagccttgctctggagaattgggcactcacctccaaccttcaaggccaagtgcacacttggcattcaagtccttctcccagggggcctttcctgactgctccacccaccagactctcttcccagcctctcagctcaggcgtcggagccctggctggtctcagagcccccatgatttccttccccttctccttcacagaccagcttggcacaggctgggcacacaggaagactttagctgacgtactcactgtgggctcctggttgtgagccaggaagccgatggcaattcctcagttccccagaactggctgcaaagtagtggcaggtgtaaatcacccacttcaccggaatcagggccctggggaacctgccagggcctcggctgcccttttggctctgaatctagaccagcagcaatagagaaaggggagggttgctgtttcctcttctccccaagaatgtacagatgagatccaaatatccagtttacctggaagactggctgggaggagactgagtctgaggcgagggaatcagcaccagtggtgctgctactctctgtccctgctatgggtctaggaactttccattattttaagtagggctgggggatgtagaggaaacggagaaggttttcagtgcccctggtccaggtagttttcagcagataggcccctttacccacttcttttctgtgcggaacactgcggcctcacaggaacttaaaccctttcccggttagcagaaggagaaaaaaccggttgccttacaacggggactggcggggaataggtggcccatacaggcggggggaatttgtgctgcgttgggttctcagtacttcccagtcctcatctctctcctcccaattatttggcaggaataacttccaaaacccactgctcccaacccaagtcctcaggaccatcaacaccccactcactcttgggggacaagtaatggacgtcactccatctccaccccagcgtttacggattgatctgggagggattctgagcagttaggtggagagttttaactacctcctctccagcttaactctgggagcatgagttcgtccctcccggccctacactagggactcgtccccttggcccatggattcagcactcaccagctccatcttcagcgccatgatcttgtcccccaagtcgtggccggtgctagacgcccctgggagcagcagggcgccagaggttcccagctcacactcgcctcgcagcccgcggagcagcccttcaggggtcttcctgcccaccttaccctccacatcccgcaggtcaggcgtctgggactccacggtcccctccatgcgggcccaagcctgaaaagggctgggcgaccggacgccggggaccggctcccgggggtcctcccttcgccgctgctaaagcggagcaaaaccggtgggtccccgcccgcgcggcgcgggggcgggaggagggcgccgtaacactcagaaaagccgcgcagcaccgtctgtggatgtattcgagtgctgcgcacacaacctctggccctggattgcgtggggctgggcgattctggagttggacctgaaagagcactcggagacctcagcgccttcgccccaccctggcactgaatccagccaggcacacagcaggcgcccaatacatgtttgcagaatgaagtctaagcagcttcagtcagagatgtgggagtttaaggaacagcggtaacagagagctgcagagggcttggaagtcttcctggagcagaggaattgggtataaaacgatgactggattttagctagacacacacacacacacacacacacacacacacacacaccaccccccccccccaggggctagaattcaggctaacggagtagaaaagggcaaccagtactgaagctgaagaggtccacgttgggcttacaagcaagatgctccttaagcttgactgtgcgtatgaattatctgcggatcttgttaaaatgtaggttctgattttgtaaatctggggtggggcttgagatcctgcattttttttttttttttttttttttttttgagacagagtctcgctctgtcgcccaggatgtagcgtggtggcgcgatcttggctcactacaaacctctgcctccctgggttcaagcaattctcctgcctctgcctcctgagtagctgggattacaggcatgcgccaccatgcccagctaatatttttgtatttttagtagagacagggtttcaccatgttggccaggctggtcttgaactcctgacttcaagtgatccgcctgccttggcctcccaaagtgctgggattacaggtgtgagccactgcgcccagccaagatcctgcatttctaataagctcccaggtgatggccatgctgctggtccacacttcaagtaataagggaccacactttgagtaacaaggttacagaaaatggttctgagatgtttgggttttatttaacaggtaatgaacagccatgaaaactctggtttgtttaggcttttaattcaagtaattccagcccatggttgcagaaggatttacaatgagaagatagttacccctaccctaccctttcacacctctaggcccactcccaattggcaaaaaataacttttagtttttttttttcttttggtgttcatacccataacgttattgtttagagttaactaaaagtggttgccaattgggagtgggcctagaggtgtgaaagggtagggtaggagtaactatcctcttattgtaaatcctaccactattttttcttttttagagacagggtcttcctacattgcccaggctggactcaaactcctgggctcaagcaatcctcctgcctcccaagcagctgtgactacaggagtatgccaccatgcccagccacactacttctcaattttaaacattcatctgctgtttattgtcctattcagataaatatggatatatgggtttaactcacactctgtagttcctttcccccattggcaatatatatttcttttcttttctttcttttttctttttttttttttttttgagatggagtctcactctgtcgcccaggctggagtgcagtggcacgatcttgactcactgcaacctgccctcctgggttcaagcgattctcctgcctcagcctcctgagtagctgggattacaggcacgtgccaccatgcccgactaatttttgtatttttagtagagacgggggtttcaccatgttggtcaggctggtctcgaactcttgacctcgtgatctgcctgcctcagcctcccaaagtgctgggattacaggtgtgagccactgcgcccggcctggcactacatatttctatcactctttttagttcatctaaggttacctttgtaattaactttttttaaaatttagatagagtct

SEQ ID NO: 1220 - DNA, 4001 bp, Homo sapiens
attaatcactggtcaacaatgaacctgtgtttgctgccttcttcatactccaacccattcccttcccagctcactatttccagcttttcaaactttagttactatgtttagaaaagtgatttaattttagaaacctggaaaattcttctaggagtaaattcttctaggagtaaattgagcaaaaccttaatctgcccccaggggaattctgagcaaaacaattatttctgacaaaagaagaattttctatgggggtaattcaatttaaccacatgaatactaccaaagttgcaaacaaggtgacagaaggcaatctggaacacaccttccagattccccaaaaagaaatgtcctcctaaaatccaaacccctccctccctaatttgaggtagtcaaatcttattaggtgatctgaattctcccggctctgacaccagtccagctccttaggccagaactgcagccgtctgtaaaagaaataccctgagcaaaccccacccctcaaaacatccccaaaaggcagggaggtccagagagtattttctcctccaacgacagataaggcaccaagggctcagcagcgcaatccttctcccaaggtcattcaagtcagtgaaggtgcgacggtggagctgcaggcagtctggccttctggaaatcacactacaggggttttgggggtgcctactctcttcccctctcccacccgcaagggtgagcactggcctcggcattcccgaaacaagccacaacaagctctgcagtgttaggaaaggggttgacgcgatgaagaaacagatgctccaaagcaagatggtctttctcggctcacagaggctcctccaaggttatgcacagaaaccgcagccacctccaagagctctaaaccgggctccgaagccccagcgcggccgctgcgggtcgccaggttccctgcaggcaggctccgcagccagaggccaccagccccagaaaccgcacttcattcctgcgctccgggaagccatggctccttccctgcccgggcggctgggcgggggccgggggtgcgccgggaggcgggccccgcgctgcggaaagttcaccgcggcgggcggggggaggccccggccccgctcgccggcgtccccctgcagattccaccattaattagtcctaaggactgtctactggcaacttaaacaaagcgaatgcctcgaattccttcccggcccagcggtctggctgcgagaccagcagagcgcccgggacgcgggccggcgcggccgacagctgcggcggccgcgggacccctccccgcccggcccgcggcccgcgccccgcgcccgcagctggccccgcacgccggcccgacgcgctcccaaaccgccctcctcctcctgctgctgcagctcccgggcccttcctgtctgatcacttccttcctccggtgcccgccgggccccgcgcagccccctccacggccgcctcgtcgccccccgcccctgtcggcccgcgccccctcccccaaccccaaactctacccccgaaactcttcgccgccccctcgaaaatgtctcctccgcgtctctgccccaaacatttctcctcagagtctcgctcccaccaagaagtctcctcagaaccttccctccccctcccgaggaaaaatctcctcagagtctcttcctccaactccacaaacatgtgctgggtctcgccccaaaaggtctcctcctgagcccttcctccaaaatccattccaactctcccccaactccacaccccatctctcctcggctgcgcccgcggtttcttctgccccgtggccgcgggtgccccgacctcacccgggaccggcctcccaaccccgccgccctcccctccccgcgccgcgctcccgccgccgccgcctcacggaccctcacctctgcggccccgaaccgcgctcccgccagcgaagggttccgccgctcagctgccagcgaccggcgcctcctctggctccgcgggactgacaatgaggggcggggccaaattgtgacgtcagcgttctggaaggcggggtctttgtgatgggcggggttgtctgtaggccccgccccctccgtcctttttttcccttcccaggacttagactccaccaagtttttattgcctccgtagctgggtcctgtgctaggcgccctgggaaatcgaaatggaagacaagacttctcgatttcaggagggacactttcggcccgcgtggtggctcaagtctgtaatcccagaactttgggaggctgaggcggacggatcgcttaaactcagaagttcgagaccagcctgggcaacatggcgaaaccccatctctataaaaaatacaaaaattagccgggagtggtggcgcccgccggtaagctaaagtaggaggatcgcttgagccgagggaggtcgaggctgcagtgagccgtgatcgtgccactgcactccggcgtgggtgacagagtgagaccctgtctcaaaagaaaaagaaaaaagcgggacactctcagtagggttgtgaggattaaatgagataatcaatggaaaggtgcttagcctagaacctgatatggaataatcactcaacaaatcctatttctattactctgcaaatgcagagaaggaactcagctcagactcgggaggcatgggttcccgtcccccactgtgctattaattctttgtgtgatgctagacaagtactttcccatctatgttcccgattttcatcttctttaaaatgggaagggggaataaccagatgatctcaaaatcccctcccatacttctatgacatacttcctttaagtctactatctaaaaggcacctagtgccctgagaagccaggaggaaggcttcaaagacagcccaagacccacacccagcatagtacaggacacagccagagactgctctcgctgcggatgccctcccacacgctggcacgcagcagcattcacaagccaggacacagatgggctgagggctgcttcctctctgactacagcagcatggttggtctcttgagacatctcttgtgtaagctctttattgcctatggaataaaggccaaagccctggcctggtatgatcacttcctacctttacacacacacacacacacacacacacacaaagtttatccaaacttctcttagcacacccactgctttcccacatttgaccctttgctgaagctcttcccctgctgtctcacctcccagcttctcccagccagaaagcaatcctccctgttctgaataaccaataacattgtgtttaaccctcacgtgggcatgaacactacaacttataaagaactgacctcccatttgtttcttagcacttcctggaggtcagaacccacacatgtttgtggagctcaagctctgatgccagaaaaccctgggatcatatgttctggggtcataatagccatctctgagcctgtcttctcatctataaaatggggataataatatagtcttgtggtgtttgttttaaaattacctaagatactgtatggaaaacatcaggcacagtgttccacaaacaatatgaacaatatgattgtcattcttattttctttttctttctttttttttttttttttttttgagacgaattttctctcttgtcgcccaggctggagtgcagtggcacgatctcagttcactgcaacctctgccttccaggttcaagagattctcctgcctcagcctcccaagtagctgggattaccggcacttgccaccacacctggctaatttttgtatttttagtagagacggtgtttcaccatgttggccacgctggtctcgaactcctgacctcaggtgatccactcaccttggcctccgtaagtgctaggattacagacgtgagccaccacatcaggcccctgtcattcttattttcagtagtattatattgaccaggcgcggttgctcatgcctgcaatcccaccactttgggaggatcacttgagtccag

SEQ ID NO: 1221 - DNA, 4001 bp, Homo sapiens
atgacaggtccccagtaccagtcattttattttgaattgcaccgtaggacaaataataaaagagcattcaaagattgcaaaactgaatttgactcacctgtctcttaatagtttccaaagaatgcacgtaacagtaattataataataacaatcatagcttctgccaactatgtgccactatacgtgtgtgtgtgtgtgtgtgtgtgtgtgtatagatcatctacaatctgtaagagtgttgcatgatgcatcctactaactatattttacacttaagaaatagaggccctcatcactaataaatgatggagcaatgatttaatttcagatgttcctgatactaaagtgagaggggtcttttcactcgactgccttttaagttcctgaaatgactctttggagatacaaaagcatcatcctttcagaccaaaagagtgagatttgaggtcatcctaatcagtggagccagaccaatggagatgcctctttgctctgaactgtttgaaattcactgcattgatcatttgcggcttggatgaccttgaatgtagcttatttcaggtttgctcaacacaatcaaggaacaccccaaaggttggaggtaaacataaacagccttgctgctttctgtgtgttttgatgagccaagataaaattgaaagtgaaaagaggtcagactggacctcagctctgaggtctaggctcctcgttcacccatatctgcatctaggagtgtttctaaagctcccttcaggcaccaactgccaacccccactgctctcagatctctagtgctacctgcaccatcatccctgaagccctggagaaagcgggagcacagaaggacagtagctgccacagtcccaggtggctgagatcctctctggggtactggattggctctatctgctggacagtggggttccgggccatgcagcggagagatgtttcccaggagttgggccttgatagggaggaataaggttgaggagaaaaggatatccagataaacgccaccttgcccatggtcacctaaccgcgtccaggtccccagtgaaacctcagtaataaagccagcatatatgataaccaaggcaggatacatagaaagaagctccagaagttctctccatccctaggaaattgctaggtggcttctcatcaggggattttcctggatccctctgtgggttttatccacaccatacagggaacaaactcattatatacttggcatttcttaggaaaatgtgagggcaagagaaatgtagtttgagcccagagctatttgagaccggggctagaatgttacccccttcatagtgcacgaatatgcacacatgcaaagtaatttctggcaaggagatgagtttcccgattttaccaacaagaactgggctcacgcctgtaatcccagcacttcaggtggctgagctgggcagatcacgaggtcaagagatcgagaccaccgtggccaacatagtgaaaccctgcccctactaaaaatacaaagattagctgggtgtgttggcatgcacctgtaatcccagctactcaagaggctgaggtaggagaatcgcttgaacccaggaggtggaggttgcagtgagccgagattgcgccacttcactccagcctggcaacagagtgagactccgttaaaaaaaacaaaaaacaaaaaaaagaatctcccaggcagggaatgcaactggcctcagaagaaccgcagtagcaagaagtggtggccataaagtggacttacccatgagcaggaagaggagagaggtctgtagaacagaagagaatatttgcagctgactcctctgtggcttactggagaaaggcccaggagcccagtcatctgtgtgactctttggtgccaccatgatgatctattttcagaactgagactgaaggaggatgcacttaccacagcttccgcacgtgtcacagcttctgcatgtgtatatgagtgtgtgtgtgcatgtgtatgtgtatgtgtgtgtgtctcagagggagggttgtttatacaaaacaccacagactcctcccatctgcgcaggcaggtagaggtcccaagtctattcagggcctcatttgtgactgatgtggagcatcacttgctttgacatcaagggacttgggttctaaatttggctcctaaaggtgactgctaaagatctgtacctcctggcattcatgcctctgtgtaatcacctcttctttagtgtggcctggatttagtgacttgcttcaagtgaatagaatgtggcagagatgtgggatgggtcacttctgagattaggttacaaaaaagctgtgacttccatcttgggttagcatgtgtgtgcatatgcgctctctctttctcttgccctctctccctctctgtctttcccactatctctgtctccctaccttacactgaggggagccaggtattgttttgtgagatactttagggagagggttccaaaacaaagaacagagggaggcccccagccaacaatcggcgaggagctgattcctctggccaactgtccatgaggactgaggctagccaagaatcacatgagtgagactggaagtggatcctccccaggaggtccttgaaatgactgcagccctggctgacaccgtgatgttagttgtgtgagtaccttaagccagaggcacccagctaagccatgcccagattccttatcaagagaaactgtgagataataaatgtttggtttttaaattttttttcaattttttatttttcatcaaaaatgcttattgtttttagctgtgaagtttggggcaatttgttacacagcaacagataactaatacagtgacccaatacattttctattttgctcaaggcagtttgtgctagctttctgtcacatgcaatgaaggacttttaatatggacaaaggcatcagggagactgcaatgggggtggacatcgtatgtgacagcgtagaggtgactgagttgaaaaggtaggctggagaatggcatgattccctatatcctgacttgggaaactgtctttttctcctccttcttcttgtcagtagcgtaatagctggccatgctatggtttgtgtttcgggcttcaggtcatttgtttacttaggctgtaacattaaggggacttggcaggaaaacttgaggctggcagaatgtgtagttttagctaatattcgatgaaagcttacagagtgctagtccatcttctgacactttaacatattcactcatttgatcttacaatagttttatgagatatcttttatcatccccattctataaatgagaaaactgaggtggagaggggttaaatagcttactataagttttatagttagtaaggacttgaacccaggaagtctgggttcaaaggaagaagggagagagagagagaaaccattaagataacaggcttatgtccatggaaagcatctttagaggctggtcatgatctgatgttgcacaatattgaaagtgacagaatctcgaaaatctttaaattttgtgcactaggagcgtgtcttgtttcactctagccttggtcctgtgactagaacatgggctgtctagaggggattgcaggacatacggtcaggagaggttaccagagcccagataaagcatcctgttaccaagctaaaggcaacaagaatccagtaggagtaggaagcttcctggagctgcagagtggagggagaatgggtggaagggatgagcctggggatgagaagacaggtgcggaagctattgaaggagtctgggtacagaacatgagagcaggaacagtctgcatgggaggcgagggcaaaggcagaagggaattcagagagattggtaataataaaaatcattactaacatttattgggtaattactatgagtgagcctctgtgtttagaactttacatatgttttctcctttaatcctaagatagaccctatttggatgatactccaattatccccattttagaga

SEQ ID NO: 1222 - DNA, 4001 bp, Homo sapiens
  modified_base (1335)..(1335): a, c, t, g, unknown or other
catgtcatacacagcacatacaccacacacaccacataacatcacatgtcacacacacatcacatgacacatacaccacacaccccatgcatcacacacacaccacacatcacatgtcatacatactacatacacacaacacacacaacacataacatcacatgtcacacacatcacatgacacacaccacacactccacacatcacatacacactgcacatacactacatcacacaccacacaccacacatcacatgtcacaaacaccacacagcacaccccacaccacacacatacaccacatacacaaataccacaccacacaccacacatacaccacaccacacacacttcacacacaccacacatcacatgtcacacacattaggtacacaccgaacacacacaacacacattaaatgccacatacaacacaccacacacattaaacacacaccccacacataagtcacacacatcacacacacaacacaccatgcgctaaatacatcacacatactacacacatgcaaatcacatcacagacaccacatacgcaccacaccacataccacacacacgacacatcacatgccacacatcacctgtcacacacatcaaacacacacacaatacaccacacacctcacacacgtcaaacaaaccccacacacaccatatcacacacacatcacacacaccacacatgcaccatatgcctccacacacagagacacatacacatcacacaccctcacacacacacaccccacatgccatttataccacatgccacaaacattacatgcacacaaaccatatacacaatacacaaaccacacacaaacaccacacaccctaccctgataccctggttgacttattagagattggtaaaaaggaagggaaaccagtcggtctgggagaagaggcccatacatgatgccaatgaccccaccatttagagatccaaggaggaaaataaagcacatctggtctggagcttgtagcagacgtgcgccagcccctcacccctccaggcccggtgcacccctacatgcccgggtgcacccctccaggcctggaaccccagctgcttgcttttctcctcagtgggaaaagagtttcagggccatggccttctgggaaagggcctctcaggtcttacagtgtgatggaggaggggaaaggagaggatgagatgagatgagaaggagaccccagcagcccatcaagtgcacagatcacctcagcctatggtgaagacctgaaactagcctcattttcagggagaattgatggaggcccagagaggtcaggacttgacccagggncacctagcagagaaacagagcctgggagtgaccccatagcaggacccagggccgtgctcaacacctctgtgggtaagagggaccagtgaagctggggctcaaggcagggcccccacctgggacatgagaagaagtggcatcttaggccgtttcactaggtacttcccactggcaaagttttattgcggaatcttttcgacagcctggcagggtcctgctataattgctgtcatcttccacagagaaagctggagcctagagaggctgtgaggacacaaaaccacacagaatgaagaatgtcacacacagaatgatgcacagaacacgcacacactacacacaaaccacacacacagtagcagatggcaaaacaacaagaaaactacatccccagcccacatcctccctgaactccagacttccctctcctgagcatacgactgcctagggcaatgccaaaggagcaagagccgcaagaatgtcctggacttggccggggaaggacctgagctggtcctgaatgcccttcctgcggtttcagcttctcccagggctcaggccccggcctcgcagtcctctcaccttctggatctggcctggtgactgtcctacagaaggtggttcccagtagaggcttagggctggtatgggagaggccttatatagcaggtggctgtaaaatcaaaaagcacagctgtcttctggggtgggacctctgggtcagacaggctaaggcttctggctctcagactgtgccctgcccaatagagctacaggctgcccaaccctttggcatctgtgcagctcgtgccctctctgagacctctaggaattgggaacaactttggtcaaggcctgcctttggcaaaatgtaaacaggagtaaggtatcttccagcattgtctgtggccttctaagtcaattccatgacctgctaatgacaagcacctaacaacctgctaacagtcaccatgattagcccatttatagatgagaaaaccaaagcacagaaagagagccataagagatatgctcatgggcacacagccggggcacagtcagaactcagagctccgaatcagactatgtggggtctgtgcaactcaggaaagggcctcagtttcccacaggcaagtgtcttaaccttgttagatttgagggtcctccaaccaagatgagtgtaaactcactgtgcagcctcatagtgtggtagagggaccatgacgtgaagcccctgcctgcagtgtgctctgcacactgggtgagagcccacagcagccatcgagagagtctttctggccaagtgatctgagcagctactggtaacagcccaggtcaggtcaactgaggcctctctgtattagtcaggttctctgtcctctagagaaggtgagtttatatatgtatgaaggggagttcattaaggagtattgactcacatgatcacagggtgaagtcccacaataggctgtctgtgacctgaagaccaaggaagccagtctgagtcccaaaacctcaaaagtgcagccttcagtctgtggctgatggcctgagagcccctggcaaaccactggtgtaggcccaagagtcccaaagccgaagaacttggagtccgatgtttgagggaaggaagcatccagcatgggagaaagatggagactgggagactcagccagtctggtccttcctcgttctgctgcctgcttttatcctagctgtgttggcagttgattagatgatgtccacccagatgtaggctgggaggctaggccagtctagccttttgacatttttctgcctgctttatattctagcagagctggcagctgatcagatggtgcccacccagactgagggtggctctgcctctgccagtccacggactcgagtgttaatctcctttggcaacaccctcacagacacatccaggaacaatactttgcaatacttttcaatccaatcatgttgacactcaatattaaccctcacactctcccagtctcctcacactgtgccatgggtgctcctggttttgagtgtggacttgagttatcttccctcctcatctttccactgtgctgacactttatacacacacggtggggagtgggaggagcccactcagccgaggatgcagaggttgaggggcacacatcataccagtatcccccagcctgcatttaaaccttgcagttccctgctcttgaaaataccccttggggatggctacgctacctgtgtctcagctctctcttccttccccaaactcatgcattcattcaacaaacattttttgagcaccctccctgtcttaggcctactgtaggaaaccgggaggtatttgtgagcaaaaagacaaagacctttgccctcctggagtgtagtctagagaggactacagacaacataaattaaagtggtaaataagcaaatcacagggaaagtcagaatgtggtgactgctctggcaaaaagacaaagagtaggataagtcatcaaccatgctagggggtgagcaggtgcaggcttccactttcaatgaggaggttgtagtaggtctcatggagaagacaaaatctgagttatttttataagcagagactctggccatctcttattctctcctctcctcaccatctgccttcaggctgcttatcacagcatttt

SEQ ID NO: 1223 - DNA, 4001 bp, Homo sapiens
ctgtgcctgtaggagggacgggagaaaaggctccgatgtggtaggaagagaaggcctctccagtccgctgctgggccaggacccctccttaaggagcacccctcctcagtcacttaccctgtgtctccaagtccatgtaaaaaaataacctggaaaaggatgggaaatggggagacaggaaggcttcccctaggtcctccaacttctgcccacccctcccccacccccaaggacctgggggaacccaggtagcagccaaacaggttactaccccgagcctgctggcctcaggatactccctgctcatcactgccacctccattttcccacaccccctccagccggtcctccagctgctcccacagtgtctggccgtgggtgaaaggggacccttaccgcggccgtttcccgctcagctccagacacggtggcagcatcggtgagcaggggcacagacatggtgttaccacacatacaccacacggctccacggcgggggcctgcatacatcggggcggcggtcaagagcaaaaccaggcacaggacacactcctggcccaagaggccaccaggccatcagccccacacagcacccaggttctgtcctgggcacaaagaatagtcaagcaagaagtcccagggcacaggagaagaagtctgcctcagttccagggctgaaaggcagagacagcctccctagtggcccagaacatgtgtctctggttctggcccaaccacaggacctgagcttgctggagacaggcagaggcagggcatagggactgtagggcagggggcagaggggaggcagcggcacgcctgcttcattccccctctaactcctcaggggtgagtgccttccccctcctctccaatcatccctgggtccctgcctccccaactccgggccctatgggaaatggagagaaaagtgccagggaaaggagcttccatcccctactcagtgccgcctccaacccccatctcaacctccccccacccagcccccatccagccttcacagcagtttctggcccatccattcccagacccccagggggctgcccatgtccccagaaagcgtaagaactccacccacccccaaactggtgctccacgccccccctaaacggagctacctgctgctgctgccactgactgcaaacgagccctggcttgaccacgctctgggactcccaaacacacaaaagaatgtcaggctggctggcccctccccatcctcggcgtcctccaaactcgccggaagcttccactacctgcctcaagtgcctgcccacccctcccaactggcctcaccttccatctctgacccctgagggcagctccccacaatgggatcgttcacctgtgacccggggttcctcttcccatggggaatgcacctcctgccctgagctgcgattcccttccttctccaccgtggggacttgcacctcccgcccaggctccctcctcggaggggtgccttccccctgacctgtctctctctatacaccttgagaacttccaccctgacccaggatctcccgctccccacaatgggaacttctgttctgaccaaaggtcaccctacccagtgaaattttctaccctgacccaggactcccacctgcccacaataaagctttgtacctttgactctggggaagcccccgccccacaatgggctcttctatttccgaccctgaagtctgtctctttatactcagacacccccttgcctagccccgctccactcccgaagtccccaagactggacagcgccttcgcacctcactccccacccccatcccccccatcacggttccccctccccgctctccgggaccctcccgaggccgacctccccctacacgcccatcctccgcagccgccggctgggtacctccactccctgggacttccgaggccgcttgggcgattctcctctttctcccgcagacacactcttccccctcggccgcccccgccggaacttccgttcgagtcccgggaacccagccatcgcgctgccggaagtagcctggccgacagtacggaacccggaagcggggacccggcttcgctggatagaagctgccatgttggaggcggcggggctactccctgtcattcagccgcgcagtcgctgggttctcacccgctcccaccttgtagattcgagacagggcacccaagactcccacttgctaccaccacccatgcgcctcctggaggagggccgaccggaaggagaggcatccctcacactattgtttgcataaactttaccaccttcccatcctcatgggacacacctcttaaggcctcgggtgtctgccactggctttcatgccctattccaggatcatgaatggaatgacacactctgaaccgaagagaccttacagatcatctagttctccagccttgaagatggggaaactgaggctcaaggaaggcatgtaaacagcaacctcgggattccatttaaattctgcctctctggatctgcttcctgatatataaaatggtaataaccaccctgcctccttcacagctttgttggtaggcttaaatgaggttgtgtgaacatggtttatacagtaaaatcacagcgtgaggtgttaatcacgcaaaaaaggacctaggaaaaatacaaaggccgtatcaggagagctggacaggcactggcagtgttagcgctgcccttcacaagcaatgtcatgcagacagtgcacaaaacgctgccatcaagctgaagtggaaataggtatcagggaccacagaaaagtcagaaggcaggcaaactgagttgaaggagcatgtccctgagaatgtgtggggatctgcaaataggaaatgagtcacacttgaccctcagccgcttaggactcactctcccagcctaacctatactagtgttttctttgaacagaaagaaaacagtacagccaggcgcggtggctcactcctgtaatcccagcactttgggaggctgaggcgggcggatcacgaggtcaggagatcgagaccatcctggctaacacggtgaaaccctgtctctactaaaaatacaaaaaattagcctggcgctgtggcgggcgcctgtagtcctagctactcggggggaggctgaggcaggagaatggcgtgaacccgggaggcggagcttgcagtgagccaagatagtgccactacactccagcctgggcaacaaagcgagactctgtctcaaaaaaaaaaaaaaaaaaaaaagaaagaaaagaaaaagaaaacagtacaaagttggaagctcaacaaagcactttcccccaggcccagaggcactttggtcctaagtactcaacaggtcagggagcctacaataccaggattcggggcaggaaacctttgagcctatgggaccaccacaagccaaggacccaggactgaatgtcaaaagaaaatggagggtaatgtccccacttatggaagaatgaacagttcctcctgcaacctcgatcacctgagacaccatgacacttaaaacaaattcttcagagtgaagcttcaaattcagaggctcagtcccaggagctgtgattaatgctttaattagtggaattagtgaagggctagtctgctctaagatttttaactttatttttccccctactccaaatttaaacatagcccttcttttaactccaaaaaatgatccaactgaaataaagaggctgtggctgagtgaataggacccttcatgcttttcaagaacagcatttgcattctggtttatttcaggctgcattttagaaattttgagggccaacaaggtttggtggtagcagacctttcctaggacaggctggagaaacagtggctatatcctccaaacaacagcatgggccaatgcctcagaggaattctcccaaaaggatcagattcaacactaattccctttattacctgttcctgttttctgcaagggagagaatactgaccatatcaaatcccct

SEQ ID NO: 1224 - DNA, 4001 bp, Homo sapiens
aacataaccacatacattaaagttgaatgtaaaatcactagctgctaaagacctactggatgataaagacctactcccaacgataaagatgataaagacctactcccaataaggttttatttacttcagtggagatttaaatatataggaatcacattatactcgcatacttggcagaattctttgaataaattcttggttcaaagtacaaaggaaaaaatacatacatacatgactctgaattttagagacatacccttacaggttataaaaatgtaatctgaaattcaaaaaaaggataattattttaagcaaagaggtccaggggaaaaaagaacatagtctaggagttcttcctaaagataatgagaattgattatgagaaagggtacagtgttggggaatttctgggtacttataaatgaacactcttggagccctaaatagtactaccagtctcctagttattaagtaccgctgtcatcttacacacgtcaccttctaaatatatgccgtctttccctttaaacactattggacctcttcttccctatctccaaaacaatatatcctagttcaaactttttcaccttaccccaccaaagccctgagtttgaggtcggagagctttgggttctaatcccaaatccgccactactcacagtaacagctaagagaccttggccaagctgctgaacctgtctggcctcattttcaaaataaagagaatacctcccacaattgcccttttccaggtctctgcccagtacctttccaattcccttccaatcaccgtcccatttaagcctacccgtctcggctcaaagaccactttcttcgaaaagtctgacaagcttttcatcttccaaatgccttaataatgcctaaccacatttttttctcttacaattcacttggcaggaaaccatgcaccgtcttgtgatcttccatgcactgctgactcaaactaattggattgtttttgtttttaactttaggtaggccccctgaggacaccggctgcatctcatttctttaaaaaacatttcctgagagcttaccctgggccaagcactgggggtgcaaaggttgacacaagggcccttactctcataatccagtgggaagttcacaatccagtggggaagacagacaaaagtgattacagatgagtgttaagtaacgatacagcattaagcacacgttactaagggcaggtagtggaagatgcctgtccctgggggtcctgcccctgtagtctatcttggaagtttaatgacacaggcgggaaagggaaaggaaggaaagagaagcagcaaaaaggaaagtgagagaaagcactccagccatggcacagtggcttacagaaaagagataatctgtaaacagtatctaagttaactgtgaatctcaattgtctacattagtatgggagcctggaaaaagcaatgggcaattacgactgaaaaatcactagtagctgataatgaaaaacactaaataatttccctctagcagaagacttaccttactaacttgctctgtttaaacttggggcgaggaatggggaggtgtgttgtggggatggagggctggctgagcggcgggacacaaggccccaaagcgagggtggtggaccagtgaccgcccgatagaaagaggaagactaacgggggaggctgggggcaggtggcgctgcccgtgcatctacagccggggctggcgacgggggagccacccactgggccctatttgggcccggcgacacctccacttgggcaatactggggtaaccgaggggaggatgtttcccgagctgtagaaaaccaggacgtaaaattgaaatccacctgagccatgcaggaagatcagagaggcgctatgcctccctgccggcgacacgatacagcgctgcagaaccgaccccgacgcagccgccatcgctgatgccactgccagtcatgcggttccgcccctgcgttgccgcgcggggccgcgcacgcaaatacgcaggcacgcgcgggagcacgcccgggagcgcgcatgcgcagcgctgctggcccgctctctgaggagctttcaatactttggggtcaagtttgaggcagttgtaactgtactgagtttagttttgctaataatggtattctacgtgtgtcagcctcgtgtggacttctgtaatgactaatggatatgtttatatcctgagcatttgctgtaggaattttaaatgcaatcccaaaactcaagattaccttatttggagaaatattcgtgttactatgtttaaaatttaatagaaccatattttacctttcactttgggactcgcacaggatgtttgcagctcttgatatacagggtaagcgaagcatataataataagttctcttcgtgtctcttatttttaataaatagtttacaaagcaaatctaatttaatgagattctgctttatatacccattagaatggctcttatcaaaaaaacagaaaataagtattagtaaagatgtgtagaaattagaaaccttgtgcatagctgatcagaatgtaaaatgatgttgcggcaatagaaataatttggtggctcctcaacaagttaaacattgacttagcataggtactagcagttccacttctaggtatatacccaaaagagatgaaagcagggactcaaacaaatacttgtacttcagtgttctgtagcagcattattcacaagtaccaaaaagtggaaacaactcaaatgttcatctacagatggagagataaaccaaatgtgctatgtacatattggaatggaatattattcagcctgtaaaaagaatgtgattcggatacatgctacaacatggatgaaccttgaaaacattatgccgagtgaagccagacacaaaaggacaaataattgtatgattccacttacatgagatatctagaattggcaaatgcatagggacagaaagtgaaattagaggttaccagggactaagggaagagggagttgggaggttgttgtttaatgagtacaagagtttctgcttagatagtgaaacatttttaaaaatggacagtgatgatggttgtacaacagtgttaataactgccagtgaactatacacctagtaaattttatgtgtattttaccataattttaaaaatactaagaaatggaattatttcctgtataaagtccaaaacataggtatcttttaatactgaaggcagtggccccagcaggttgctcttgcctcatgtaaaattcaacaaaataacccagtaaaagcttaagtaccattaaacactggccttccattcattgtagtctgcattacattttagcaattacaacttaccttttatttgttccaggtaatcaccctacttacaggtaagtaaactgtttactatcaacattagttgccaaaatcagctctaagctatcatggtgttatattaataacaataccatcaacaagaatggtcctacatgccattagttaaccaaatcaaaaagaaattctgagtcatttctccaaagcccatagatctgcagcagagagttgtataagtgaagtccctgaggaggacaaactagggtaggctgagctctgatagccaattcttaaaagaaaaacctctgtcttttgacctgccttccccgtatgagttctagataaccttccctagccaggtgagaagagggcagtgctactaggaaagaccacttggagatatacagggaaggctttaagttctactcttagaactccatttactacctgaaaatcttactgtacaccaccccacgcttttgagacagcaaaaaatcagaatataattatttaagagtaatgattattaataataataagcaactaatattcatgggattcagtaggtgccaaaaactgtcataaattaattccaataaaactcagtactattactatctgcttttgtcaatgaggctcaaagaggtaaggaacctggctcaaag

SEQ ID NO: 1225 - DNA, 4001 bp, Homo sapiens
ctatagtatttatttacttcattagaacataagctccatgagagcagtgatttgtttttttcattgctgtatgatcagagcacagaacagtgccttacacatggaggctgtgatatatttcttgaatgaatggattcatgaatgaatgtctatcaggcagttagatgaacttgtctagagctcaaaaatagaatctatgaatctccacagaaattcaaaggttctatttttacctatacaccagtgacacaaatgggtatctctaggagacttctgtgattagcctagggagaaaaatgtagagtgaaaagaccttggaccaaatttagagaaaccccatcattaatggccaggtagaggaggatgagtctgcaaaagaaaccagaaggagcaaatcaagacagaaaaagaaccaggagagttttttgagaagaaagctgaatgcagatgacagttcacgtaagaggacgactgaaaatgtccattacattgagcgacatagagcctgagcttactggtgactttaccaagaagctactcagtcaacttgctgagccttaccacacaagaagaaagccataaacaagacacatggtttgggctttgtggacctactagcttagtgtggaatacagacattacattacataattacaagtatgatgactaccactgaaagaagaaccagtgtcctatgggagcaaataagagtgaattaatctgatctgagagactgaacaaaactcattaacctatcatttatttttatcatcttaaaagaaggtccgtctttagtactttattaatagaaaaggctcaaattaagttggctacatataatttacactcccatatgttcttctatggctgctatctcctagaagaaaatctcaagcttttaaggttttttatttgaaaacacaaaatctgtctttaacaacattttttcagcctcgaagagtaagaatgcagctgcaaaacaacatctatccattcccaatgtccactttttaaaaagctagtactttattccatagtaaaagtgttaaaactggttaacagtatggcaaaactgagtgtgataaaacagaattggtttgcccatattctagttaagcagaaaccaaacatctcctataacataaccacatacattaaagttgaatgtaaaatcactagctgctaaagacctactggatgataaagacctactcccaacgataaagatgataaagacctactcccaataaggttttatttacttcagtggagatttaaatatataggaatcacattatactcgcatacttggcagaattctttgaataaattcttggttcaaagtacaaaggaaaaaatacatacatacatgactctgaattttagagacatacccttacaggttataaaaatgtaatctgaaattcaaaaaaaggataattattttaagcaaagaggtccaggggaaaaaagaacatagtctaggagttcttcctaaagataatgagaattgattatgagaaagggtacagtgttggggaatttctgggtacttataaatgaacactcttggagccctaaatagtactaccagtctcctagttattaagtaccgctgtcatcttacacacgtcaccttctaaatatatgccgtctttccctttaaacactattggacctcttcttccctatctccaaaacaatatatcctagttcaaactttttcaccttaccccaccaaagccctgagtttgaggtcggagagctttgggttctaatcccaaatccgccactactcacagtaacagctaagagaccttggccaagctgctgaacctgtctggcctcattttcaaaataaagagaatacctcccacaattgcccttttccaggtctctgcccagtacctttccaattcccttccaatcaccgtcccatttaagcctacccgtctcggctcaaagaccactttcttcgaaaagtctgacaagcttttcatcttccaaatgccttaataatgcctaaccacatttttttctcttacaattcacttggcaggaaaccatgcaccgtcttgtgatcttccatgcactgctgactcaaactaattggattgtttttgtttttaactttaggtaggccccctgaggacaccggctgcatctcatttctttaaaaaacatttcctgagagcttaccctgggccaagcactgggggtgcaaaggttgacacaagggcccttactctcataatccagtgggaagttcacaatccagtggggaagacagacaaaagtgattacagatgagtgttaagtaacgatacagcattaagcacacgttactaagggcaggtagtggaagatgcctgtccctgggggtcctgcccctgtagtctatcttggaagtttaatgacacaggcgggaaagggaaaggaaggaaagagaagcagcaaaaaggaaagtgagagaaagcactccagccatggcacagtggcttacagaaaagagataatctgtaaacagtatctaagttaactgtgaatctcaattgtctacattagtatgggagcctggaaaaagcaatgggcaattacgactgaaaaatcactagtagctgataatgaaaaacactaaataatttccctctagcagaagacttaccttactaacttgctctgtttaaacttggggcgaggaatggggaggtgtgttgtggggatggagggctggctgagcggcgggacacaaggccccaaagcgagggtggtggaccagtgaccgcccgatagaaagaggaagactaacgggggaggctgggggcaggtggcgctgcccgtgcatctacagccggggctggcgacgggggagccacccactgggccctatttgggcccggcgacacctccacttgggcaatactggggtaaccgaggggaggatgtttcccgagctgtagaaaaccaggacgtaaaattgaaatccacctgagccatgcaggaagatcagagaggcgctatgcctccctgccggcgacacgatacagcgctgcagaaccgaccccgacgcagccgccatcgctgatgccactgccagtcatgcggttccgcccctgcgttgccgcgcggggccgcgcacgcaaatacgcaggcacgcgcgggagcacgcccgggagcgcgcatgcgcagcgctgctggcccgctctctgaggagctttcaatactttggggtcaagtttgaggcagttgtaactgtactgagtttagttttgctaataatggtattctacgtgtgtcagcctcgtgtggacttctgtaatgactaatggatatgtttatatcctgagcatttgctgtaggaattttaaatgcaatcccaaaactcaagattaccttatttggagaaatattcgtgttactatgtttaaaatttaatagaaccatattttacctttcactttgggactcgcacaggatgtttgcagctcttgatatacagggtaagcgaagcatataataataagttctcttcgtgtctcttatttttaataaatagtttacaaagcaaatctaatttaatgagattctgctttatatacccattagaatggctcttatcaaaaaaacagaaaataagtattagtaaagatgtgtagaaattagaaaccttgtgcatagctgatcagaatgtaaaatgatgttgcggcaatagaaataatttggtggctcctcaacaagttaaacattgacttagcataggtactagcagttccacttctaggtatatacccaaaagagatgaaagcagggactcaaacaaatacttgtacttcagtgttctgtagcagcattattcacaagtaccaaaaagtggaaacaactcaaatgttcatctacagatggagagataaaccaaatgtgctatgtacatattggaatggaatattattcagcctgtaaaaagaatgtgattcggatacatgctacaacatggatgaacc

SEQ ID NO: 1226 - DNA, 4001 bp, Homo sapiens
tttattaatagaaaaggctcaaattaagttggctacatataatttacactcccatatgttcttctatggctgctatctcctagaagaaaatctcaagcttttaaggttttttatttgaaaacacaaaatctgtctttaacaacattttttcagcctcgaagagtaagaatgcagctgcaaaacaacatctatccattcccaatgtccactttttaaaaagctagtactttattccatagtaaaagtgttaaaactggttaacagtatggcaaaactgagtgtgataaaacagaattggtttgcccatattctagttaagcagaaaccaaacatctcctataacataaccacatacattaaagttgaatgtaaaatcactagctgctaaagacctactggatgataaagacctactcccaacgataaagatgataaagacctactcccaataaggttttatttacttcagtggagatttaaatatataggaatcacattatactcgcatacttggcagaattctttgaataaattcttggttcaaagtacaaaggaaaaaatacatacatacatgactctgaattttagagacatacccttacaggttataaaaatgtaatctgaaattcaaaaaaaggataattattttaagcaaagaggtccaggggaaaaaagaacatagtctaggagttcttcctaaagataatgagaattgattatgagaaagggtacagtgttggggaatttctgggtacttataaatgaacactcttggagccctaaatagtactaccagtctcctagttattaagtaccgctgtcatcttacacacgtcaccttctaaatatatgccgtctttccctttaaacactattggacctcttcttccctatctccaaaacaatatatcctagttcaaactttttcaccttaccccaccaaagccctgagtttgaggtcggagagctttgggttctaatcccaaatccgccactactcacagtaacagctaagagaccttggccaagctgctgaacctgtctggcctcattttcaaaataaagagaatacctcccacaattgcccttttccaggtctctgcccagtacctttccaattcccttccaatcaccgtcccatttaagcctacccgtctcggctcaaagaccactttcttcgaaaagtctgacaagcttttcatcttccaaatgccttaataatgcctaaccacatttttttctcttacaattcacttggcaggaaaccatgcaccgtcttgtgatcttccatgcactgctgactcaaactaattggattgtttttgtttttaactttaggtaggccccctgaggacaccggctgcatctcatttctttaaaaaacatttcctgagagcttaccctgggccaagcactgggggtgcaaaggttgacacaagggcccttactctcataatccagtgggaagttcacaatccagtggggaagacagacaaaagtgattacagatgagtgttaagtaacgatacagcattaagcacacgttactaagggcaggtagtggaagatgcctgtccctgggggtcctgcccctgtagtctatcttggaagtttaatgacacaggcgggaaagggaaaggaaggaaagagaagcagcaaaaaggaaagtgagagaaagcactccagccatggcacagtggcttacagaaaagagataatctgtaaacagtatctaagttaactgtgaatctcaattgtctacattagtatgggagcctggaaaaagcaatgggcaattacgactgaaaaatcactagtagctgataatgaaaaacactaaataatttccctctagcagaagacttaccttactaacttgctctgtttaaacttggggcgaggaatggggaggtgtgttgtggggatggagggctggctgagcggcgggacacaaggccccaaagcgagggtggtggaccagtgaccgcccgatagaaagaggaagactaacgggggaggctgggggcaggtggcgctgcccgtgcatctacagccggggctggcgacgggggagccacccactgggccctatttgggcccggcgacacctccacttgggcaatactggggtaaccgaggggaggatgtttcccgagctgtagaaaaccaggacgtaaaattgaaatccacctgagccatgcaggaagatcagagaggcgctatgcctccctgccggcgacacgatacagcgctgcagaaccgaccccgacgcagccgccatcgctgatgccactgccagtcatgcggttccgcccctgcgttgccgcgcggggccgcgcacgcaaatacgcaggcacgcgcgggagcacgcccgggagcgcgcatgcgcagcgctgctggcccgctctctgaggagctttcaatactttggggtcaagtttgaggcagttgtaactgtactgagtttagttttgctaataatggtattctacgtgtgtcagcctcgtgtggacttctgtaatgactaatggatatgtttatatcctgagcatttgctgtaggaattttaaatgcaatcccaaaactcaagattaccttatttggagaaatattcgtgttactatgtttaaaatttaatagaaccatattttacctttcactttgggactcgcacaggatgtttgcagctcttgatatacagggtaagcgaagcatataataataagttctcttcgtgtctcttatttttaataaatagtttacaaagcaaatctaatttaatgagattctgctttatatacccattagaatggctcttatcaaaaaaacagaaaataagtattagtaaagatgtgtagaaattagaaaccttgtgcatagctgatcagaatgtaaaatgatgttgcggcaatagaaataatttggtggctcctcaacaagttaaacattgacttagcataggtactagcagttccacttctaggtatatacccaaaagagatgaaagcagggactcaaacaaatacttgtacttcagtgttctgtagcagcattattcacaagtaccaaaaagtggaaacaactcaaatgttcatctacagatggagagataaaccaaatgtgctatgtacatattggaatggaatattattcagcctgtaaaaagaatgtgattcggatacatgctacaacatggatgaaccttgaaaacattatgccgagtgaagccagacacaaaaggacaaataattgtatgattccacttacatgagatatctagaattggcaaatgcatagggacagaaagtgaaattagaggttaccagggactaagggaagagggagttgggaggttgttgtttaatgagtacaagagtttctgcttagatagtgaaacatttttaaaaatggacagtgatgatggttgtacaacagtgttaataactgccagtgaactatacacctagtaaattttatgtgtattttaccataattttaaaaatactaagaaatggaattatttcctgtataaagtccaaaacataggtatcttttaatactgaaggcagtggccccagcaggttgctcttgcctcatgtaaaattcaacaaaataacccagtaaaagcttaagtaccattaaacactggccttccattcattgtagtctgcattacattttagcaattacaacttaccttttatttgttccaggtaatcaccctacttacaggtaagtaaactgtttactatcaacattagttgccaaaatcagctctaagctatcatggtgttatattaataacaataccatcaacaagaatggtcctacatgccattagttaaccaaatcaaaaagaaattctgagtcatttctccaaagcccatagatctgcagcagagagttgtataagtgaagtccctgaggaggacaaactagggtaggctgagctctgatagccaattcttaaaagaaaaacctctgtcttttgacctgccttc

SEQ ID NO: 1227 - DNA, 4001 bp, Homo sapiens
agtggtgcgatctcagctcatcgcaacctccccctcctgggttcaagcgattctcccgcctcagcctcctgagtagctgggattacaggtgagcaccaccacgcccggctaatttttgtatttttagtagagacagggtttcaccatgttggccagactggtctcgtactcgtaaccttaggtgatccacttgcctctgcctcccaaagtgctgggattacaggggtgagccaccatgcctgacccctattcgttgttaatacctttacaaactcaccacattctgtcacttgtaatcattatttgtgtccctgttcatttctcattaggccataaattacatgaggacagcaaccatatagtttaagtttctatctcccagaaaagttatcacagtgctttaaatacagcaagcataaaaatgttggctaaattcaacatttgtttgagtgagatggaacaagaaaacaggggcagggatagggggagtaaccccatcaacttcaatgctgtacatttttacatctatccaatttcccccatgcatgacctgaaatacttggtgtagagtacctgttttgcacaaaggaggccaccttactggaaagaaggcagagcattgaggaggaaccaagagcaaggagaggtgggcactttaggaactgagaactaaaaatcagctctccattagttgctgtaaacgtttaatcactctcaacataaaattttctgtgtggttaatagagtcagacagacctgtttgaatcccaaatctgacgctcattatttgaccttagccaaactggttaaccaatccaagtctcagtttcttcatctgccaaaagggaacgataaatgtatacttgatacagatgtgagggtgaaatgagctaacgtatgtgaagccctcagcacagtgtctggcataataaaataggagctgttcctctccgttggaatagtagggcaggacttgtgcaacactgtgatgggaaaacaaagataaaggcagaacagagtgcaacacattaggaacatttcaggggaggttacctagaagggccactacattcttctcaggactaaatccctcctgactgttgtcttcaccccaatcctggaaaactcaccgtcaccccatatttgagtgctagtccagccagggtgtctccgggctccaactgatgctccaggcgtctttccctcactggggagcaggccgattgcaccaggcttccatatgaacgagcccggctcccttgaagcagtcctgacccccctggcgggggctgtctagacggggaagccatctcttcaccctgccaacagctaaggttgcaactaggggaggtacgaccgagactgcgactgacaggcctgaagtctgggaatgaatattcaggggattcctttccccctctctcttcccctgtgtccccgcctccccagcactacgccatctgccccctcccggtttctcctccctccaagctacttatccacaaatctgtcccttgagtattcagtccctccctaattctcccctaagcacccctccgactttggactcccccacaactcctcgctacattgacctctgacctttgaactctagaaataatcctcaacactctttcctcagtttgcccccaagtagcctggcctcagggcgctccaacatcccagctctccccggtcccggggtttgtttgctagagtcaggaacaaatcaggcccaccccaggtgaactgtcgccgcagacgaagagcgtgaggattgcaagaatttgtagtacaccttccactcagagatcctcaaaggtccgctccgcataagataggtcacaccctcaaatttcggctccacatctaggttgttgtccctccaaacgcctcagatccgccaagatgcaagggcctggatccagttgagcggcaaggtctttgagaaaagacttcatttcccaaaaggctccgcgtctgcggagtcgcagggcaccataggaaatgcagttccctccgagcaccagagagtggatttccggatcgcgcaatgcatgcgtggaagtgcgtccccggaagtacggaggccgacaggaagagaaggaaaaaagagaaggcgctgtcccgctcttgctacggtggcctggaggagtggcgaaaccggaacagagaatttatcacttctgggactcacagtcgtgatgtctttcaagagggaaggagacgattggagtcaactcaatgtgctcaaagtaagcgtgagcggagaggatctggagccgcttcagtcgctccctgaaggttgggaaggagctttgtttcattgctctggcaacaactcgggggtgcaggagagaaccaggcgacttagagctgtgtagtgactcctttttcggtctatgatcgctgttctccccagggtccttattccatttcactcctcatttctataatttcacttccacccctctctcctatcccgctgatcccgtccggatttcttcccctactccctgcagaaaagaagagtcggggacctcctagccagttacattccagaggatgaggcgctgatgcttcgggatggacggtaagagcaaggagtggctcaagcctgagggttctgcggttagaggctcaatagacttttttttttttttcctttgagacggaggtctcgcggtgctgcccaggctgccctcgaactctagggctcaagtgatcctgcctcctcagcgtcgcgattagctgggtttacaagcgcatgccaccacgcctggcttcaacaaacttttgttattaattaggacagcaggagtacctaggattctttggcggccagtgaggactggaagaagtggagattgggtcaccagggagttgggttttgcaaagactgctaggacagggtgggacctatggcagggacgggcccaaccctcttcccctggaccacttatcctcttctctacccctgctcagctttgcttgtgccatctgcccccatcgaccggtactggacaccctggccatgctgactgcccaccgtgcaggcaagaaacatctgtccagtaagttagggggaagacgggatggggaataaaccctcgaaatctctgcacaccactcttggtgctatgcttttaattctgtttccctttctcctcaggcttgcagcttttctatggcaagaagcagccgggaaaggaaagaaagcagaatccaaaacatcagaatgaattgagaagggaagaaaccaaagctgaggtaatcagagagtggagagtgtgttctaggcaagaccctgctgcacacaccaggctggaagggcggagggctgaaggctctgactctgtctcccatctccttaccaggctcctctgctaactcagacacgacttatcacccagagtgctctgcacagagctccccactataacagttgctgccgccggaagtacaggtatgggacgggaaagccagaggtaggaaggctcagaaggagacagatggctctaaaagagttttccagtgtgtattctgaggaatactagtgttctggagatgttacttagtgtttcaagaaaaggagaattttggctgggcgcggtgactcacgcctgtaatcccagcacttttggaggctgaggtgggtggatcacttgaggtcaggagttcaagaccagcctggccaacatggtgaaatcctgtctctaccaaaaatgtaaaaaattagctgggtgtgtggtgtgtgcctgtaatcccagctactcaagaggctgaggcaggagaattgcttgaatccgggagacagaggttgcagtgagccacggtcacaccacttcactccagcctgggtgacagagtgagactccatctcaaaaaaaaaagaaaagaaagaaaaagaaaaggagaattttgtgatttttaaataaagtttgggaaatggcactttgtaattctacttgaagaataacagttttaaaaactatacaaag

SEQ ID NO: 1228 - DNA, 4001 bp, Homo sapiens
tgtgtgtgtgtgtgtgtgtctcactctgttgcccaggctggagtgctggagtgcagtggtgcgatctcagctcatcgcaacctccccctcctgggttcaagcgattctcccgcctcagcctcctgagtagctgggattacaggtgagcaccaccacgcccggctaatttttgtatttttagtagagacagggtttcaccatgttggccagactggtctcgtactcgtaaccttaggtgatccacttgcctctgcctcccaaagtgctgggattacaggggtgagccaccatgcctgacccctattcgttgttaatacctttacaaactcaccacattctgtcacttgtaatcattatttgtgtccctgttcatttctcattaggccataaattacatgaggacagcaaccatatagtttaagtttctatctcccagaaaagttatcacagtgctttaaatacagcaagcataaaaatgttggctaaattcaacatttgtttgagtgagatggaacaagaaaacaggggcagggatagggggagtaaccccatcaacttcaatgctgtacatttttacatctatccaatttcccccatgcatgacctgaaatacttggtgtagagtacctgttttgcacaaaggaggccaccttactggaaagaaggcagagcattgaggaggaaccaagagcaaggagaggtgggcactttaggaactgagaactaaaaatcagctctccattagttgctgtaaacgtttaatcactctcaacataaaattttctgtgtggttaatagagtcagacagacctgtttgaatcccaaatctgacgctcattatttgaccttagccaaactggttaaccaatccaagtctcagtttcttcatctgccaaaagggaacgataaatgtatacttgatacagatgtgagggtgaaatgagctaacgtatgtgaagccctcagcacagtgtctggcataataaaataggagctgttcctctccgttggaatagtagggcaggacttgtgcaacactgtgatgggaaaacaaagataaaggcagaacagagtgcaacacattaggaacatttcaggggaggttacctagaagggccactacattcttctcaggactaaatccctcctgactgttgtcttcaccccaatcctggaaaactcaccgtcaccccatatttgagtgctagtccagccagggtgtctccgggctccaactgatgctccaggcgtctttccctcactggggagcaggccgattgcaccaggcttccatatgaacgagcccggctcccttgaagcagtcctgacccccctggcgggggctgtctagacggggaagccatctcttcaccctgccaacagctaaggttgcaactaggggaggtacgaccgagactgcgactgacaggcctgaagtctgggaatgaatattcaggggattcctttccccctctctcttcccctgtgtccccgcctccccagcactacgccatctgccccctcccggtttctcctccctccaagctacttatccacaaatctgtcccttgagtattcagtccctccctaattctcccctaagcacccctccgactttggactcccccacaactcctcgctacattgacctctgacctttgaactctagaaataatcctcaacactctttcctcagtttgcccccaagtagcctggcctcagggcgctccaacatcccagctctccccggtcccggggtttgtttgctagagtcaggaacaaatcaggcccaccccaggtgaactgtcgccgcagacgaagagcgtgaggattgcaagaatttgtagtacaccttccactcagagatcctcaaaggtccgctccgcataagataggtcacaccctcaaatttcggctccacatctaggttgttgtccctccaaacgcctcagatccgccaagatgcaagggcctggatccagttgagcggcaaggtctttgagaaaagacttcatttcccaaaaggctccgcgtctgcggagtcgcagggcaccataggaaatgcagttccctccgagcaccagagagtggatttccggatcgcgcaatgcatgcgtggaagtgcgtccccggaagtacggaggccgacaggaagagaaggaaaaaagagaaggcgctgtcccgctcttgctacggtggcctggaggagtggcgaaaccggaacagagaatttatcacttctgggactcacagtcgtgatgtctttcaagagggaaggagacgattggagtcaactcaatgtgctcaaagtaagcgtgagcggagaggatctggagccgcttcagtcgctccctgaaggttgggaaggagctttgtttcattgctctggcaacaactcgggggtgcaggagagaaccaggcgacttagagctgtgtagtgactcctttttcggtctatgatcgctgttctccccagggtccttattccatttcactcctcatttctataatttcacttccacccctctctcctatcccgctgatcccgtccggatttcttcccctactccctgcagaaaagaagagtcggggacctcctagccagttacattccagaggatgaggcgctgatgcttcgggatggacggtaagagcaaggagtggctcaagcctgagggttctgcggttagaggctcaatagacttttttttttttttcctttgagacggaggtctcgcggtgctgcccaggctgccctcgaactctagggctcaagtgatcctgcctcctcagcgtcgcgattagctgggtttacaagcgcatgccaccacgcctggcttcaacaaacttttgttattaattaggacagcaggagtacctaggattctttggcggccagtgaggactggaagaagtggagattgggtcaccagggagttgggttttgcaaagactgctaggacagggtgggacctatggcagggacgggcccaaccctcttcccctggaccacttatcctcttctctacccctgctcagctttgcttgtgccatctgcccccatcgaccggtactggacaccctggccatgctgactgcccaccgtgcaggcaagaaacatctgtccagtaagttagggggaagacgggatggggaataaaccctcgaaatctctgcacaccactcttggtgctatgcttttaattctgtttccctttctcctcaggcttgcagcttttctatggcaagaagcagccgggaaaggaaagaaagcagaatccaaaacatcagaatgaattgagaagggaagaaaccaaagctgaggtaatcagagagtggagagtgtgttctaggcaagaccctgctgcacacaccaggctggaagggcggagggctgaaggctctgactctgtctcccatctccttaccaggctcctctgctaactcagacacgacttatcacccagagtgctctgcacagagctccccactataacagttgctgccgccggaagtacaggtatgggacgggaaagccagaggtaggaaggctcagaaggagacagatggctctaaaagagttttccagtgtgtattctgaggaatactagtgttctggagatgttacttagtgtttcaagaaaaggagaattttggctgggcgcggtgactcacgcctgtaatcccagcacttttggaggctgaggtgggtggatcacttgaggtcaggagttcaagaccagcctggccaacatggtgaaatcctgtctctaccaaaaatgtaaaaaattagctgggtgtgtggtgtgtgcctgtaatcccagctactcaagaggctgaggcaggagaattgcttgaatccgggagacagaggttgcagtgagccacggtcacaccacttcactccagcctgggtgacagagtgagactccatctcaaaaaaaaaagaaaagaaagaaaaagaaaaggagaattttgtgatttttaaataaagtttggga

SEQ ID NO: 1229 - DNA, 4001 bp, Homo sapiens
caaaactaaaaataaaaggtaaggttctttactcaaagagtggactcccctttccactgagagtagaaactcaagtccttaaaagggcctacaaggccttatacagtctaatctcccaccacactcacctctttgactttatttctactcctctttgctttttccaccacagccaaatcagcctctctgctgtcctcaaacaagcccagcacacagggcttctgcaagcccttctgccttcctctctgctagcacatccttccctcagagaggtacatggattacccctcacttacttctggtcttggctcaaatgatatcttttctaggaagctttccctggctgcctctagttaaaattgcaaacctctcccggttccctgccctccctcttccctgccctccctcttccgtgctttttctctgtagtacttaacaccatctgacacagcacatattttatttgtttattatctgaggtccccactagaatataagctccatgaaggagcagatatttatgttttcttagaaaagtatctgacacgcagtaggtgctcaataaatatttactaaatacatatatataattatatagtttgtgaagtatttttatgcaaattacagcaattcatttttccttatgccctctcttcttcaaattctccaatctttgtagtaacaatatggatgacagcaaagagctatcagaaaaagagttgttggccacttaacaaagctctttaaaacagataccccatattaatcaactacatctataaattgaaagcttaaagtcaacatctttattagcatagatgaatctaggcgtggaattttaaaataatagcgcagaagagccaagaatcatcaggaagaaaagtctaattcagtttgtcctatcaatctgttaaacaaacaataggaaaatgcaacctgcatttgatcttcaaggaaacactggcccaaattcaacacgaacgcattcaacacaagattcgactcccttaaaattttctatctgcttaaaacaaaccccattaactatcaagtgccgtcgctgggtgtgtatggtctgccgagcggatcggggatgttttgctatgttttgtttaaccagataagaattagcgttaaggaaacgtttcttaaagcctctgtatcccctggaccattaaacaaccccttcgttgggctttacactgtggtaccggggtcttctcgggtaatttcccagcttatttaactcatcagaagcgaaggggcatctcagtcaggctccagtgataccggagacagacggcagatgtctcaggggatcccctggaaagagaggctctcgcccagtcaaagggtgtcacggacaggaggaaagagcggaccgaggcgcacggtgtaggtgacaggtgggcgagcgccgcagggcaacagcgcggggagtgaccggctgggtggtggcgcggaaaccgtcaactcccatcgtcaacctgacagcttgggcccagctgggctgagtagtgcagcggcacaggatcaaaaaataaaataaaggtagcaacacaccgccgtcagcctgctcgacctcgccccccgcgcgctgcgaaataaagttagtgcccagtggccgctgcaatggcccagaggggcccagccgagctcccgcccgcggcccggcggctgtcaaaggcggcccggcgccgcgagaagtcccagagcccagaagccagagaggacgccccgagctggcgcgtcaggccgagtgccctcgcgccctcgcgccctcagcccggcggtcccggccctcaacccaggctgacagccaccagccccaaaccgcctcccctccaggccacgcagaggggccgggacccggaaccttctgccggcagcgtcggcgcccggcggccgcctttacctggtttgtggcagctgcggccgccgcgcactccccctctcccggagaaccccgagccgacgccgctgccgccgccgccgcgcactccccacccccgcccgcccaggtaacccaggaaaccgagaacaccaccccctccctcccctcgtccggacccagacccgctcgtctgcgcgtgcgcccttggctccgcctcgcgcgtgtaagccccgcctcctctgggagggcagcgccggcgtcgcaggcgtgacgcgtggaactgccgagccaatagggaaggcaggggggcgggccgacccgcggggctgcagccggggcccggtctgggtttctcagcggtcgggggtcgtaccctgggtccgcacctcctcccagggctctgcgtagtgggctgcgtcagaccctggggagtgcgagcaccgtttgagaagcaccaaacacaagcgcatcgtccgcctcttccattcaacacagactgtcaacctgtcccattgtgtaggtctagaggatgaagatagaagaaataacgggaaggagtcaggagagggagaaagggttacccacaaggcacccctagccttcctctgggacctggaaaaagccatattgtaatggttaccgtcggcttctttcaagaaacaaaaagagctttgcaaagccactgcagaagtaattcagtgcagtggtgtattttccaaccgactcctgttcaaacacggtttgtatacagtgcgcactgtcagtgtcatatgccctaatagaccagtccctccagagggtgggagctgtaggtaaaatccaggatgttttggctgcatccccggctctgggcccagcacgctgctggcagactgctgcggtaggcagtttggcatttcaagggccaccctcctcacctcctagtcactgagacagcaacgccagaggtactgggaaaaagcctgaactgtaatcgttcggtagttttcaagttctgccaaacaatacaaactattaataagcagataatctacaaattgacaggaattgctgtagaatcaacaactcccataattttttgcacaggaattatgaaatagaaataattcaggatattatgtcccaagcctatataccaaatgttactcccaattcctcaaactcccatctaacccaatgacaagcaaagtgcgttaagttgcccactgatgtggtttagagggtgctcttggggaaaattccccactttaaaatatgtcttctctgacgtctgatgtttaaccattagcagttcatatctttaggcgaagattgcccacttcctctggcaggtagtcttttatttttattttttatctttttttttttgagacagattctcgctctgtcgcccaggctggagggcagtggccggatatcggctcactgaaccctaacaagtgcaggaaataaatgtctcagggaacttatcactcatttaagcagtatataatgagcacctacaatgcgctaagtattgtgctaggtgcatgggcctgaactgaaacaaaaagaggaagccaaacttaacctgtttcgtcattttacctaaagctgtgtctactcttatttatacatcaactttcacccactaatcttaaaaacaccccccttttttaatggacaaaagaagtcaaagaaatattaagtaacaagccagtttctgttaaccttgagtagaaaataatagattatcatgatttcattaaagcaaagaaaatgagacagactttagatgataatggtatacaattggccctcaaagtattatttgtttgtaaaaggcacaaagtaatgccatttgtgactattatttttttcggtaccagtgttttttattttattttattttcaagatgcagcttcactctttttccctgactggagtgcagtggcacagtctcggctcactgcaacctccgcctcccgggttcaagtgattctcctgcctcagcctcccaagtagctgggattacaggaatgtgctaccatgcccggctaattttgtatttttagtagagacagagtttcatcatgttggtcaggctggtctcgaactcctgacctc

SEQ ID NO: 1230 - DNA, 4001 bp, Homo sapiens
tgacacatgctacaacatggatgaatcttgaaggtatgctgctgagtgaaaaaagcctctcacaaaaggacaaatcctatatatatcatgtatgtagaatagccaaattcgcacagacaggaaacagaatggtggtcgccagaagctgggggatagaaggaaatgaggagttagtgttcaatgggtacaaaatttcagctggggaagtttaaaatgtcctggaaatggatagtggtggtggttacacaagaatgtgaatgtacagttaatgccactaaactgtacatttaaaaatgggtaagacgataaattttatgttatgtatatttaaacacacacactcacacatacacacacacactctttctttcacacacacacacacacacacacacacacaaataggaggcagaatacttaacccagatctggaggaaggaggatcgggaaggcttcacaaaggagatggctttgtcttgaaaaaagaggaggagtttggcaggcaggacaagagaaagatattccaggctgagggaatagcataggaagtaaggaggcaattccaaggtcatattaggagaacagcaggtaatccaggtgatgacagtcctggactcttgcaggtgatgaagctgcaatggcagagggagccgatcttgaaagctcctgtgtgccatgcggaagctttggactttattccataggtactgggcagctactggagtccattaagctggatatatgcccaagcttgcatttcagaaagagaatgtgggcagttgcctgaagagaggattggaggtgaaagggactagaggcagagacaatggtgaggagactcttgcagtagcccaagagaaagatgatgagggccccagctgagggtattggaaatggagaaaggtgttaagagtgtgtaggaacctacaagaggtggtgagtggaagctaacgatgtgagatagccttagcatagatcagaaatataacagaggctgaagggttagggagggctagcagtgaggagtgagaaggagagaaagaataagtccatgttggagatgttcagtttcatgtgccttgtgtaaaaacatcccacatgagtccatctgcacacatgtattgagtgagtccttataactacgccatgacccagacaaataatctcaattttactggcacccgagaatcagattggaatctctccaatgaatgtctttggctcaccccactccagaaaagtatctgtattctccctcctcaaatactcttccctgcggtttctctacagtcctggccactctctgagcaagcagtctgcaggggccagctcctggaggcaacagcactgccagaaattcatccaccagtcacctttctcggtggtacttaaagctctcagtctgcacccagcctgccctcctaagctgcccatgctctcggctggcactgaaaagtctcagaaacactttaacctacctgaacggtgattgcctcttttagatgagcaaggaactctttgttgcaggctaattagcaaccgtcttcccaggtagctgcaacgaaactggtctcttccatgctgttaagcaagctgggtctcttgtttgcagttagatcctggcttctgttcagctgacttagggtaggattattcccctggcattgaggaacacacacggttgagtcaaacagcccaaaccccattagatggcaagggaaaatactgctgtactctgatgtcacccgaggaagacacgggaacagatggtgaaggcaaaagcttcatgcaccacagaaacctcggaatacaactttcccacgtaagaatgaataaacactgaaagaggccaaaaccccaaacactctggtatgaggactgctcttctcaaagccaaaaggtcattgggatggcttcttagaagcccttgcgttgctttttcgtttggtaacggggctaggaaatctctgtgtcaccaggaaggcgagtggccctctctccctctggctctttggcaggtggccacgcttgtatcacatggggaatttggcaaatcaagtccgattcttttgcagtgtagctgcagcaaggatttccagttagtgattttgtggtggctcctatgagtcataattccctgattcttctgcagagagggtggacctaagtttgtccttgtgaggaccatcattactcttggtttgagaagtctgcagtccttggaggacataaaactaaaccccaaaatctgagttcttttttcagagacaaggtttcgctctgtcatccaggccagaatgcagtggcacaatcatggctcactgcagcctagacctcctgggctcaagagatcctcctgcctcagcctcccaagtagctgggactacaggcatgagccaccatgcccagctaattttttttttttttttttgagacggagtctcgctctgtcgcccaggctggagtgcagtggcgggatctcggctcactgcaagctccgcctcccgggttcacgccattctcctgcctcagcctcccgagtagctgggactacaggcgcccgccactacgcccggctaatttttttgtatttttagtagagacggggtttcaccgttttagccgggatggtctcgatctcctgacctcgtgatccgcccgcctcggcctcccaaagtgctgggattacaggcgtgagccaccgcgcccggcgcccagctaattttttaatgcccaggctggtcttgaactcctggcctcaggcaatcctcttgccccagtctcccaaagccatggtttacagacatgaatcactgcacctggcccacaatatgagtttgaagcatggatactgccactagctttctggtggcaaactttcaccaaactcctagtgtcttttttttttttttttgccgttcctttgtgctaaaatatgccttttttttttcctcctcctgttgttacctttaaaatattttaattaaaaactactgtcatctttttaatatgtctgttatggatttctgaattaatatttttatttagaaacttttgtacatatatatataaacaatggcattttttttttttttttcatttgagacagggtcttgctctgaagcccaggccagagcgcagttgtgtgaccttagctcactgcagcctcaaacgcctgggctcaggtgatcctcctgcctcagcctcctgagtagctgggattacaggaaaacaccaccatgcctagctaattatttttattttttagtggcagggtcttgctatttctcccaggctggtcttgaactcccaggctcaagcaatcctcccgccttggcctcccaactagcactttgccaagttgctctttttaaattggcaattatgccaggtcctgggctagtatttcatcagtgttattgtatgtaatcctcacaacaattcttccagataggtacttttattcccattttactgataaggaatctaagacttgttcaatgtttcactgcttttaaagggtggcaccagtgcttgaacccaggcccgtttaacatccaattccttccttctaaactactaactagactgttctttgcatgtgtgttacatataggtatatatagactacatagtaggcaggcaataaatatttgttgaatgactattctgtagtgtatgtatttgctcagaactatcaagtttattactgtccttagaaattgatgctaatcatgtgatcttctggatcagagtatagctaaaaagattcatatcataacatcaggtggagcccagaacaatgagtattaaagtgagtgcttagataatatggtaatatctattacaagcacccacttataataggtattacttataataggttgtggctgaaccctaaagcacctggaatagtctttataattagttcctcaacaaatatttataaatgtattctagtatcttaggtaccatgtaggtattaggttcttgataaatat

SEQ ID NO: 1231 - DNA, 4001 bp, Homo sapiens
tctatgatcattaatgatatgcaaacataaacaagtattatacccagaagtgtaatttattgtagctacatcttatgtataatagtttagtggatttttcctggaaattgtccattttaatttttctcttaagtctgtggaattttccagtaaaagtcaaggcaaacccaagatgtaactgacaatgtcttttcagagttagtttcctacagtctaaccacactggatgacttgctgttccaaaaatgtcatgcacttttttgagcctgcatttttttttctacctatgaagcccagttcattcttcaaagtctagttcaagtgtcaccttctctacaaggtcttccttgatttcctcccaatcactaggttgtgaattatttaagtagggattttaccttttctttctttcgttcgttcgttctttctttcctctttcttttttttttgatggcgtctcacggtcacccaggtggagtgcagtggcatgatcttggttcactgcaacctctgcctcctgggttcaagtgactctcctgcctcggtctcccgagtagctgggaatgtaggtgcccgccaccacgctcagctgatttttgtacttttagtagagatgaggtttcaccatgttggccaggctggtctcaaactcctgacctcaggtgatccgcctgcctcagcctcccaaaatgctgggattacaggtgtaagctatcgtgcctagcctttaccttttttttttttttttttgagatggagtctcactctgtcgccaggctggagtgcagtggcacgatctcggctcactgcaacctccgcttcccaggttgaagagattctcctgcctcggcctcccaagtagctgggattacaggcacgcactaccacgcccagctaatttttgtatttttaggagagacgggtttcaccatattggccaggatggtctcgatctcttgccctcgtgatctgcctgcctcggcctcccaaagtgctgggattacaggcgtgagccaccgcacccggcctttaccttttctttatacaccagcatccagcacaatcttggacagacaaaaagtgccgaataaacaactggtagatgaataatgagaattgattgcttcttctttagcattcaaatctttttttttaaaattttttttgagacggagtctcgctctgtcgtccaggatggagtgcagtggcgcgatctcggctcactgcaacctcagcctcctgggttcaagcaattctcctgcctcagcctctccagtagctgggactacaggcatgcgtcaccacatctggctaatttttgtatttttagtagagatggggtttcaccatgttgtccaggcgagtcttgaactcctgacctctggtgatccacttgcctcagtctcccaaagtgatgggattacaggcgtgagtcaccgcgcccagctcaaatcttattctctatttagcacttatttctgcctttaattatatatgattttattataatacgttatctcctctgactaaactctggagaacagaatatgagtctgattcctctctcagctttctcagtacctaatacagaatagaacgtcgataatttggtcacgtatataaaggctcaacatattttaaggagctaaagctattctgaatacatttcagtaaaaatgggtgcattttaaaagccttaacctggtactacattagttgagatttatccccgaaagattaactcgttggcaccacctagtagtcactaaatgtggtgcacttttcacttttacgaaactacagaaaccgctctcagacactatatctggagcggagggtcctcattcatgctcacctgtctcttagtactctgatctctgcacagtgccgaccggtctcaaattgcacaaacctccagttcttgacgttccgagtgtcataaacttgaggaaaatgaaattattcatcaggactacaaaaggctcaaagttcaaaccacctcggggtggagatgctggaaaaaaggaaaccattaacaagtaattttatttgctatatataaacttgccctaaggcagtccagataacttccacttgagcagcctgagacatcaagggcgggggcactttccccctcgactgcgcctaccgcagcctttctgagtttcttcctagcgaggccgagagggtctttgaggaaaatcccgcatccggacacgccttgagggatggcgtcaaacccagaggcttggaaaaggtaagggcggagagcacgcctcttccttgaaagtgaggagggtttggcccagaaccaacaggactgggtgaagaatcagctccggccaccgcagcaaatcccaccccacgcgggaacttgaagtccggcacgtaggtcccgcggcggccgggctccaacaggccccaattgccaccagaggtagccgtaaacccatggtccccgaaactccttccgggcctacctgacaaaaactgggacaacctccttaggcccccgggattccccctgtgccgcctgaccgcccgccagtcccagagtttagggccaggggccccgcctacctgagggcactggcctggcggaccgcgccgggggagcacttccgctggacgcacgcacttccggccccctggaaccaatgagagtgcgaccgagatgttccactcgctggcgtccgggccgctggtgatctccggtagcactcgggccggcggacagtgagggcgcggtaagctccccgcaaggagcccctgagaaactggtcgctttttgtcctagatataggggagtccaggatggtgtggtggagtctttagagtcgaatatgacccgaggcaagctcatattcaggtttggggcaaggagctttgattgacccttaattttttcagtggaacggaaaacttcggtaaaatagcttctgaccttcggaacagatggattcaccttggaaaggaaaaatctctttctagaagagtcttgaggtctggcacctttaggcttaacgggggacggctgggcgtcagaggaggaaatccttcattccgaacgacttccctttcctcctaaatccttctttccaaatctgtaaaagactacatctactttgctggaggtggtttgacactcatgctccttgagaaggaggtaatgagctgtagggcagctcttaaaaagttacccttggacgggcgcggtggctcacgcctgtaatcccagcactttgggaggccgaggcaggcggatcacgaggtcaggagttcgagaccagcctggccaacatagtgaaaccccgtctctactaaaaatacaaaaaattagctgggcgtggtggtgggcgcctgtaatctcagctactcgggaggctgaggcaggagaatcgcttgaatcctggaggcggaggttacagtgagccgagatcgcgccattgcactccagccggggcgacagttcgagactccatctcaaaaataaaaataaaaaaaagttacccttggctgtcgcggtgtgacacctgtaaacccagcactttgagagcccgcggtgggaggatcatttgagcccaggctgggcaacatagcaagaccctcataacaaaaaattaaaaataaaattacccagaaactggttggaactatttaatgatgttcttagtccatcttcctgaagtagtccacagaacaacatcagtgttcatggtagaattgtttcatcagggcagtttttttttaagtaacaatgtcttgttaaaaaacaagagctgtgttgcccaggctggagtgcagtggtgtgatcatagctcactgcagccttgaactcctgggctcaagcgatcctctggccttggcccctcaaagtgttgtggtgattggcacaagccaccgacaggcctggagtctgaagttagttatatttcagctacccaggataaacttctaactatgattaccacagaactctaccaaaactaattgtttcactt

SEQ ID NO: 1232 - DNA, 4001 bp, Homo sapiens
tgatttttttcccctggaaagacagaaatctggatttctatgcaaaatctattttgaaatgtttgtgaaaaacattagaaataatctacaggccaaacaaaacatgagcacacactggattcaacgtgtcgaacactgtttaggatttctgctattggaaatgcagggggagcggagggtagaaagatagagcagttgaagttacttgaacaccacactaaaaagtttggagttttttcttacaaaaaatacaggacccacgaaaaaaatgccagccaatatctcttccacttagagccctcaaagggaggaattaatgggaaatcactttgtttactctagtttttatcatcccaggttttccttatttatctctcttaatggttttgcctaagaaatacattttacttatcactatgataatgatcttctctttcgaacttgtaaaggcatgaaaactgcagaccagtgcctacttcttagtcaatttaaatattttggttttaacattaacatcatgccttagtagcttcatccgtaaatgaaaaggcttaaactaggtaatatttaagtttccttcaagttctaacatttgacatgaccatctagaccatctagaagaaattaagttcttaactgatgtgtactaaaaatataataatatttaaaaacctagtactttcacagtctttaaaaagctttgttttaatttcattagctctttttccattaccccatgaagctcctattattattcccattttacagagaagaaggccaaggctcaggcaggttaagtgactcacaaccacacgagtgtcagtggcagagctggagttccccctcattccccagattcctactctccattctatattctatactcagcatgtctctgggtaccagaccctcaaagagaagtaaggctgatatatgttaagcccccaaacattgttataggtgacagtctgttttctgaggagcattttatgtgtctttagaaagagcctgagatcctttctggacgaaggtttgtttggaagtagtgtgaatggggagggggttcatgggagagaccgggtctgtccttaccttattcagtaggcaatcttctaagtctcccacagtaaggtatttcatggcttcttggtcagtcctcagtagaacagcaacttcctggtttttttttttttctcaatggagtgcaacacttgtgagtagatagcactcccagtaatgtgagtctctgggtactaagtttttctggaagtgtgtaatggaccagagacttgccttccgaacccttcactcatgtttttatttccaaattgtgaaaatccatctgtcatcttttgggaaattaaaaaaaaaagaatttaaaaagaagagttgataaaattgaatttgagtccaacctaatcataccttagttagctacattgactggtgctttcaccagagagcaattttccaaattgtatttcccacccaagtacttaaaagttccatccaagtcagaaataccctgtagttggcttctccccaccttttatgctcctgtcccaacactagatgcaccgtggaactcagtatcttatatctcctggtccttatcctgttgacagtaaacaccccttgctctccaagccagaaaatcccacggattgatttaccttctttacaataaacaaataggaaactgcccaacaaccagcctgacacccatcattatgcccgcaaacaagtgatcaggtcttgtcagccagcgcagagcacaacggttggcatttagaaaagcatgcacacacgtacacacaggcacacacatatacacaggcacacacgtacacacaggcacacacatatacacaggcacacacacgtacacagagtgcacacgggcacacacccacaggaatggctggtcaggaatccttctgctcacctgctgacctttaaacgtaatttccctcttccaacttgaaagctggcagtaaaaataaagtcagtgtaaacaggtccctttagagtcgagggaacactcacgtctggttttgccagcaaaacttatgttggaaaacagctcaggcagtaaattcccagttgggctggctggggctagttttactacagaaaaaaaaaaaaaatttcacaatggtctgatctccttgaagctggtaaacatcacggagtctgctatcagataatctaaagaaattacagcccttctgggagcactacttacttttaaacaatgttccaaaggcaagtgtttccaagcccacctgtaagtgctgcccacaaaggccactgcactatttggggcctcagcgtttgcatatcttcccatactctgccccaagcaaaagccgcatcagagctccctagctgctctgtgccccacccacgtcattacctccagctttcagtccaacttctacagaactcctgccaatgcacagcctgatataaatattgtaaagctacatcctctccaatgaccctctgatagcacccctcaaaacagccttgattttccatttgtttctatatgtaattctaaatctccttcttttgatatcaagtgctcccaaatttttcagaatcttattccctgggcttttcttatcatagtagtgccaaactatttgtttttcacagacagcaagagcctctttctctgaacttgcaatttagaattctctctccacctcattttcaacattacgaaagtcccactgtttctctcatgtgctcatttttgttgttacttctgctttcactgtaatcattaacttgtgagtccctttcctccggtggggtctttcctaatgttcgagggttaccccagacacctgtcatcagatgcacaaactttcattatttttgcacctgtggctgccctatcttgattgctccagtaccgcagctgatcaaaatgttataactggaatattctcttgccctacgatccagcgacaattgccggctgtgagcagggaaagcaaccaacagggccaactgagcaatcaggaaacgaagaaataatcatgtgctcagggaagctacacagtccgattttaccaggatgtcatatccagggaataggtgtgttgtgggggcacaacccaattccctactccatgatttagctccttatgggcaaatgctctgaaatacagggcagtcccacaaatagactctctgacagctcctgtctgacagtttgatgaagacaagctttttttagatgtagatatctgggtaattggatataggattcgcaaaaggattgaattacagtaagcctaaggcacttgtatgctaggccactgaggaaattcaaagttagctcaggttctcttccttcctcagaaaataaatattctcctttctcatgactcacaccaaatgcaagtacggaaatgtaaacctgctttggctcagtttccattgtgaagactaagaacttattacaagtcaggttaacaaggcatgcaaaaccctacgctgccaatctgagaagtcccggggagataatgctagccctggtttaccagcagaagtgtttgttactgatttacttagtgtctgagattttaattccaagaaggaggaaggttagcttgatcaaaatcaaccttaaatatacaaatttgttaaagtttgcaggattacaaactctgactttttttttttttttgagacggagtctcgctctgtcgcccaggctggagtgcagtggcgcaatctcggctcactgcaagctccgcctcccaggttcatgccattctcctgcctcagcctcgccagtagctaggactacaggcgcccgccaccacgccttgccaatttttttgtattttcagtagagacgggatttcaccatattagccaggaacaaactctgactttttaaaagatttcctgtaatcccaagatgactcagactgaatctgacaatgcagaataccaggcagagataatcgtctgtgatgtgc

SEQ ID NO: 1233 - DNA, 4001 bp, Homo sapiens
taccaattgatctctagcatgtacaaggccccgtgcagccctcgggggctcaaaacataagacacatcccaaattgctcactcttctaagggagtgatgggcaccctgtgggttaactgctacattgaacaagggaacatggaggagagaaaagtatgactgtgagagcggaggaggaagctttggataccactgggggcattaaggacagaggaggcggcacttaaaagaggaggagggtttaccagcatcttgcagagaagaaaattaaagtgtggtggtttcatcctgcaagatgcatccctctgggggtccagttacagtgtactgtggcagggtgattgggggtagaggtggtggcaggtgaagctgaagaggtaagtaattttgatgggtctttatgctgaagccttgattccacaggcaatgaggggccaaaggtggtttttaagcagccgagtaatagaattaggtttgtattttattttattttttattgtatttttaatgaagtgttgtacaggcagcacttcatttcataaaatagaatatgtgttcttgaggtttgtattttagaaaaaaatactctattagtcacgtggaggatggtggcaagactaagagaggaagagctattaaatgctcattggaaggtccaggtgagagatgacacagtggagggggtggctgtattatttgagggacacaaagaaggtagcagtacaggccttggtgacggcttgaaagcgggtgatgtcactgaattagctgcaggcactgctctatcttcctatccgtactgtaacaccaacaccctgctgagatgctgagcacacttcagggaggcagctgtggatgccttcagtggaagcatctcctttattgagccaaaaactgtgctaagggctttccacacattatttcatctaaccttcaaggcatccctgcacagtgggcattcttaagacaaggaaagtgacactgagaaagaataagggacttgcccagagtcacacagttggtcagtggcagggccacgatccagcaccctaccctctctgattccaaagcttacactcataactacagcactgtgctgctgcttggcaaagagctgggcacatcccaccacaggaggtagccccagccttcacgtcgtgtgaaaggtcagcatgtagaacacttttggaaggcgatacaagtaaaactgtactctccaaggatttcattataaggaaataacagaagtcaaatcattcttaaccatgttctcagcagcattgtctaatatagccaaaaagtgaaaaaagagtaggatttagaaagtcatgaaatagacagcttttagaaatggtaaccataaagtctaaagtgcaatatggaaaatctttttaatataagattaactgaaaagagtcagatgcagaatggtacctaagccatgaaggcaactgcatagaaaatataactgaatggggacaaagacagggaagaaggtgcagaaatgaaaacaggtctcacgtgagcaaggggtggcagattttcctcttttgagtttttcgttaatgttatttcaacgtctttccaagaataataataacaaatcagatgatggctgctttgtcagaggccctggtgaggacccctcggctccccacacagctgctgtgccctggcccattcctccctcacacccacagcgtccagcctgctgggggacctctcttaccagcgactctgaccacagcacgctctgcagggtccagcaccgaatcctggcttttccgctttttctgctcatgcagtggcaggttccagggcaaggtgtcccctgggggacagggagacaggctccccgaccgctcgctcctgtaagatcgctcactccgacaagaccgctcactccgacatgaccgctcactgagcgtctcttcatctgaggaagacatggcccaggcgggggctgctgcaggagggcctgggagcccagggagaagtgatctgaaggagaaaggggtgaatgtgagcagacaaaaggggtcccataaggaacactgggacttgggaagcagaggttctagtcctgcctatctgtacctcagtttcttcacctggaaaatgggatgaagacaatacatcccaaaactaattcatgaggtttgggggatattatatgtgatgatgtctataaatcttaaagcatcatgtaaaagttagctcctattcctaggaactattattattgctatttggcacatttggaggattaagctcacagatcccatgacagaatgctgtgggtttaaattctactccatttactagctgtgtgaccctggagaagccatttaatctctctgagcctcagcaccctcatctacaaaatggggatgacgacagttagaacctagccctatagggttgggttctgcatgtaaagtgcttaatcctgcatgtaaagtgcttaatagtgcccactgcccagtaagcactcaatacacagtatctattattatattcctgttctacttacctcccaggaatgctataaggataaagtggggcaacagatgggaagtattttcaaaaagctaaagcatgatctcaatagcaggcaagaagcaaaccatgggctagaataggcagaaattctctggtttctcccactctgtctccagcagatatattagaaaatgtaccagacttgaagtaagacagacctgggtatatattctggtttggccacttacaattgctgtgatcttgggcaagtcacttcacctctctgagactcagtttcttcatctgcaaaatgggggtaatattccacctcagaggatgttttaagaacattgtcaaatgcaaatgtagtactggttgatgccatgcatggcacccagcaggcattagattaaatgttcatttgcttattccaagggctgttgtgggaatacgtggcacagcatgaggatggggtggggggatgggacagaaagcccattttttctggtcagtttagctagtggagagagttgagtgaaaatacaattgctctaaggccagctgggctccaccagccagactgggcagccttccctcagccaggtcaagctcacttcccagaaccatctgctacacatggcccaccaccccaagggctccatcagagcacaaatggtatgtgccttcagctaccagccttcctacaggccgcaaagccaacctgggtacccagctttgactttggctgtagggtccagggagggcaagagctgttgattttcccttatagggaataccggctcacagggctgtgtagagacagcgaggtagcctacatggctggacacaatgggtctgtggccacagctcctccaggattctcgaatctgagcctagaggcagcaaggggcagagacagcctcctgggtcattggcagatccccaccataggcacagaattcaaagagataacaaaagaaacataaaaatggtgtaggaggcctgtaggcagcctcgggcagcagagcctccctgccagggcaccccttgtgccagcagcgtgtgagccctcttcccaaagaacatctagaagggatctagccacaggaagcagaaaggaaaggacccaggtcctggcacagctttgccctttatcttagcacttacccctcctcccattaccttctagtgccagggcaggtgctgaagtgacagcctcaacctctgggaaactcaggccaagcttccatccctaccctcagctcgggggcaggaaaaatgcccctcctctcagaccacctgcttcatcccagaaccgcccattcctctccaagacgcccatttcactacaaaggccggctctcccaaggcctcctcccggagaaagcgtcccttctgggctctaccccgtcaatctccggcccctcacaaacacttgtttgacctccgggctcccgcccgaccctcggccacctgggtcattccatcaatccccgaga

SEQ ID NO: 1234 - DNA, 4001 bp, Homo sapiens
ggagaagcatgaataatccaccctttgtttagcacatcatcaggaaataaccataaaaatgggcaaccagcaacccttggtgctgtgctgtctatggagtagtcattctttttattcctctactgtcttaataaactttttactctatggactcgccctgaattatttcttgtgcgagatccaagaaccctctcctgaggtctgggtcaggacccctttcctgtaacaacatggtcctatcccagctccctgtctgatgtcacctcactctgttccagactgactcttctccaccaaacacaccaagcacactcccgctccaggacctttgcagtggctcttctgcttgcaagtcttctccccacaaccacgtggctcattacctccttttctttgccaaaagaactgccccagcaaagaggcctttcctaataactttatgtaaaacaacacctcgtcccttcatgctttgtctgtaatgtgctttacttttcttcatagcactaatcaccacctgacatcatttatatttatttgttcacttatcttctgtctccttcactagaatctgagctccatgggggcagggattcttgtccatgttgtttactactgtacctccggtgccggcacatagtaggtgttcaataggtatttatgggatggatgactcaaacctttcagtgaataaacagttcagtgttctcatcaatccatcctggtgcccaccaagctaataatatcacggtaacaatggcagctaattttacaggagcatttcctatgggccagaccttagaaacgttatctccttacacagggcactgcattcacgcctagaacactgaaatttaggtataatcatgagctcagaggtcaggcgacttgctcgaggtcataggggacggcatcagaagaggaacacagacatttagcctgacggcagaactgtgttctaaaacctcaaagtcataatttgccacacgctggagaaagaaaacagtcgaaatggaagccacctggcgagctcagggcgccaggtgggagcgctgcttcccacatatgggagtccggccccatcgctctttgatctttgcagcgtccgtggccccaccgaccccgtcgtgagttatgggaggcacgggacccataacccagcattctcagactcccagggtcgtcaggacacggcgccccgcgcggtgatggatgagccggccccagcgctggctttgtccgggttgggccggtctgagaagcttcaggccggctttggacggggcgtggcgagagccgcgccgcgtgtgagtgtgtgtgtgtgtgtgtttgtgtgtgtgtgtattggggcggttgtctttctcccttccctaccgggaaagagggcacaggtgcgccgtcagcgccccaggtgagctggtagcactttgaagaccctttgtacccctacatccaggagcgacctctcggagaaccccgcctgcccactctgcgcactttctgcggctacaaaggccccgccgttccccgtcccgcctcccccgccctgggcatttcttccgtcccttttgacagtctaggcggaataatccttttgtggccccgggcccctgccctgacagacgcggccgcagctgagcgcgcagcctcgctccattgttggggtccaccgaggaccgcccgccgcggccctttgtcgcccgccctgcgcggggccgctccagaggcgccacaactgccggagcccctcccgtcccacgcgccctgggccgcgccgaggcggctcttacgcaccgggaggagtgggcctgcctcgcccggtgcccgcacggctgctgggctgcgcccgcctttgtctgcctcctttgtctgccccgcgccctcgcggcggcggcgcctaggcctctggggagctggcccagaactcagagcgcagctggcgagggcgcgctggccgggtgcgcgccgggcccggccccggggctgcccctcggctgggggcagtcgagcccgccacccgccgcccctcctctgtcccctccccgcgctcccgcccccttccctcctgcccgcccactcccccttccttccagtcccgctcagcccgggcacatcctccggctgcccgcgcacctctccacgccggccccgttccgcggctcgccctcggctgcgctcggctcccgcgggcgctcggccccgagcccctcctccccctacccgccggccggacaggtaaggcacggcctcggcccgcccctggctccgcccctcccgccccacctggctgcgagcccggacaaaggtgggctacctggcgcgcccaggggcggggtgcgcggggtcccgaggctggaagtgaggatgctgcctccttcccagccctcggacccgtctatccgccagtccttccgccgcctcctctcctcgccgcgtctgcccacggaccctggctctgctcccgggctccccatccgtccacctaccgctggacgcccacttttccacgctctgacactcggcctcgcgcgcgccctcgccgccctctggggtcccggctcgcacctactctcctcggcactagccttctctctccctgacccagtctccctttgtctctctgtctctgagtctccgggtggtctctcaggcagggggccccagtccgccaccgttggaagaagtcttcgaagactccctgagccccgggcagagctggcgggcgtgccctccagcccctttcgaggccgcccaggaggctggggtgtgtggccggggtcgctgagtgcgcccggaaccagcaccgccggtggccccgcgccgtcccatctgtgcccaggaaggtactcagcctggctcccccgacggcgctggtctttcgcctgtggtctcccgctctgtccctcctgctccccaccgccggcttttggcttttctccgtccgctcgtcaagggtctcagccgccttcggggccggggtatgagatgagagagggctggggtttcccgccaagtctttcttgctttcctcagctgggtgctccctgggccatcctctccgcccggtggtctcccctgccctatatgctccctccacgctgcccacctcccagcccagtgacacactggtgtctggaaccggttcagtactatgcatctggagtcgggtacactggggctctgggagtgatctcggacaaaggaatgcacctctctgagcctcagtgttcctgtcacaaaacagggatggtgctagtccctacctatagggatgtgtgtggaaattgtggggtgccgcttggtgctggttcacacaccctgtggaggaagggaggggaggggaggggagtctacagacctgggatggggtggggacagggggctccacagaaatggatctcaaagtcaaggcttagagacacttcagagtaaccccaccaccacagcctcttcccccatcacacttcctgtcaccttcacctcctcgtgcccatacaggcgtccacacccttgcaagcactcttctctttctctctctcctcctctttgcttgtcctaaaatcagctaaaacaatcagggccaatgggtcactttttttcaaaatgagatcagtgtggctgagctggtgttgccaacaactgatcacccatcagaaggcgtccggtgactcacccccaattctgaacctcagtcttggcttgatgcctttaatagcggcaccagctcacaggccacttcctttcctctgaggggattgtcttgctggctcctggacctgctgtgtgcttgcccaagccccctgaccactgtctaggtggtcataacatgtgacacaccactccaggagtctggcagtgacgtggcctgagtgtcttaatgagggcaacttcagaagagggaaacctcccagctggcaggttccaggctcccctggctgagttcttatttcagccacagccagggctggcaactggaacctttctctttagaggcaagaacggct

SEQ ID NO: 1235 - DNA, 4001 bp, Homo sapiens
tcaagtaatgtcttgaataccatactggaagtgagaaaacaatggtggtgtggggacttgaagcggggaccacctggatgtcctttgagcttctaccacttattctcatgtttcctgagtgccttccagagacaggcacttctagggactggagctacagtgcgatgcacactgctttgtctgccttttagccttaacccattgagtttaggataaatggtagggagaagatttggaggtttttggaaataccctcctcacaccaaggttcaccagcttcacgagctccttcaaagtgccaccatgcccccagggtaacttttttttttggagacatagtcttgctctgtcgcccaggctggagtgcagtggcacgatctgggcttacttcaacctctgcatcccgggttcaagcgagtctcctgcctcagcctccctagtaactgggattacaggcgcgtaccaccacaccaggctaatttttgtatttttagtagagacaggatctcatcatgttggtcaggctggtttcttgaactcctgaccttgtgattcgcccgcctcagcctcccaaagtgctgggattacaggtgtgagccaccatgcccggccacccccggggtaactcttatcaggcctggtccctaacttctggcaaggggaactctcttctgaggggtgggtaggcatcaccactttggaactggaaggcattggaaggcatgggcagggccctgcggaatgaggtggcttggcccgaagtggaagaggtttttttttttttttttttttttttttgagacggagtttcgctcttgtcacccaggctggaatgcagtggcacaatttcggctcactgcaacctccgcctcctgggttcaagggattctcctgcctcagcctcctgagtagctgggattacaggccttggccaccacgcccggctaatttttgtatttttagtagagacggggtttcaccatgtttgtcaggctggtctcgaactcctgacctcaggtgatccgcccgcctcggcctcccaaagtgctaggattacaggcgtgagccacggcgcccgaccaaagaatttttaaaagtccaccctgtacccactctgtggttctgggacgtgcctcacctggaccggcacgttgtacttcttgcgtttctggaagatgcccacggggtagacctcgcgcacgtagaggatgagatgcacagccacctccaggaactcgcagagcacatcggccaccactgcaggggggcacaagccggtggcgcgctcgaggaagcccgccggcccagacgcccccgcccccgggcccgcaggtccagcctccctaccttggccaaagttgaggtcttgtcgtgtgagcgtggtcatccttcccgctacctgagtgttggggcaagggcagagggtagttccagagacccaggagcccagaacccgctcgcttccaccgtctcttccctccccacagtctgtgggaactggggaaggacctcccgcttcgcacaggctcagggcagctggaagaacctccacccccacgctggcgtccgtgcttgggggcatcagcctctatccactggccgcccgcgccccctcgccccgctgtctcgcggggtggaaagaccacagctgtgcccccgaaaagggcagggccgcggacgcagagggaaacagcgggatgcccagggccgggagcgcaaagcgggacatgcggaaagcgaagcggggttggaataagactccgccccctgctacgccggatccctcccggcgggaatcccgccccctctcccctcccccagtaccggctctgcgctcggttcccgcccgagatcgggcccggccccgccgcggggagccaccgaccggaccgatcgcgcctcccgctcaacccggggcctcggcgccgctcggtgacgttcacggcgctccggtgggtcctagcgcccgccccgcccaggccacgcccattcccgcacggcccaaaccgggcctcgcagagggcggttccgcatgcgggggcgggtctccgaggggcgggggccgggcctcggcgtccgggaggggctgagacccgccgcgccacctcccttcaacttcgggtgggcgcgaagaaaacacaacgttgatctccacgttccattggatcgctacatatcttcccccgagggcatttctctcgctttagcaggcgccggaagagggctggggagggacgggggagcgcgcagctggggactaacggcagccacatctgagctagcccgagtcaccatccctgcagctgcccacgcaaaagcgaatcctctggctcgggggcgggaacaggggaggacaggattgtaccggttgtcaaggcccgggtgaaattttaaaaataaaaaaaagagggcgtgcaccggcgtcgcccctgctccgcccccaccgggtacctaaatgcagcctggcctgaccgcccaagaggatgaaccctccccgccctacgcttcataacaatagctgacctttttggagctccagccgagtgctgggcactgggctaagtgtgtccgtggattatctcagtcctgggagtaactccatgaggcagttactgtgactgttctctttatacagataagtcaagcgaggtgcagaagggtgaataacctgcccgagtctcccagctggtggggtgggcgatggccgaggtgcctcctgccactacattttactgctcccaagtcccccaggggcgtggactcggtctggaagtcctgtaagggccctcagagatgatattactaaaataataaaaaataatgactaacatcgagcacttcttatgtgtcaaacactgattccgttaattctctcattaaccctagcagctaagtctccattttatagccccactttacagatggttaaacaggcccagaaacgttctctaattcgccaaaatcacacagtgggaatacaaacccagctctgatgcctcttctgacaccagggcttccacttatttacagcccccttattttacaagtgagaaaactaagatctgagaagcagctacggagttagtgggcaacaagtcaggaccagaagccaagaggactttgtctgtgacctccagggacgtaagagcttgttagtcccatccgtctgtttggacacagatctagccagacttgtttatcgtttacagctcattatagaagacctggatccctccccccgccccctgatgccttcaaacctgcatttccagacttctaatggggagagaaaaagtaacctgtaagtaacccattaagctaggaatgtcagcaaaacatttcttcaaatgcagtcctaggaaatctgcatcagaatcccccaggagcccattaatcacagctgccctgctgcctagagcaacctgatcgaggtggggtgcacagcagggcactggccctttaacaagctccccaggggcccggatgcccagcaaagtgtgggaatcaccacagaggtttggactgttcccagagaatatcttcattttgtaaaaatgcgatgcattttgtaaaattgtgatgtaaaatcatccatccaaagggatggatgattttgttttaggaactggtgcacttggcagcacattctgggcacagcaaccattctcaagatatggggatcctgcacacatcatgccatttccacacagagctggccaagcaactcactggcttatacacagagttccgtggctccttgagactgactcattgcagaacttgggaaaagcaagggtctttcctttccctctctggaggctgcttaagcagcttttgcattggtgacaggcagtggcagtcatagggggcaactccttgcaaaggagcccttcagactggggcctggggtggggaaactgagagccaagtgactcctgtgggatggccttcaggacacagtgtgaggggcattggggctcaagtcaggccctccctccatg

SEQ ID NO: 1236 - DNA, 4001 bp, Homo sapiens
cacagcataatacaaatatatcatctcaatcttctggtgtagatgttctttttgtggtgcaaacagtatatgctttagagtcagattcaaatcctagctctgccacttactagttgcctgatcttagagaagttagttaaatgctctgggcctaagttccctctttagggttaaatgagaaggtttgttaaacatgtagaactctgcctagaacctaaaggaaacccacaagtgttaggtacctcctatatttttatttttctgtatatgaaaggaaatagtcctcaaatttctctcatgcagtacatagcatgaaaaaatcatcctggccaaaataagcaaagaaagagtttatgaaaggatattgggtggctcaaagaattgctggggaagtgaagagccaagtgtagaagagaggctagaacccagagagcctgcaagaccacagccaaaaatcacaccttggagcatcctggtggcttgacctctgccacagctgatcatgtacactggatgctgctgctgcctcagtgacaaaatcaattctccactgtccttgtttcttatatccaccacttgctccagaatcaaaaagctctgagggagaggtcagcctggctatgccaggggcccgggcctgcattccagctgggatggtcagggaggtggctctagactttctggcttctgcagttggaatttctcagaataagaagggaattgagatgtcaggcagccataaaagacagctgcccagggtctattcttcccatttctcacatgttcacatacatattctccctgtctgtgtacacattcactcttaggtgtggagtctgtctgctccaggaactcccctccagcctggcaccactctgttttcagatgctacttgagacctttctgctatgtctctttcctctgcccagaatgccctcgcctgccccctttccaccagggatccttgaatggctcaaatcttgtgctttctgcaaatgccagctcagatgttacccctcctttatcgtggtgccccctccccacccacgactaacttagtccttcctctatgttcccaaggcactttctctatgtctccattattgcacttgccccgttttactaggaataagtatcatgtctttaatggtctgaccttcctccctttcctcgacccaagatgaggctcctaagggcaggaagtctatctcattccactttgtaaccttagttcttagcacctagtagaggcttcataaatatatttcttaagcaaatcatacatttctcagttctctctcaacacatacattttgagacacaagacaaatccgtctgacaaataggaataatccatgtgaatgcgtgctggaatctataaagtgttggatggatttaagccgttataatcatttatctcattctggttttacatattttctgttaaagggccggatgcccttattctacctcatattttaacaggaaaaagtaatgacgcgagattcccgcctacctttttcaattctgcggagcctcttgcctggttccttgcactgtcaaaaaggaaaccagacggaggggcgggggtaccgcagaagcgaacattctagcctagaggacttgctagttaagtcctgtaagaagttacgccaagtccccgccgtcccccaccctcgccgctgtcactctctccccgttcaggttggctgtggctgcccgcagacacaggctcccctgctcgagtccccagccagcgttctcgcccgggttcccgagcgcgggcgtccctgggagaagccgcgatggtcgctccccgctcggcgcggcccgcggggcggcctcccccgcgcctctcgctgcctgccacccagagaccccctctctccgcgtggcctcaatcactccacgctgacctttgggccgccgggggccagcacgtgaccgagaaactttggcagtcgcggcagcgggcggcggggcggaggcgcgggaggcggtgcggcggccgagctcccccgcgcggcgggctctgcggcggggagacgctcgccccgtgccgcgctgcctgggcatgcggatgcgccgccgagcgctgcgcggaccccggaagcccgcggcagcgcgcgctcagccggcggcgcgatccagcccccggccccgcctgcgcggccggcccggcgggcgctgcgcccagggacgcccggtgcccgccgctccgccgccgcccgctgccgcggggtgacagcgatccttctgttccagccatttcccactttcctcactccgtaattcggctgggaagttggggaagatggatagggtcttgctgaggtggatttctctcttctggctaacaggtaagagtccttttcaacagaaacgaataactttgtatattcctgtagtggttctgttctcaccgcgccccccgcccccccattttcctccttactgaccatgtttaaagctgcttagcggtctggtggaaagtgggggagggggcaacgtgtgtgtttgtgtatgtgtttgtgtgtgtgtgtgtgagagagagagagagagaatgatgggggcggcgggggagaagcccaatgacaagtgagacgcatctagatgcaggtgtttgactcattggcgctgaggttgttctttcgaatgcatttcccctccataaaacggttctccttcggtcttatcctgagtttgtaatgctgtgagtcttgtgaaaagcctggctggaataaaggaagctcagagggagctgattaattaaatgaactggttttctggaggtggaggctagaggactgtctccttaatttcttccctagagaaggagggggacccagggcattctctctgtggctctctggagggtgcaaggaactggaggttgggaagaagatggggatggaaccttcactggttgtggagtttagagcctggctctctcttacttggtatcatttggggagtggtcccaaatgataattagaaagcagaagagcctttctaataggtgcactctccgctccctaaaagataatttgcagagagatttagaggcattgggcttctccccagcatcaaagtcactggtctagctgggtcctctgtgccctcccctcctttttggtgaactttctccccattctgctggggtcagtagatgctcttgttcttaacctatttccccacatgaggattccgattcccatagggatacagggccttggggtggccagccctgagagattcacaaagcagccctgctgaagggagtaggatgggggtgaggaatgtctggatagcttggactgggtcagaggcaaccattcaaatcaaggtggaggcagaatgatggaagaaatggaaaaagggatcagaaaggtgaggacaggatgggggtggaaggcaggagagaaaagggacaatagtaccacatgagaagttttgtcacctctagcatcaccagccagaagatctggacaaaatcaaggcactaggcaaaggggaacaagcttaaaatagctaaaacaagtcatgtaaagggggtaaaatacatttagcaagaaaaggcaaataccccatttcccttagcttcagaataagattcttcattgcctaaatatttttcccatttcaaatgaaatgcccctaacattgccgttgccccactgctgggtttaggctgggggaggcatcctcagcagagttagcctcttcttttggctgctttgagttcatccctcccacattattcagatatgaatcatctctaatttcagggtttggctgatccatgccaccccgctcccctggcctcccagtgccttccactcccaccctcactgattcttcacatccttaatctgcctctactctcggttatcaatattctcagggcacttagtccttgagcctgtatcacaacagcactgaagtcagccaggcatcgggggggggggggaggggtccctgagtcagaggtgctctttaca

SEQ ID NO: 1237 - DNA, 4001 bp, Homo sapiens
caggccagtggccaaaagcacactatgccccaaagtactctaattttgcttgtttttcacttaaagtcaaaaccagattatgttgtctccaagtctcacatgaggtacacatacaccatagctttagttttgaggagagatatcttgtaagaataaggcttgcaagtataagtacaagctcaactgagcttctactcataaatccacaaaataaaactatctcttgaatttcaatccaatgttgacagtttaagaatggaattttaccatgtaagaatggaaaaaacaaagggtagggtagcaccaacaattacctggcactttcctgatacaaatcaacaagaaaacaaattttatttagtactttaacattctactacacagaaatttacccaaataaacttcattcaacttttttttttcttttttttgatacagagttttgctctttcgcacaggctggagtgcagtggcgcaatctcgattcactacaacctctgcctcccgggttcaagcgattctcccacctcagcctcctgagtagctgggaccacgggcgtctgctatcacacccagctttttttattttttacttttagtagagttggggtttccccatgttggccaggctggtctcaaactcctgacctcaagtgatcagcccacctccgcctcccgaagtgctgggattacagacgtgagccaccgtgcccagcctattcaactcttgtaaaacatacacacatacaccaactaatccaagtcttgttatttcaatattttaaacacagcagctggctttgtttcaggtgtcatttttaaaagaatggtatattttgctaaagaaaaaaagacagaatggtctaaactagttttaagcccccactgcccaccccccaccccccgccaaggctcattaatcacagaagagttgaaagggacaccttgatgtcatctagtacaacccctagatgttacactcccattagcgatcaaagtgtattgtctacaggtttcctaacaggaattccccaggcctttcaccatcaaattacaccaatgtgtgcatgccctagttgtggaggctgttggttttttttaacaggcattctgacaccaggggaaaagaagaacgtcgtcttcgcactaaccgaacccccaaagcagtccacccttgacattcactcattcactcatccagcctttactgaatatgcctatgtgccaggcagatggcggctcttctctcgttaactttacctgcttctctgagggcccagggtcctttccctgagcggccctccattctcgagccatttctgcgtatttctccttttcttcctccctcagaagcttttggggattgaaggagcaaagaagagaaacagccgtgaggatcccgtgctctagggcccgcaggcagatgctggggcattacagggaggtggttctggtgtcggtttgcccagggccacaaacgggggccttcctcttcctctggcagggccaagccgcctgacctcctcgaggccttctgccctcccgcctcaccctccggcttgcccaactgccctgcccagccctctcactccgctccagccttaccgcccagtctgaggagcagtaagggatggcatcagcaacgcgagccacaggcaggcctcgtcgccgtagttcggggatcttctcctgcacgaagaaatagtaagcattccggctggccttacggttcggcatggcagcgcggtcaaacttcctggcctcagacagaacaaagcaccggcgccctcgccgggctcccgccctaagtaacagaggtaggcgcctgcgcacgcagcccgcaactctcggccaatcaggaagcgacgcgcagtcgcattgccccgcgggggaacaaacagcctgagactggaagattccggctcgtgccgccttgcgggtgaggtggggggagagcgccgtcgcaggtgccaagtgctctgattggctgggtgcgtggcaggcggaggcattgtcacgtgggaggcctggagcaatttctgtacattattgcgtaatgtgcgacaaagtaggtagagaaaaagaggagctgcgggtgtttccgcgttttacaggtacaaagggccagccagctttatgccaagcactgtgaaaagtgttgaggaacatgtatgaggaacatgacaaggtcttccttgccctcaagtttacaatcgaatgaggggagaggatgacaaaaaccagtgaagcaacaaaactcgaattttttaaaagtacattcaaaaataagtgttagaaggaaacagaggaagaggttgagatttaaaatatccttaaagttttatagatttcctcataaaactgtttcctttttgtcaattttattcctaattaacaatatgagtttttatgaaaaatttcttttaaaaaattatattttctaattgattactactgatgtctagagaaggtattgattttagtgttggtcctgtgtatatagtcacactgctgatctcttatactagtttacatcgtgctagttggttctctcggttttctaattacgtttcccagagaaaattcctttctcgggtcagctttctaagtgtatgtatatatggggtatgtatatgttttaaaatcaagaatggcagttgaaaatttgctaaatttctggatcttttcaggtaatcacacggttttatcttttaaatttttttttttttttttttttttttagacagggtctcagtctgtcacccaggctggagtgcagtggcacgatcccggctcactgcagcctagacctcctgggctcaagtaggacctcccatctcagccccccgagtagttggggctacaggtgcacaccaccaggccctggtgatttttctgttttttgtagagacgaggtctccctatgttgcccaggctggtctcacacttctgggctcgaggatctgcctgcctaggcctcccagagtgctgggattacaggcgtaaaccactgaacctggcctaatttgttaacataaagaatattgctagttttctaacgatgcagcctaccattcttagtataaactattgttgatcatgaggctttgcttattttttaaaaaacataatatagaattttggcttccttgattatagtaatattgaactgtatagattttgtggtattttctttaccaaatattggtatcagggttgtgttcagatagaataatagatgggaattatctattccttgacaggttggtagagcttattagtaaaactctctgatcttttacatctttggagggtgcgtccacctttaactaccatttcaatatcttttgtatggttattagtcttctcagttttcttagttttattcacctaatttttgtaattatattttcctagaaaaagtgtctatctcatttagatttttctagtgtattggtataaaatatggcaaggatctgaagcagctggaactttcatacattattggtgggacaactggttgacagtttcttatacttatcataggacccagcaattccattcttctaggaaaatgaaaatatatatccacaaagccttgtagatgaattttgagagtagcactattcataagagctccaagctggacaacccaaatgttcatcaacaggtgaactgataaattgtggcacattcatttagtagactactactcaagaatgaaaaggaatgagctattgatattcgacatggatgaattttgaaattttgttgagtgaaagaaggcatacataaaagtatacataggatgtgattcaatgtatacagaacttgagaaaaggtaaaactgtagttataaaaatcagatcagcattacctggagcccggaggtggggaggggagattgagaactgacacagggaaccttctgggttgtcagaaatgttctctaccttaattgtggtgttggtggctattagtagtatatatttgtcaaaatt

SEQ ID NO: 1238 - DNA, 4001 bp, Homo sapiens
acagtgcctgactagctgaattacagccccaaaagtctttcctctgcctttcacacatggctgtaaaagttagagttaagaaaaaaatttacaaattctcaaaactatacagaaaaagctgtttaaagtctgccaaagttttaaaaaattaacaacaataaaaagaaaacctcaccacataaacccatacacttaaaatgaatacgatggaatacgctatagaaagaaaatcttaattatgaccttaggagcatgtgagtctgtgtgtatacatatccacaatacacagacatatgtaaactgcaccacaaaccatcaagccccattaagctcaaggactattaaagatatattaatatttccaaagcgagctgctgagaaagaaatgagaaggagataacatattaaatttttatccagaattttctagcattttgccatcaagggatggactgctacctagcccaggtaacaattaaccagcccattatattttgatgcaccgtatactcagcagagcacattaaggaaaaacagtttggtttctaataatgttacaatcacaattctctctcccacaaacatctaagacgacagaaccacattctatctatgctgaaacaaaaccaacaatgctgtctataacaaattcataagaactactacatactatcagatctcactgtatgctgtctctgatcaatgctttgaaactgacgagtatgccataaacataacgtgctttgcagcaatttttactagcataaaagataccagggcaacagaggctcctttaacctaccacttcaacaaaattctgtaaaatcaaaagcgttacagaagctttcactccgctaggcacctaggtcttcctgcaaaacccagactctattcaacagctccctgcaagaacacaccagtctgccacatatcacatattgtaccgtcatcggtactcagacacctgaaccacctggactgacagagttaggctgtcagctctgagatgtctgctagagtgcaagaaacactgaagcagctaagcccttccaggtacaccaggtggtaaccttggcaccaagtgcctctatagtaaagtccctttttccctgttagaagatgcgtaagatcgttccaaagaaaatgttacaatcctaagggcctttttgcacaacacaggaaaaggctggccttctctagtcaaaaactcttgtctgcggggggagatggagctacaaatgtaggaaacccagcttctagtcgcaattctgtgacagctagcacagctagcagagcaaccgcgccaagccagagctcagttttcccttcggcaaaatgggactcaccaacgccacccctccccctcgtcaaggagtctggcacaccctagaggtctaagattacccgggacaatacgcggtggggaggtgccgccgctcccaggacgcccaccctgaagcccctctccccaacaccccgagacagatacgcagggccggcgtacctggtttcacagtcttgagacggatgggctcgcggaagtggcggatgacagccagggtgtcccggttggtgagcccgctgacaggcgtcccgtttacctccagcagcacatcgcctgggctgggcgccttgcccgagacgacgcagcaggtgcccccgccgggctcctcgcggagccgccccaggtaggggaactcgccacgctccgcgccaccgcggatctccgcgccgaagtcgcccgggggcccggcccaggacacggcgcactcctgcaccttgctgagccagtgcttcttcttcttcagcgtcttcgacatcccgaaccccgctgcaccatgggggagaccccgcgcgggcggccggggcgccgctccggccccgtctcagcccgggggccctgggcggcccgcgcagcccggtaaggggggcctcgccgctccggcccccaccccgcgaccacagcccgctgggggcccggccgttcccagacgcgagacgccccttggacgcccctcccggctgcgctccccggggctgaccggactccgcgagggccaccgcgggttaggctgaagaaaggaaaagggaattgtccccaggaggttccagaaggggcttcgggcggggtcactgccgccggctggtccctgggctcagcgcccgagcggcgggaaaggctgaggcgggggggcggggaggtgaagggggaagagccgggaacgggaaaaatccgtggggggcgcgcagaagcgcgcgtagacccgtcgcgggatcgatcgtggccgctgcggagctgtagcgcggagaccaacgcctgcccaagctgccaggaaactgccgctttcaaaccagccgcaacctcctcctcctcccttttcccttcccccggccctcgcccatccctcatccagagccccgccccctcccgccgcgcggcgcccggcgcgctgccgtcacaggctgggcgcttgggaacgagccccggccctggactctcgcgccagggattggcccccggcgggcaggaggcggaccgccaacgagaatggggaccactggttggtcggtgcgagtggaggaggcgggcactagaatgactgaagtttagagagggtggaaaaaagaagtttggagagtgagggagggcgcagaggaggggcaggggagtggaaggggctgtaggtcgcagggccgggagaggccctctgcgcggcggctggagccgaggaaaactcgaatccgagagggaccgagctccccgaagtgggggcgtggccggcgagttaggcggagacgcgggcggagcctctgagcctgtgcggggcgcagagaggggccggtgtgcttagattggaagacaacgtgcggagtcctgagccggccgaggttccggggcctttagggtggcctgttacagccgatagtttgcattgagtggatattgcttgttcattcgttcattcaacagatgttactgaacgcccattgaggcagggcttcggagtccggttgatgaaagatattataaaatagagtccggcactgctgtatgacctaagacaaattagacaacctctctgagccgcagcgtcctcagtgaaaagtgaagattacagaagatgtacaaaataactgcatagtgcctgacagtgggtggttgcctcttaaagtttggtagctgctgctgctgctgctgatgacgatgacgattttgtgttagatattgtgctaggtactgggattcaagggtgaagaaaacagaagccccgctattgaggaggttacagtctagtgggagagactgagaagtaagcagactgcctgaggtgagggagtggggtggaggtagaaggtggattattaagaactaacctggtagccagcagatctggttggagtcctgacatgctacttacttgctgtttgaccttggccaaatctcagttaaaggaggtgaagggagaacgaacattaaataaaagatatcgtagatcccttccagctctaatttttcagaaatttcacttgagctttctctcttccccggcttgacttacactcttccctgtctttggaatgcccttcatctcatctcttttaaaactcctatccgtcctcatcccaaatgccggctcttccaggtagctttctctgatttcttgccctcaagtggaaagtgttttctctgagctatgatctttgtttcacttttgcagcatgacatttatttgtgtagtctcctgtctccctttaatagtaggtgaaagcccttataaaactccacacctcagatagactggaccaagcttcaatagctgcagtgatttcgttgacaccattgtatcagtcagggtcctggcaggaaacaaatggcattttgcaaagatgtgggcagggtgtgggaaaccacaagagaagctggaaccctgaggctacagctcctagatctgtccaatcgggaaagaacagttaccgaaaaatccagacacacagggcca

SEQ ID NO: 1239 - DNA, 4001 bp, Homo sapiens
ctcccatcattttatgtaggaagcctcctctgaccctcaggcttggttaggtgcacccttctctgctgcgagcctcctctgtttctttttaccacaacacctaatgtgctgttttatcactgcttacaaatctatctccctcacagtcgaggcctgtcagattcatctttgtgccccacttagtggatgtcttctgtcatctttgattgctctttccttcaccacagtgcctctgccaacaaaatcctatcaacgatcaaagtccagttggttctgcctccaacagtttcctaaatctttctctccatttctactatctctgtagtcccaaccagtatctttttttttttttttttttgagacagagtcttgctctgtcacccaggctggggtacagtggcactatctcagcttgctgcaacctccgccccaggttcaagagattctcctgtctcagcctcccgagcagctgggattacaggcgtctgccaccacacccggctaatttttgtatttttagtagaggcggggtttcaccatgttggccaggctggtcttgaactcctgacctcaagtgatccgcatacctcggcctcccaaagggctgagattacaggcttgagccaccgcgcccggcccccaacatctttcgtgtcttgacaactgcaacagtctcctaatcaatagccctgtttccactcttgcccattccgcacccaataaccagaatgctttttcaagaagagatcacatttcttctctgcttaaaaccttccaagcccggccgggcgcggtggctcacacctgtaatcccagcactttgggacgccgaggcgggcgtatcacctgaggtcaggagttcgagaccagcctggccaacatggtgaaactccgtctctactaaaaatacaaaattagccgggcgtggtggtgggcgcctataattccagctactcgggaggctgaggcaggagaatcacttgaacccgggaggcggaggttgcaataagccgagatcgcgccattgcactccagcctgggcaaaaagagcgaaagccgtctcaaaaaaaaaaaaaaaaaaaaggccttccaagtccaaactttttaccgtggtctataaagacctaagaggtgccgctcctacctacctatccgacatcatctcctgctatctcccagctcaccactcttcaaccacactgaccacctgagacacgcctagctcattcccgccctgcagccttgacatctggtattccctttgtgtagaatggtcttccttatgagcttcacaaggctgagcccttcttgttaattaggactcggctgcaatataccctttacagagagctctctaatggccaacctatctaaaagcagcccatccagcaattattctaccatgttattttttgaccactcactgctatctggaatcatctttttgtttatgatctctctcccggcagtaaaacacaagttccacgagaggggaagtttgtctaccttcgctgccgtattcccaaagagtggaacagagcctggcacacagtgggcgttcagtcaacgtttgctgaatggatagaaagaccccgtggagcagacacagtggcgttcctttaagatctgcactgcacaggtctcagtccctccctcctctagttccccacagatttccgaccctcggcctccccactcgccggcccccaggcctggtccccgctcccggcgggcggcaggctgcttttaccgtccggtcgaaactcaaactccaggaactcgtggccgaacttgcccttgtgccccacgtagtaacgcagataaaagtcactctccatggctcccaaaagacaaccgagcctgaacttccaagagcaagccgcactgccgccgtctgcgcccgacactgacgtttgcggcggcgcgcggaagtgacgtcaggtcccgtcgtcgctgcgtggaggggttccttctcgctaacctcttcgcccggaagtggcaacaagactgcaacatcccctcacgcctagtctgtaaagaactttgtttaacccggaggcggggccagccagctccgcccctccagctggacgcgggagcgaggttgaggttcatacccctgggttctctccaggcctgaggcggagagccagccgcctgcctacctctgggctttgaaccccgggtctggtgacttcgcttaaagacctcgggccgaaggcccgccaggctcaacctcggttcacaggacccccgacttgtgtgagtcgtacaccgctctttaccgtctctggacctaggtcatctcggcagtaaaatggggtgaaatgacccgacctccccggaggatgccgcgcacgatgtgtgcctcaagttggcttccactgacctgaactgttaagaaagccctcctcagtgacgccttccctgaatccacagtggagattgccgttttcctggaactaattcacccacacttacccatttcatccctttccaccttttatttctacctttctgccccactgatctctagaataggtgctgggagacgttagagtatttgatctcccactccccagtcatcccacttaccgagcagtaattctctgcctggctgcacattgcaatcacttgggaagcctctaaaaatactgatgccagggctctaccccaagccagttaaaatctccagcgctggacctgggcattggtactttttgtaaagctttcaggtgagtcagagttgaggaccactgaccaaagaggtcctttcttttcagggtaaagttgtcctctgtgaagcctttctggctctggaaaaaatttacagttgagtaggcccagggcaatcaagatcataattatgtaataggaacctgctttcactcatctaagttccaggcttagaaagaatgaatggttctagagacagtgccgagatgacatcattcttgggtcctggcggctagaactgtatacgattctgtaagttgggacagcagtctctgattcctattcccagtcttttctttttgagacggagtttcgctcttgttgcccaggctggagtgcaatggagtgatctcagttcaccgcaacctcgcctacctaatttttaaactttttgtagaggcaaagtctccctatgttgcccacgctggtctcaaactcctgggttcaagtgattctcctgccttagcctcccaagtagctgggattacaggcatgcgccaccatgtccagctaatttttgtaattttctgtttttagtagagacggggtttcaccatgttggccaggctggtctcgaactcccgacctcaggcgatccgtctgcctcggcctcccaaagtgctgggattacaggcatgagccaccgcgcccggccctcagtcttaacacggagtccttttctccctgcaaaagcattagcagcagagtgtagagtaggtgtggtgggggaaaaatcactggacacaggttaaaataatccctgtgtaacaatgactcattgtaaccaaaggtgaaccgactcaactttttagacttcagtttccttctctttaaaatgagcataataatgtacacctagcagaactgttgtaagaaacaatgtctcggaaactaaattgctgtaaaaccataagacatttttattacaaaacactggatatgggtggtaacaagggaattgtataaacgagaagggggctagacacagtggctcatacctgtagtcccagcactttgggaggctgaggcaggaggatcacttgagcccaggagtttgagaccagcctgggcaacataggagactgtctctacaaaaaatttaaaaaataggtaggtgtggtggtgcacacctgtagtcctagctacttgggaggctgaggtaggaggataatttgagcctgggaggtcgaggctgtagggaaccatgatcacaccattacactccagcctgggtgacaaagcaagaccctgtctcaaaaaaaaaa

SEQ ID NO: 1240 - DNA, 4001 bp, Homo sapiens
tcatcagatgggaaatgaattcaagcacatgattttttttcccacatactcaagaattattttaagaaacaaggaaaagatggcaggtttaagaaaagtcaactactttcccaaactcttgagtacaaatataaaaattataaaaattgtaactagagctcccattttatcctagtttggctatgctctccccagagctcactttagatttagtgatctgaaagaatgtgaaccccttaatcaaccaaattccaatagttgcttgacacagtccatctattacattaaaagagagagcaaaattaagtttcacaaaaataaatcttgtctacaagcctcacaaagtgcaataacttaggattcaataccttttaacttaactgatttcatatacagcaccaacacacatccccaaaaaaagaacaaaaatcaggatattttcacgttaagaaatgacaggtatattctgcccacgtttgtcatcctaaaaagctgactcactactaagcttcaactacaagccagaaaacgagagccctctgggagagcacacccaaaagagctgtcaaggttcgatgctttgatttcacatggtggcacaatgactgactccaacacgttattaataaatgcaggcacagcttatgtcaccatttctttaggttaagttttcatacctcccttcccagatgtccacattagacacaactctgaacgcaaatgtttttcttatataaaaccgaagagaagaacgacttaggtaggactccagtcctaccagtctatggactctaccatagactggaggtagagtccctccagtctatggttttattcagccagtcttgaagtaacaatacaatatttatgactcgaaaaattacattttactgcaagaaaaaaaaaagacagattcgatccaatcaccgtaccttgctctgccaaatgttagtaccagaacttctgaaataaacaaacctgtgtctatgttcatcgggtccatggatcaggaagactccggggtttttagcccctttaccggcatctacatgtggaattaacacatcttctaaacccaaatcaaagcgtttgtgttttgaagagtctggaaggaaaaagaatgccccaaaacacagagtgatgaaggcactaagaataaggagaagaataaacttctcagaaagtctcaaggtagccctgtgatgtgggaaggaaggcggccccaggttcagaggtggtatcctacgtccagagaggggcagcagggctggggtagtcatcgtttacgctcttggagagaatactttagaaagttctcatcttatgtcaaatgtagaatacattgaactgtcttcaaaatcttggccaaaatgggaaaactcaattttgctcctcttaaaggactgttgtgctttttaagagggcacgtcattcacgcccatccattcccactcagaaacgtgtgtgacctcccccaaacgatcacaagtttaggtcctgcgatatcctcttcaacatctgtacttcatcggattattacaagcctcctcttcattcctaggggtagatcaggcaagccacactgcagaaaagctgcaaggtgggttcttccattcctgcacctcagtgagatgctcaaacgtagtcttccgccccgaaagggagactggcgacatccgaggagttgtagaaggttcacttgatctccttcgacgcttctattccagaatctcttaaccttagcggtggaaaaaataagggtctcccacggacgtctgcaaacagggaggaaggtctcccacttcgctgggaagccgaagcagcggcgctgggcgaagtagcaggaaggagttctcggccgcccgcgcttcccggcgctgcctggcaggaacctggcgcccggctgagtcccgctgctgcccactcgacggctggcgcgaagggcaatagcgtccgaaacacctgagtccggccagccgccgcggccgccgccgctgttgctaccgcacgggtctgtcagggagcggaacttcctcctccggcggccactgagaagccccggcgtgtcctgggggaggggaggcgcggcggccgcccccgccgagctcctcctcctcctcctcctcctcttcctcctcctcctcctcctctccgcggccggttcagtgaaccccggcgcctgctccccgagctaggccgccggccgcagtggccgagccctcgcgcctaagaagccgagccggggcccacgctccgagagcccggggtaggcgccggctcattcctcactcagccctggagcggcgggagggcctgggcgcgcgggagcagccgcgcctcgggcgggcagaggtcggccgcgtctccttcctgcccggccgcgggggcctcctccgcgccgcctccggtggctcgcagctgctggctctggcggcggctgccagagaggcagcgcgcccacgccgctcggggctgcggcccggtccccgtaccctgcctccccaggcctggtgagcgcagcagctgctgggccgacacccgttgggctcacgccggagaggaaccggagggcgggggcgatgggacccgggccggcctaccggccccggctcgcgagtgggcgtccccgggcggcggagtgtgaggtgcgcgcgcacgctcccggctccgctgccgccgcccctcccccacccagcctggctgcccgggctccggcctcgcgccgctgccggctccagcagcccgaaagcgtactgctgccgccgccgtctgagcgcgaaagaagagaaggtcgccgatctgcgctgccacgagaacttcaccggtgcccagggccttgccaccgccagttcgtggggttgacccagcgtttgggcgagagggagcgaggggttgggtcgcgaaggtttcgctgaaatgtagtgtcaccggagttaatggcttctgatggcttaggttaacgtttactgtgattctttggaagtcttgtcttcagcgatagaccgtcaggcccgaggattcagcaacagggtctcaaacttccacgcagcagcccatgctcacgttattgggcccccgaggctcgattaatagagcaccaacatgtgccatgttacgtttttaaaataaagtggtgaccctgctccttcagctgggcttcctttcagaggaatctaggtacccccgatatgacaggcgtctcttcattgttcagtttctggggcacgttctatcatcttcacacacctcatcaacccccttcccataaaagagaaaatggatgaataaggaggtgctgaaacccaaaaaggcgacaatattgtttacgttcaggcttaaaaacaatctgaatcaattctgttctccgtagtattgaggagagccatgttgtgattaagtgcaaaagatttccttgcaagatacatagactcttgcatccgatttacttgcaggttgtttttgttctaatattgtcattccctgtacacatcctttactgatgactgggaattggagaggaggcccttaaatgtcaggagagtaagtcagccttagcttaaaaatcaagcagaaaagtctcatgttcattggcacacttgtaactacattccagtctcccagtctgcattatttctagaagctctgcatatctaactgcctaccacatgacaaaagtcattgtcattgatcctgcttcaccaaataaaaagtaaaaatattgagggccacctctcaccagttcacccagggagactggtaagcaaggagtgcccggtccctagtgagatttatgttgaacatttgtgaagagtagatataagaaacttttagccttcccaatatgtctttataaaatgtgccaaatttaagaataagtctctaatgttgagactccgtaagccaaagtggggggggcggtggggaggcggggaagaacacactgttttcctactgttgagatcattagtttccatgaaaagttcaggggaaataaatactga

SEQ ID NO: 1241 - DNA, 4001 bp, Homo sapiens
gccctccatcggctctgagcaggtcttgacagggcaggtcctgatccttgctgcctgctcttcctggaaatcagggtcgaactgctgacttcttcgcagcaaatcaagaagtccaggcagaagcagccctttctttcctttgagtccatggggaggggagagcatcctctcgtttctagggaggagaccctggcccacagcttgcccacggccccctcgtggcctgggggtgtcactgcagccccctctgcattgctgggcaccatccgcacgcaggcagttctaacagtggtccagcagaatatttagtggcagtggcaagctggcaactgtcttcaagccttgtgaggctgtgtttgcttttgatttcttaaactaagactcagacttaaagtgatccttctaaatccctcctggtacaatccctacagggaaccagctcaagatctgcttcattatgccaataacctcggagcttctgtaatatgaccactgctttatcatctcttcctgcatcatatgcaattatgtacaattgtgtacaattgttctgaagctcaataagctcaatagaaacagaatgcacaacatcctctggtttgtaggttgcttactagattacaaaatatttgcaggacaccaaatacccccttaaatcctgggtttttaggtaagcaggtcctataggggttttggacttaaggtcacacagtgaaaaagaatgggaccagtggctctgtgtccacaaatgcaaaaagagggtgcactaaggaacctgaactccactctcattagcaactccacaaagggaaggagtggagctcactgggcctgggggttggatacgacataccagagtctgggagtgagggggcagttggtctaggggttcagctgccatctgtcacggtggggacgattaactgacccgagtggtgggaaactgtgtagggaggaaagaaggtgggacatttgggaggaaaggggaaggtgcaaagtgcagtctgcagggccagaagtagacctgggaccaggagtgactgaggcaagggaaaggggtgggagcgccagagggtcttctctccttagagggggcagttggtgggaggagtttgggggctgagtccatacctccttgattttctcccgctgggctcgcacttggctctggggctcctgactctcatcggccctcgttcccaggaccgggtggcggagacggctccggaatgcgttgaagtcaaagcggaaagggacgccctcgtccccgggcctggaggccgggatgctattgccccgggccgccgtggcctcctcgcggggtccagtggggcgggtgcgccgcagcccccctttcctgcggcggggactggcccagctgctggggtcatcctcgcccggggccggcgcggcgggggccgggttgggaggcggctcctgctcgcgggccggggcatggccggcgatttcagccaccacttccagaccaggctgctgggtccggggggccaggaagaggcgcttgaggcgagaggagtggggcagcaggaagagggccccgaagcacagggtgaccaggcccgagaggaagaggaggaagaggaacttctgcggcagccgcagcccccacggggaggccgggacgaagccgggcactttcctcatgagcatcgtggcccggccggtggctccagaagccctcggagtccaggcacgtgtctgcgggggcgcggtgaggggagggcgtccggagcgccgcccgggatgggggtccctgggcagggttgccaaccctgagagtttcgccgcttcgggggactgtccccgaagttcagggagtttggagcgagtcctcccgcgaggaggcgggggcgcagcggcctcggcggggcccgggcgagcggagcggcacggcttggggcccgggcccgcagcgaccggccgcgcgccgcagcctcccctccggccgagccctccccgccgcgccggggcccgcgccttcccgcgctgcggccgccgggaccgtcacatgccgtccgcggcgtcccggctgtccgcgccgaggggcgcccgcaggcccgcaccaagccgccctccgccccctaggctcccgcccgcgctggtaggcgcccaaagtttcagcttcagaagcagtttccggaggggaccgaggcgatggggggctggcgtgtcagcgccgccccgagcgcgcgcacacccggcccggtcgcgacagcgcccgggctcgactatcgggacacgtccacaactttctccgccgcggagagggcgccgggagctgggagccggagtggccagggagcaggagcaggcacttccgagcctgcgggggcagggggcttcccccgggccccagacagcgcagggatgcctgggtccggagccgcggctgggcggctgcagatgcgcccgggagcgcgggctcccgcccctcgaactcggcagggcgcggggctcccactgggatcacctgttcccggccccgccggctccgcggagcgcgcagccctggccgcgcctcccccgctgcagctgtcttcctcgcagcggccgctccagaccggccgctgccgccgagcctgcgccccacacgcgcgcacagccacccggccgcctccaccgccgtccccgccgccgccgccgctcgggctttcactgcgacagcgcccgccgccccgcctcctgccgcccgccggccacgcccgccggccacgcccacgcgcgcgccccgcgccccctcccgccgccgccgcgccgcagccggctgagggccgcgcgtccgggggcggggcagaggccgagcgcgggcgggagcgcagcccgctccaagccccgccctccccgaagggcaggcgtcgcgcgcaccccccatccagcgggcgccaatggtccagcggcgcggggcaggcgagggcgggggcggagagcgcaacgagggcattggctgcatccgagggatccccgttgggccacagtcgtccattggttactgcccagccttcgctggaccccaagcgacagagaccaccccccagcccgcccgcgaggctcgggttggtggcccccggaagcgggccggagacggtgttgctctggaggggtgtgcccgtcgctgggtgacctctctcgcccccgagtgccagcccggggttgtcagggagctggcagcccgcgccctggcggctgccccgggcttctcagcgctaacgccgggctgcaggggtgctgctggtggctggagccaagccagagagctgtgaccgcggccgggtcggcggaggtgatgtttccactggccccctcgcagaccactggcgtgccttccttttcccacaaccctaaacggggccagggctcctgggtggagcacggagggaggctgaccgcagccttgagaagcagcgaaaggaagagagccccgggcgtgtctacagaagaccacacacataatgtgacggacgtctaccttgatgcctacgtgtgtttatatgcacatgtgtgcgtctgggcatagatctatatgcacacagagactggcatgtgggtgtgtacatgcactcaaacatacacttaatttgggtatggacacccaagtgattataccacagtatgcatagacatatatgtaaattagtacaaacatggacatgtgcacccgcatacccacagacactcaggcaacagataacctccaaaaacagccaggcatcaactcccagacacgcgtgtcctcaaccccaaggccctcacatcttcctccttggacttagtctctgcatcttcccttcctgttaaacctaacccagggtgaagcaacattgtgctgtgtgggtctttcatgcaaaacactttatagagacaaataacagcagagggagagacaaattaagaggtttgtaataggcaagagggaaaatatctactttcagctgcaatttaaaatgaaatgcagtgttgacgagacagaaaatactgcaggg

SEQ ID NO: 1242 - DNA, 4001 bp, Homo sapiens
aaaaaaagaaaaaaaaaaaaaaaagcactggcattacaggcatgagccattgcacgcagcctcattcaatatttatttatttatttttgagatggaatctcgctctgtcacccaggctggagtgcagcggtgcaatctcggctcactgcaacctccgcctcccagattcaagcgattttcctgcctcagcctcctgaatagctgggattacaggtgtgcgccaccacgcctggctaatttttttatttttagtagagacggggtttcaccacgttagtcaggctggtctcgaactcctgacctcaagtgatccgcctgcctcgacctcccaaagtgctgggattacaccatgcctggccttcattcaatactttctgaatgaataaatgaggtgcctacattgtagaagctactttcacatatattaattcgtgtgattctcacaagactcaaaggttaagaggcttgcctcatcacagattagaagccacaggacaggaattgaaacccaggctgcctgactttaggcccagtactctcttactataaaacagctgctgggaaacacaggcattatgccctgtgtctcttgacctgcccctccaaaccttctatccctacctccattttgatccccaccaaaatcccggcccccagagcagccttacgtgtcaatgatgtacttgatgttgtcatgtacagtgatgtcatcccggcccttgtagggttggatgtggaaggccacctgccacaaacagaggagtaatggtcaggtgagtgtctatctaggggccacaacatatcaggctcaggatctaaccatggcctggaggagaggctgagttcagaagagggcctggcagtggtgggcacagtagagataaaggcagctgctgcccttgaaggccaaaacaggggtgagcagtttgcccatctcccgcagcagggcatgtgggaatcattttggtgggctgttacagggtggctaataggtttcaaccttgtgccagctccaagtggttggtgctagctgcctgaaacagtggaataagtatgctgaagctgtgtcagtggaaaactgctgtgatctgttagacatgtcagtggtggaattctcttcaggaataggggagtggggcttttcttctttctctatcatttttcttccttcaccacagaagcaagggatgacttacttgattggcacatgtggggaaatgcttcgtccagtccgtccttcctcttgaaagtgagcccacctgctgagaacacctgcctactcctcgaggtccagcactgcctcccactagagagttgagtctgcaggtccctttggctcttgcctaccctttttccaccagggtttacaacctaacctctattattatttaacaaaagtgataattatttagtcttctcttggtcctatatttagttttctcagttttcttagaattcaaaaaactaagagcaacataggcaccatttatctgaaccctcccccaaaaccacacttgccacatatttgttatccctttgggctactgccaagaacttctgtagaggcactaaccctgtgggcggaggagagcaactctccagaatagggcagagagcacgtggcctcttcttggagactcacctggatgctgtactgatgggcggtgtccagaatggcgggcaccaggtcatctgagggctccccgttatcatcagccatgccaggtgggtaccaggacaggaccaggacgcctgagacgcaacacagaggccacttcagagacacacagtacccccctcaacagagatttttttcctcacaaacatctccaattgcaaaaatggttcctaaaaacctgaagcaagcctcctgccaggttcacttcctgcagatgagtcccagagcctcgcgccccggagctgtccacgcccgcggtgctgaagcggagcgcctgcgggaaccgtagcgcgccaggccggaagggagccaggctttagactgcctcagcaagtagtagaacaaagggaatgggaggacagtgccacacccacctggaagccacaggcctacctctgaagaagagaagcacccctaaccctaacgtcccgcatggagaagagccctgagcagaggccatctgtaaaatccagcaaaattcagtgacgaaatccgaaataagtgagcctcccctccatagcctacgaaggaggcgccctgggaccttccctccagctgggtgcttgatgaaaagcctctaaacccccaacactacctccaactgcaaatagagcagaggccttcatggaacacgggcacactttcctctctgcagccagcaaaagcaggaacggctgctgctctaccctgtacctgccatgaaagcagaggccgccctaagttccactcctctgaaccccagaacctgcgggccaggactccaggcctcacttcccatcgcccaacaaatttgaagactctgcctccctctcctggtgcaaactcctagcagttccgccctatgggaagggccctggatgttagggatggaagggcccagctggggggtctgaatactagacggaggggcggtgtcgcatggtgggcccaggatgagagtgggagggaacagctaagaagccaggctggcggataagtgggaccaaagggccggtgacaggaccagagggagctggggtgtgggaaggaggaagggtgaggctggggggcagggccgcccggggtggggggcgctcaccgatggcggcttccttgagctgggtcatatgctcccgcagcacttcggggtcccgggagctgtagggccccagctccgggtagaagctggagcccaagtcgtctggggggctgtggcggccgcgggggtagctggccgagatcttggggtcccagtgcggcaccatgacgtggtcccagtgaatgtagtggccctcgcgccgcgggctcccgtaccacgagtagtagaaggcgtgcaggtccgagtagacgcgcaggctctgcacgggggcgggctcggcctccgcgggtgccggcccaggggagccgccagggtccgcggtgcggggcggcggcggcggcgggggcggcgcggcaggggctgccggggccctggcagcgggcgcgggggccccctctgggcgtcgctcaaagggcgccagctccaggcccgggcccagcgccgggagtccgtccggagccttgagcgtgcgcagacccatgagggtgccgaaggcgaagagcagcaccaggaacagagcgatgcaggcgcggcgccgccgccgggccatggccgactgtgcgctcctgcagccgccgcgctacctcccagcgtgccgcgccatggccgcccgcccggccgcgcgcttcccaggcagactgtgcgcccggcagagcgcggcgtgggcggcgcccggcctgtccccgcagtgcgggcgggctcggcacacaggacgcaggcggcgcggaccaagtggccgcgagccgagggggaactgcacgccgagtgcaacgcaaggcccagcgaacggcgagtttcggggccacaggagcaggggcctgagtcaggccgcgtgacccgcgaaagaagagtcgcctggctgcctgggcggcaggtggtggcgcctggctggggagcggggacgcaggccttccggagcgcgggagagaggcggcgcggcgggggcgggggcggaggcggggcgggggggggaaagaagcgcgcgtcggtggttctctccccaaggatttccttcttcgtcgatccacctttactcacttcactggccccctccctacgggtctcagtgccacccttctagccccaggtcccccatccctcggcccccctccccggcaccccaggcagcccctgaacctcgggggaaggggcgtcgggaaatccccaggaatcggaccctgcagacgccgtccggggcctggcgggcggaggacgaccgtgactcgcgcaaggtcacactgaccg

SEQ ID NO: 1243 - DNA, 4001 bp, Homo sapiens
atttaacaaaagtgataattatttagtcttctcttggtcctatatttagttttctcagttttcttagaattcaaaaaactaagagcaacataggcaccatttatctgaaccctcccccaaaaccacacttgccacatatttgttatccctttgggctactgccaagaacttctgtagaggcactaaccctgtgggcggaggagagcaactctccagaatagggcagagagcacgtggcctcttcttggagactcacctggatgctgtactgatgggcggtgtccagaatggcgggcaccaggtcatctgagggctccccgttatcatcagccatgccaggtgggtaccaggacaggaccaggacgcctgagacgcaacacagaggccacttcagagacacacagtacccccctcaacagagatttttttcctcacaaacatctccaattgcaaaaatggttcctaaaaacctgaagcaagcctcctgccaggttcacttcctgcagatgagtcccagagcctcgcgccccggagctgtccacgcccgcggtgctgaagcggagcgcctgcgggaaccgtagcgcgccaggccggaagggagccaggctttagactgcctcagcaagtagtagaacaaagggaatgggaggacagtgccacacccacctggaagccacaggcctacctctgaagaagagaagcacccctaaccctaacgtcccgcatggagaagagccctgagcagaggccatctgtaaaatccagcaaaattcagtgacgaaatccgaaataagtgagcctcccctccatagcctacgaaggaggcgccctgggaccttccctccagctgggtgcttgatgaaaagcctctaaacccccaacactacctccaactgcaaatagagcagaggccttcatggaacacgggcacactttcctctctgcagccagcaaaagcaggaacggctgctgctctaccctgtacctgccatgaaagcagaggccgccctaagttccactcctctgaaccccagaacctgcgggccaggactccaggcctcacttcccatcgcccaacaaatttgaagactctgcctccctctcctggtgcaaactcctagcagttccgccctatgggaagggccctggatgttagggatggaagggcccagctggggggtctgaatactagacggaggggcggtgtcgcatggtgggcccaggatgagagtgggagggaacagctaagaagccaggctggcggataagtgggaccaaagggccggtgacaggaccagagggagctggggtgtgggaaggaggaagggtgaggctggggggcagggccgcccggggtggggggcgctcaccgatggcggcttccttgagctgggtcatatgctcccgcagcacttcggggtcccgggagctgtagggccccagctccgggtagaagctggagcccaagtcgtctggggggctgtggcggccgcgggggtagctggccgagatcttggggtcccagtgcggcaccatgacgtggtcccagtgaatgtagtggccctcgcgccgcgggctcccgtaccacgagtagtagaaggcgtgcaggtccgagtagacgcgcaggctctgcacgggggcgggctcggcctccgcgggtgccggcccaggggagccgccagggtccgcggtgcggggcggcggcggcggcgggggcggcgcggcaggggctgccggggccctggcagcgggcgcgggggccccctctgggcgtcgctcaaagggcgccagctccaggcccgggcccagcgccgggagtccgtccggagccttgagcgtgcgcagacccatgagggtgccgaaggcgaagagcagcaccaggaacagagcgatgcaggcgcggcgccgccgccgggccatggccgactgtgcgctcctgcagccgccgcgctacctcccagcgtgccgcgccatggccgcccgcccggccgcgcgcttcccaggcagactgtgcgcccggcagagcgcggcgtgggcggcgcccggcctgtccccgcagtgcgggcgggctcggcacacaggacgcaggcggcgcggaccaagtggccgcgagccgagggggaactgcacgccgagtgcaacgcaaggcccagcgaacggcgagtttcggggccacaggagcaggggcctgagtcaggccgcgtgacccgcgaaagaagagtcgcctggctgcctgggcggcaggtggtggcgcctggctggggagcggggacgcaggccttccggagcgcgggagagaggcggcgcggcgggggcgggggcggaggcggggcgggggggggaaagaagcgcgcgtcggtggttctctccccaaggatttccttcttcgtcgatccacctttactcacttcactggccccctccctacgggtctcagtgccacccttctagccccaggtcccccatccctcggcccccctccccggcaccccaggcagcccctgaacctcgggggaaggggcgtcgggaaatccccaggaatcggaccctgcagacgccgtccggggcctggcgggcggaggacgaccgtgactcgcgcaaggtcacactgaccgggcctggaccccgggtcagggcgcactctccagagctcgctgcactgcccagcctgccgggtcgcagtgtggcttagtgagttctctggttggaatctcacgaagccaaaattaaggcgttggcaggttacactcctttctggaggctctaggaacggatctacgtccagctcaatggcagaattcagttccatacaattgcagggctaaggcccccatttgcttgctggctgtcatctgggggtctttctcagtttctagaggcctgctgcatttcttggcttgtaggcctgatgtcgtctggagcggtctctcctgggagaacctcctagagtcagggaggattaaatgagatggttcccgtaaagcacttccacggggcctgaaaagcaagcgctcaatacatgtgcgcctttcttcctggattctgggctccagaggacaggccccgtcttatttaccttgttagacgccaagggctgccggaacagcatctgacactcacttcctagtgccgtttaagtgagtaccagcccctggtgtgatagtctgtagataataagcttttcactcgctattgatagagttcctacactgcattattcattacttcatttattcagaagatagttttgtttatcatatgcctccttcagtggtccgcaatgacagcaactttgtttcattccctgtctgcatgtctaaaacagagcttgggatgatggcgggcacccagttcttattggttaagtaaaatgaattgtagggaacccaggaagaggagcagggagcttgggaagtgttggtagacctgcagccgaggaaagtgagcttgagagaccttatggtggtaaatgtgaatgaagtggaatgccttcagctccaggtcgcccatacccgattcagcctgacttaaggaatatgccagtgtatcaacttgcaaagcaaggagcccagtggcagggcagagtgggtattttctctgatccaacaatgtcattaggaacctgagatgttcccgtctcactgctctactctccccaccactgacttcatatacaaacccagttcccctcatgccacaaaatggctgctatggctattgactgctcttcccattccacaggcaagggtaagactgatttctctttcccagaagtcctaaacaaacatctcattgaatctccttggtctaatctggtttaggcctttttatgccagacaaattattgccgagggggatagaattaccatgactagatgagattacatttgtggagtgggttaaatgttggagagaataccatgtctaccaaagagtgaggtgactctgggaatagaaagagtgagaagaggctgggtgcagtggctcaagcctgtaatcca

SEQ ID NO: 1244 - DNA, 4001 bp, Homo sapiens
cttttcagaatatttatcttccttatagttttcaatttggttctttttatactgaagactcactgacttttcacatccccccacagaacgcttatccttcttggcttcagaccggcatgtggatttggcagaagattcgggtgacttcttatcctcagtcctatataaccaggctaggtgaggatgtatatgagcaggacttgtcacaggttggtcatataacaaggacaactcaactaacaaagcatttaacaaaggcaactgccttattgtattaattcgattttgttcagtttgacatgtttgattagttgctcctatattctgaatatgtggaggatttacaagcattggaggatgttcgtgtgctgcagaacttggatgctttagacaactcctgtgtgctgggggatttacacgctttttttcaggagaagcatcatccatttcctcaggtgcattcatttgaggctcaatggtgattttagcctgtgcagggggcggtttttcttgggtcaagttagtgtaatacaaaggaggagggcaaaatatattggtctccatgtccaattctgtgacttcctcatttagggagctaacatttctcccattgccagcacctgaacatgtaacaacagaattggttttgccattctccacagaacccacattatcacattcggccttacttttaaccatttccttcaaatccttctgtgcctctgggatttctaactcccccagcggcttatcagcctcttttgggcttggctgtgaggctggctgctgcagctgctgtctttcctgctgggtttggggactgacctccgctcctcctcctgtgcgggtgaaggtgaggggccgctcaagttggctcagcaggcggcttcccaggtcagtcaggcggtaggccagtgcaatgtccccagtccgctcgcccactcgattatgcagggggaaacgtccccggtgacggtgggagcatccggaggcggccggccccacgaccctgtgcgctgcggtggccagcgaaatgtcgcaggcccccaggagctgtggggtgggcgtcgggcgcccagggggcagctgcagcagcaaggtggcaagcggggtccgcaggagccggcagtgcagggtagcaggctgcaggcggaagaggcaggacttgccgcgaccgaagcggatgacaccgggccacggttcggcggcgggagcgccggggccgtcaggagggtaaaccaacagcgtggggaagtccagcaggcggaaggccacggcggggcacagaccgcgcggcgacgaggcctccccctgctccttttcctcctcttcctcctcctgctccactgcggcagcgggggacggcagcagccgggcttccaaacgcacccagtccaccagcagctccagcgagaagagccgctcggacagcgaggccgccattgctgttgccccaggaaacgccgccgcgggctccgcaaacgagaagctgaagccccggggtctcacgagaaaccggagcaaaaggcatcgctgcctgctatctcgcgagatttgcggaagcgctccagcgggtctcgggcggtgtctgctttgggggttttgctgctcaatgtgtttggcccctttgtatgcatacttgtgagccgttttttgccaccaaccttgtattaagacaattgatgataatgctgaggatataagtggtaaaagacagtgagttttttgggtaatggttttatcactgcagatcttatgtaacttgggggtcagatcaatatacctgaggaatattgaaagaaaatcaggactctccttcctttcccatgctaaacagagccagttagttaactgtccacagtgggccatctctgtgtctgctgttctacccaaaagatggtgacactgctgggatggccagggagcccctgcctcatcaattacagtagtactgagacagacacaccacacacacacggagtgtgaatacactggcaaaaactctccttggctgaactttggtcaggctcatctaagccttctttccgactaggccttgaccttggcttccaatcctgtggaccctggatcaccgagttgtagcaaaggtctcgctacggctgttgagagagaacccccaacccttcatacctgattaccgtcgatacctgatcaaattcttcattttctatcattggtatctgaccaccctggcctggcttcagcaagaatcctattaggcctgcttaatcagaaccctcccacccgtgatgttccctatcagtaagtttccatccacttgacctgacgcccccttggctttaaatccccacttgtccatgctgtaattggaattgagcccagctctgtattgaggtctcttttctcttattgcagtagttcctgactacagtgtttttgccacttcaactactgtctggccctgttttttatttgacaacatttccagctaagcaatcatgatgcatgagagtaatgttaatgattccatcaataaaacaaatgtgtgtacataaatatacacacatctacagagacacacagaacttgctgctctatccagatattttaagaaacatactcctaacctcaatgagctagccagctaggaatccaaggccagtttttggagagccttgaatgccatggtaaagaatttggactatattctgtccaaatttttttgattgaataagtacatcatagcaatatttggaaatgtatcatggggaggaatacaaaggatggattctactaattagaaattggattcagagcaatctattagaagactactgcagtggtctaagaggcagataattatgacctgcacatggtcaggactagtggaaattaaaaagaggtggcagaagaggcatttgtgatggaggaattttaaaatttggtgaatgggaaagaaaagtcatgggtgaaaaacttctgctactgaaggtgaaaatattgaggaggcacagatttgacggaaaaaaatactttgagttttgagatatgtaaagcttgaggtacctgctgctgggcattatatatgtaccgctttattcagctttataaattatagttaaattatattgcttcagtgctcagaagaacattgtgaagctcaagagaaattcagaactggagggatatgatgctttagtgtgaagacgtgagagagaagtctcattgcaatatataaatacaagatacttctcggaccagatgcggtggctcacgcctgtaatcccagcactttgggaggccgaggcaggcagaacacgaggtcaagagatcgaggccatcctggccaacatgatgaaaccccgtctctactaaaaatacaaaaatcagctgggtgtggtggtgcatgcctgtaatcccaggtacttgggaggctgaggcaggagaatcgcttgaaccagggagttggaggttgcagtgagtgagccgagatcgcaccactgcactccagcctggtgacaaagcgagactccatctaaaaaaaaaaaaaaaaattacaagatacttctcttggctttgagaatcttgctatatacttgcagaggacacatatcaagcaacatcctcaatggatagatgatgtagagcaataaaaaaaagacatcatcacaagtgaaaagcaatgaggtattgagtccatgtgcgccagagaaatacagtagacaaaattcctcttagaagatatcctgtagttagccttttgagtaaagttaatagtgtgcactagtagcacttgtatgtctcttacatatgaatagaaaaagcgaagtccctcttctataaagacattatttctgcaatatgtagtttctgcaatgataataacttctctacccagctactctacatgactggtattataatgtatgaataatattttatacttgtaaataatgccaaaagtaacaaataaaattttgccatgacaaatattttccccatgtttctacaccacacat

SEQ ID NO: 1245 - DNA, 4001 bp, Homo sapiens
agacggggttttgccatgttggccaggctgctcttgaactcctgacctcaggtaatctgccctgccttggcttcccaaagtgctgggattacagtgtgagccactgcgcctggccctaatcctaactttcattctcccttggccatcttccattcacactgaactaactttaacatgtaagtttgcctagagagaggaaatcagaatgctcttaactcagtaaaacaaaataaaaagaggcctgggcaacatcgtgagacccccatctctacagaacatttttaaaattagccgggcacggtggtgctttcctgtagtcccagctactcaggaggctgagatgggaggatcgcctgagcccagaaggccaaggctgcagtgaactaggttcacaccactgcactccagcctaggcgacagagctaaataaagcaaaataaaaagacactcattcatcgtgtgttctcaaaaaaacaggctgcaacagcgatgcagcttccaagcacttttcaaccctgttgaaaacttactcatcgggtatatttactttactcccaaatcattttttactgaatccatgtgtcaagtgatgtcctttatgctttaagaatagctgcctgttctttgctgtacctctggcttaaccaagggaggagtgtgtttgggggatgcttttctctctcagtgttctgagcagggaacgtttcctttggggagaagtccccacccctaggcacacatacacttggaaaaggtgctggtctctgcaacggacgcgcagactcggtttcacacaagatctgaaagaaaggatctcccggcctagcttgagagccaagactaactactttaggaaattcttagaaatgttggcaggtcttttttgttgttgtcgttgtctgagggattctccttacctgtttaaaatagagtaattcttttttttttttttttttttttgagacagagtttcactcttgttgcccaggagtgcagtggaacagtctcggctcactgtaacctccgcctcccaggttcaagcgattctcctgcctcagcctcccaagtagctaggattacaggcacccgccaccacgcctagctaatttttgtatttttagtagagacagggtttcaccacgttggccaggctggtctcaaactcctgacctctgcgatccacctgcctcagcctcccagagtgctgggattacaggcatgagccactccgcccggggtttaaaatagagtaattctaagagcatcttttcagggtactagtgaatctaaaaggtgacttcaaaaaaatctctttcctctcttcccctgacgtgcccccatccccaaaataaaactgccaaacgaagaaagcccaacagccccggcgcacccagcgcaccttcctccggggcacgctctgcgccacctaccggatgatgctgaggaactgggtcatggtcagctcctgcgggaccaggaacttggttttgtccagcgggggcaggaacgtctccctggggtagcgctccactaccacctgtcaagagtgtcagtccttaagaatgtgactcagcgtgagtgttaggaacttggaacagacagagggaagctgttggctgctcttggtttttcagagaacaggatcggaaccccacccccacgccccccagcggaagtccagtggtgtcttaccgggattttgttggggaactttgcccggattccagcaacttcctcttgtctgattgctgtgaatatttcaagcacaagagaagaagcaaagatcaagaaaagaagcaaagatcaagagaaggccagatccgctcctctctttagataacccagaaagctaccccaagaaatttacccaagcttttcctctgcttgaagggtctgacgcttgggattttctgtggaggcggcattgcactcagtagctgtgtctgttttaaaaaagaaaaaaaaactgtcccgcaaccgggaacctaactcattcctccagctgcttccaaactgcctgcaggagcctgaaggaggcccttatgtagggctgagtgacatcaggcctctcctctccctcccctctccccactccccctccctgggcagcaggaggtcagttctgatggaaatggaatcgccacctgcttgctggtcagagaaagccactttgttcatgaccagttcaagatgtttctttgcaaaagaaattagggtttgtaataaaatcattggctgggcagcggactgtggagaggtaaaactgccttgtgctgggatgtttttgcccttcagtagcaagggggggtccaagctggatccacctcagcctgaagtgtgctgtgtagttctcacaatggtccatgccctttatcacagaaggaaacctatactaagaaaggtgaagtgatttgctcgagggcacacagcaagtaagagaagcggtatggattaaaacctagagctgtacactgggtgcagtggcccacgcctgtaatcccagcacgtgggaggccgaggcgggtggatcacctggccaacatgctgaaaccccatctctactaaaaatacaaaaattagccggacgtggtggctggcacctgtaatcccacctactcaggaggctgaggcaagagaatcgcttgaacccaggatgcggaggttgtagtgagctcaggtcacaccattgcactccagcctcggcaacaagagcgaaacttcatctcaaaacaaaacaaaacaaaacaaaaaaaacccagagttgttacaaggaagtccaagtactacactccagtatattctgtcacttagttttctctgggataaaagaaggaaggaaggacaattgtccccaagatcttgcttttagagttaagaaactgggtctctggtcatacataggggaaaccaaactccatttctcctatattctcacaacacagatcacttttgacactagatgtgtgtgtgtgtgtgtgggtgggtgggggttccccatacaccgagcaatcacttctacagtggacaccagctaggtgtcctccaatccaactctgacactgtctacctggagacagcatcagatcgggctgagggctctgtcccacaagactgtcccccactttcaatgccgattgcaagccccaagttgtgtttgttgtttttttgcttgtttgaaacagagtcttgctctgttgcccaggctggaatgtagtggcacgatctcagctcactgcaatctctgcctcctgagttcaagcgatttctcccgagtagctgggattacaggcacatgacaccatgcctggctaatttgtgtgtttttagtagagagggggtttcgccatgttggctaggctggtctgaaactcctgaccttgtgatcctcctgccttggcctcccaaagagctgggatctcatgcgtgagccactgcgcccagcccctagcttgttttccctgtgcttctgatctatgggacataagtcaggcttcccacagcccccgccttgggtttcattaattggctagaatgactcacagaactcagggaaacacttttaccggcttattacagaggatatcacaaagggtacagatgaagagatgcatagcgaggtatgggggaagggcataccaccctccaggaacctccacgtgttcagctagcagaacctaggccttttgggtttttacggaggcttcattatgtaagcaagattgattaaaccattggccactggtaatcaatttaactttcaacccctctaccctccccagaggctggaggtggggctaaaaattccaaccctctaatctcacctttgtctttctggcgaccagcccccatccaaagctacccagggactgctagccgtcagtcaactgatgaactaaaaaaagacacttattgccgggcatggtggctcatgcctgtaatcccagcactttgggagaccaaggtgggcggatcacttgaggtcaggagtttgagaccagctt

SEQ ID NO: 1246 - DNA, 4001 bp, Homo sapiens
agggagggctgtaccagcgagctgctcacctccagcaccaccacatctgcaggcacagagggggtggcgctgatccctgaagcccagcttgatggggaaggagccggggtccatcctggcttgacctgccttgctgtgggactccagtagggtctggttctgctttgggcttcagtcggccctttttagggttcccctggcactttcacagaactgatctctgtagtgttgcaggagaggagttgggctcactgggttgggaccctcaggccacggttcagagcctgtgagcacctggcatgggggaagggaggctgtggaccagttgagtctgttacgggccatttaggaggtgggagttgcgcaaacatagaagtcccctccctttggtcttcagcacaggctcttgaaaggggctaccatcagtgtgcatagacaacgctgtgcctaaatgtatgtatgtgtatatctgtgacatgtatagcttactatgtctgactgtatctgtgtgtgtgacagcgtctgctagggcctgcatgagtcaacatgtatgcgatttgtgtctgtcgataattgtatctttgtgtccgagtggtcgggtcagccttcattttaggctacgatttcatggacatccaggaagcacagctactggactctagcataagcaagtaagtatgggggccgagcatccgggctggctggagggaggagtgactcgcgggggaatagcctccttctggccccgcccctgagccatcctttcccgcccacttccccgccccttccccgcccattctttctgggccgctgaggccacttaacctaagctccctcacccagtatccagtcccgtcgggccccttcgcttctctttttgcctctcctagcccgatccttggaaatagtatgctaggactcctgaactccagcctcccggcccctttccctaagtccaagctcctctcccagtaattgtcctcaagagatccgcgtgacattctcctgagggtgaggctgagttctccaaccccacccctgagacaccacagccccgcgccgctccccgccccgccccagagttccaaagcccctccccatccttgccccgctggctgggcaccgctccgactgaagggtgcctaagccccaacctcgagccctagagccgcgcccggatccctgtctcgtcccgagcccggccgcgccccagatcccctaaatcccacttttttcacggccctgtcccaagcccttcagctttagctcactttaagtcccctagacccggtacccctctcggcccctcccttgagccttcgagcccggcttggtcccctcccaggaccctgagtcccgcccggatccggccccgcccccagcgctctcacccgcgttgtagaaggcatccagagccgcggtgtcgcctagctccagcgtcccgaagggcaggctgcgcagctgcgggggcggccgcggccgggggacctgcgcgcaagcctcgcgcaggcagcgcaggggcagcggctccgcctcggttccctcccgaggctcgagcccgggctgcggctcccgggtcagcacgtagaccacgctgagcggccggctccgcgcgcagccccggcccgggggcgccgcgagctgccggccccggctcagcgccacggccagcgggtcctgccagcagctgccggcgcgctccgccccggaccggggacacggccccgccatgcgggggcgctcaggcgcggggcgccgcgcactgggaaccgggggcggggcaggagcctgggccggcagatcaggaatcttgggatctggaatccgttcggaatcggagaatctcccacgggatctagggatccggaatacggcctgacgtcccgttccaggaatctaaagtccagggagaaatcctagctcggacttgcaaggtcctgaggttctgaaatccgggattgggtcccaggaatctggggcatccggtgatcggcagctcagagccacttgggggatcctgggaatcggctcggaggtgcccgccacctggacttctcaagggagcgcccgccaacgctgccctgccttcacttgtaggctaagcccagccctttcccggccgacccagaaagctccaccctcggccctggggcagagccgctccctagcggcttgagactcagcctctcccctcccttctctcccgccagaactttggagactggcggcttccggaacagcctgtgcccctgtgcacgccaaagactgtggactgctcacagcaagtgcacataaaatgtgtgaggaggccagggctagggaaaaggttcgatatgcaggccctgctctgcaggtatctgttgaatgaatggctctctagagacatcagggtgcgcagagcatgatgaacaatgggtgtcctcccgggcccagtgagcgcaggcagggagggactgggatgggggaaacctacaccctaggccgcttgcccgaaagccttcagtcctggagtgggacttggcatctgagccttaactgtcactagggggctgctttccccaggacccaacctgctgtggacccccgctgacctttgacttctaggcagaacgtggccatgggacctgagaagcacttcctactctaaacaactctaaacatttctttagccaccccttgaaggagtcaaccccagccctttgcactacagcagcttctcagcttcaaatccccaagagtccccaactttcttgtgtgaattaatgagtgaggcagcaacctggtagaagcctcagtggaccctgaaaccaagaactggggacttaagttgaataacttgtccaggatcactcagcacatgacagcagggtgcaaacccaggaccgcctgtcagactcttaactatttaattctgccacttactagaatgtggctttgggcaaataaactgcttaaatgctactcaatggctgtttcattgccctgttgccttgtggaagaaaaaggtaccttccttggtttgaccttggattcgaactgacacccaatgagataggcaggaagtggtagagtttgagaacttggcctgcaacagaggctggagtggaaaacagacaacttacaaaggacaggcatgggcaaccgacaggctgagaaagctgtgcaattcccagccagggcggtggctcatgcctgtaatcccactttgggaggccaagatgagtggatcacgaggtcaggagttcgagaccagcctggccaacatggtgaaaccccgtctctactaaaaatacaaaaaaaagtagctgggtgtggtggcacctgcctgtgatcccagctacttgggagctgaggcaggagaatcacttgaacctgggagatggaggttgcggtgagtggagatcgtgccattgcactccagcctgggcggggcgacagagcaagactccatctcaaaaaaaaaaaaagctatgcaattgtgcaattcctgccacaaagccatccacttgcaggacccagagggcctcgggaaattgtcaatggatgcttggatctcctctaatccttccactgtatgcccctctggctcattgcactccagcctgggcagggcgacagagcaagactccatctcaaaaaaaaaaaaaaaaaaaaagcggccgggcgcagtggctcacacctgtaatcccagcactttgggaggccgaggagggcagatcatgaggtcaggagattgagaccatcctggctaacatgatgaaaccccgtctctactaaaaatacaaaaaattcgccgggcgtggtaacgggtgcctgtagttccagctactcgggaggctgaggcaggagaatggcgtgaacctgggaggcagagcttgcagtgagccaggatggtgccactgcactccagcctgggcgacagagcgagactgcgtctcaaaaacaaacaaacaaacaaacaaacaaaaaagctgtgcaattgtgcaattcctgccacaaag

SEQ ID NO: 1247 - DNA, 4001 bp, Homo sapiens
tgaggttggactcaggctgggcctccctgggtgtcccctctcaggttcagccaaaccaggacagacccagccacccttgtttccagcccagcctacaagcctcctgaaacccaccagtctgatggtagcctcccctccctgttctcccaggtcccacacccagacagtcccctagaagcatcctcgctggcatggggaggagcccacccacagcccattggccccaccttatcctgggctctccgcacccacacgaactgtttcatcctgtgcccacaccccaaggggcagggaggtgacaggattaggctcaggactccatgggggtgtggggatggggccacctcccccctgagtcaatgggaacagaacttgggtcttcaataatcatgttcttccctccccttccaggaagaaagagaaatcgcctccctccaaaaccaagcccaaccagaaacctgtccccaccccctcatcagctgctcccagatccgaatgggatttgcagaagtcctgagcactggtggttggtggggtgagggaggggaggggagctttggtggtctaaggtgtgggcagaaagagagaaaaaaagagagtaaggggggaggtatcaaagcctcaggctggggaatgatgtggcaggtccagggagtgccggcttggagcctttacctcattctctagtgggagattggggcccagagaggctgggaaggagggcaggcaggagaagcagatttacttctgtccccctcctccccgaatcaggctgggtgggctccagagtaggcctggctgcaggggaggcggcccactccccagctcccgccctcaccccaaacaatgccgcctccccctccccctcgcctttatccggcgggttacttggcagcagcggctagagacctccctctctcctcccctccctcctttcccctccccgccggcccgcagcagcaacaggccctttgcgcggcagctggacggatggggtgggggcgaggtctgggccagggcctgagggtacgggcactaaggccgaggcgtcggtatgcagggcccaggcctgagaatatggacccccgacacactcaggctggggtcacatgtgccacgggggatggggaaggggacggaagccctagctcagtagaagaggatcttcaaggcccggggtgaatcgggaagggacgtgggggcggggaagctgagatggcactaagctggggcagaagggtcaccccaacaactcccgcgcggggtccctgcggctcccgacgcccgatgcgtccggcacccggggtgggggagggggcagctgtcagaggatgcatcgcgagcctggagccgccgccgccgcagcctttatttttaaacttccaagtggtcagagggcgcggcagcggaggggtccccgcccagccggccggcctcatcctcggccgccctgcagcccctccatctacccccatctcgcctccgcgtggctcccggcatacctgggggtgcgcccgcccccagctccgcacgcgggccgctctccatggctgcggcgtcactgggggtctcggggtctcagcggcggcggcggcggcggccagtggccaggacaggggtcccgcggcgcatcacgcccggcccggcccggcccggcaagtagcgactcggaggcgggggcgctccggggaaggtcgaggcaggtggcccgcgagtctcggaggtgccggtcgcccggggtctctcggctgcggtcgcgaacccgttccccgcccggcgccggcccagtcccggcctcggcccaaccctattgtaccgcccgggctgggcctggcctctcgctggcgcgtaccaagttcgaggcgggggggtccaccccagcagcgccccgggacccagccccccgcgcccgcgccgtccgcgccgttcgcgccgcccccgccccggagccccgcgcccgcagcctcccggcgcctctcccacggccacggccgagcgggctccacggctccaggagttcgccgcgctagctgcctccccctgcgtccgcgtcttggtacgcgccgcagcgcctgaggactaagtagggagcgctcgggtgactcacccgccgcggggactgggggagagggggagcagggctgggactcccctttcccaccctggagtttgggggctctggcactggggctgagagggcagcttcgagtccaaattctcgctcaaacccacctaaaccaaagcggcccgggggacgtcgggaggcatgaaggagagtcacaaggagacccctgaaagggtttcgctttctctcccctgctgatggctgggctggggacaggtctgggagccttgctgccgcccttgctccggcattctgcgcttgtgtcttccctgctcctctgggggtaattacagccctgcgcagctgccttacccaggtctctaatctgctgggtccctcccggctccaaactgggtggtcctagccctggacctcccccacccccaccagacgaccccgccaatcaccccagaaggattttctcccagtggtctgtcgatgagggggtggtgaccccctccagaatccactccccaaagtagccctgcttcccagccctccagaatggactcccagcccccttgttggtgccagctgaggtgagggcttcaagccaagccaggcccagcccggggcagagtggggagcttgctgggaaggtggatggatgatggtggtgctgctgcagggacttgggttgcgggggaggaggaggggcagctgtgccctgcccaccctggccctgccctttgtcctgacttctagaaggtcagttctctagttcttcattgtccagagattaggcccagtgagatactgtcccccttgccccccttccctccagtttctccttcctttaagcagctccagaaagcggccatttggagggatagagtgggaaacaaaagggtcaggggctcaggcaacctgggagcagcctgtcctgggatgtgtgcgtatctgggggcttggacactcttgggaaggcctgggaagggaatagtgtcccctctggcccaaaaacattagaaaaggatgatgatagaagggcggcaactggagccagtaaccttgagctagtgacttaacttttctaaaatctaatttgctctcctacaaaatcagaaaaatagtagtgccatgaggtatcttggggtctttgtaaagattaaataaggcaatggaaatgaagtgctgagcacagaacctggcatctaggaagtgctcagtaaacaagtataatggtgatgaaggcattgatgagtaaaagtggaaggacgaggagcagatcccccatctttgtgtcagtcatcttatctgcagggtggggggactgcggggatgacggagttcatgacagtcctttgtgaggtcaggggcctcacagcctgcctcttccagagctggacaggccagacctgactcaggcagtgaccagactcaggagaattcaggaacacgtatggggagagagccctctggaatggttcttctcccacctcccaccccttgtcttgagattactgcagggatggagatggatggatggatggatgggagtcgcgagatacccacattggctacggctcaagactagtggctggctgtggtggctcacactgtaatcccagcaatttgggaggccaaggtgggaggatccttgaagtcaggagttcgagatcagcctggccaacatggtgaaaccctgtctctgccaaaaatacaaaagttagccaggtgtggtggtgggtgcctgtaatcccagctactccagaggctgaggcaggagaatcgtttgaaccccagaggcggaggttgcagtgagccaagatcatgccactgcacttcagcctgagcaacagaatgagaccctgccacaacaaaacaaacaaacagccaaacaaacaaaaggaatagtggaggtggaaatggcagc

SEQ ID NO: 1248 - DNA, 4001 bp, Homo sapiens
cagagccatgctcaatccaaacaactcctcctcctcctttcccttcagttatgagtagggaaagagaagtctaagacacaaatgttgaagtgttgaagatacttatcccctctccaacagtcaacactaaacaacaaccgagatcccagagcaataacttacagtagaaagcaaagcactgtaacagggttgagtatgagagcagcaggaaaacaattctagaggccttaaaatctagaaatggaacatgcttgccccgtacaaccccgaagtactggtgtttcttttaaaacatctgatcgtatattccaatagttccacccataccacatttctgagttttgtacttgacaactgaaatacagctcgctgtgggggctgaaggggaagagaaaaatataacacaggaagtatttttctcctcctccaatcattgagacaccccaggggaaacagacctgaggcgtcacctttagagattggtttgacctgaaacccctgtgagaggaaaaccttgttggtgaccctgcaagaccggctcacacttcactgcggacccacccatctcatgagacctcccagtccattgtgtttaacttctgaagtcgatattctcacttgaatccttattctccccaccaccacaccccttaaagaaagaaaagggatgggctcccccggctcaaggataatgtttcctcagactgcccatcacggcgcgagtccaggacagcaagtggccctctctaggaggcggaatcagcacgggcccggccgcgggttacagactctgttcacaatgatcagccgggccgcggacaccgccggcctctccccggagccgccccgcgcgggcgtgggagggggccagctgagggggccagctccgggatccaaataatcccgcccccgcagccgggggacacccaggaccctcccgccgcacacctcctgcccggcgcgccccaaggcggcccggctgccctcgcgaggctcggggaagtgaaatcacacattccggctcccaaataaggagcgaggctaaataaacctctgcgatccgacttctccaaaccaaccgaccaaccggctcaatgagtaatgggccttttgtgcccgcagagagagaaaaaggagggaggagaggacggggaaccaccaaccccaaaatcacttccttgagatggagtgaaattagcagaagtcccgaagccaaccgttctgactcggctggatcccgctcaaaccccaaaatggcagggtcccctgagtccccaggagcgggtcccagggctcccgcccgggagcggccggaagcggtcagggaggcgagggcgctgggacccgccgcccgcgccgcactcggcaccgccggcccggccgccccgccccgccccgccgcggccacccctccgccccgcgccgcgacccaggccgggacgggcacccgacgccgtggagctccagggcccgggaccggccccgcctcccctccccgggccccagacctactttgagggcgaatttctcctgggtcctcttgttgaagatctgcaaaactttgccgttgatgcccagccccaggacctggctggtgaccttgtagtcatcgatgatggcgttcttcttgatctgcaggccggacttgacgtggaactgcgggaactgctgcgggggcggcggcggcggctgcgccggggggtgcggcagggcaggggtggggggctgcggcggcggggccggggcggggaacggcaccggcgggctctggccctgggagttggacagcatggtgcccggggacgccggggcacaggcgggggtgcccgcggccgccccctcctccggctccgggccccctccccgccgccccccgacgggctgcgaagttcgctccgggctggagccggcttccccgacccggcccggctccaggctcggcgggtcgcggggctccgtgggtcccaccgcgcgccgctggctcccaccggcccggcgccctccctccctccccccgggggcctggcgctctggggaccgcggggcggcgggggcccggccggggggaagcggccgcgcgacaatgtacccagccccgggccggcggccgcgtcacagcctcgtctgcgtccggggccggtccttaaaggggaggggcggggggcggggcctggggaggcgtggcgtggggggaggggcgggccttaaaggggaggacgcgcggtgccgggagctgggaggatcgcggagtaggctgggggctgctgcctcgcggacagtgagaggggacagggagaggggacgaagaaatgctagttcttaaccaaggctatgcaaagggagaggggaggcgtgtcaaaggagctgcataattcagatggaaaatccactcctctccaattgtctgggcttcttagcggcagcgaattgggagaggggtgtatttccaaggacagggatggcttgtaggtatccagctagatgagacctcgtgggggtgggggggagctggaatcacaggggtcattcatcccaggaaaaggtgtgagccaaaggcgggcgtattaaatatttccctaacttcaacattttcctctgaggttttttgcatctcttttctcattaatttattgtttttcagtaaagacgtattattgtgtaaccaggagcactttagtaattatacctttgaacatgttttcctgtaaataaactaaaaaggatacagggtgggaagaggatgggttgagattggggccacctgaattcccgccatcctttgccacggattggctgtgtgaggctgagcaagccttgcacctctctctccgtgggaagaacagcgagaccttttcaaaggttgtgggcagagtcaaaggagataatgaaactgaaggggaggccctggggaatggcttctgatttccgatgtggaaaaattaatccgtaagaagtgggttagccccgtgtatctcaggaaaagcccagggatctagctggaccctgcatagaagctgccaggaggcctccacacacattctgatggggttcgagatgaccaagtacattcctgccgacctcctcccacctctgactggcagaacatttgagaaatggcaagcaacccagacaggtgaacacaaaacctcagcttaagtcttggtaaggccagttagagaatgaggcttgacctatggccacacatgccccctaataggtcccccaaaactccagagagaagacaacacccccagaagtggccactggggatagaacttaggtaggtaagggacaagtgcaaatgtctcttccctcattcacctttcccagaagatgcttgtggaggcaggaatgagggggaggagtgaggggtgggagttaccctcccaacactgtcctttcctggggcaggtagggctctgtggaccaaggagagacatgtttcccccgacacaaacatatgctcttctcaagcagcatctgcttagctccatgtacaaggtgccgtgctcagccctgcagcggtggatggtgttatctgatggggaagaagacagataacagtggcacagagaggatggcagacaccttcctaggagcccgaagcacagggattctcttctgtctacagcagccagcagcttcctcccgagtctacaggatagatacggttagacagctccccagatgcccctgactcttcaaagacaaagacactatctaaggccacggggataggaaaacatcttcactccactacttctatagcactgctatcacctccccgaagcacacacaggagatgcccaaggacaagaggaacgcaggggtgggaaggtggaaggctccaactgctcaggctctggtggggctgctctggagtctgagttggtcttttttttctttgcagagtcactggaagctccctatggcttggtgttgaggtatcacctgcttttctccacaaagctagaaagagaataacttccttctgccttttc

SEQ ID NO: 1249 - DNA, 4001 bp, Homo sapiens
cctgcctcagtctcccgagtagctgggactacaggcgcccaccaccaagcccggctaattttttgtattttttagtagagaaggggtttcaccctgttagccaggatggtctcaatctcctgaccttgtgatccacccgcctcggcctcccaaagtgctgggattacagaagtgagccaccgcgcctggcccaaaacatggaatatttaggattcttggcttccttcctgaagcaaagatgcatacgtcactcacctttcaactatgtcatgaattgccctctgtctggggagctggtaggagaaaggttacagctcccattagtcctgtgttacttgctgaactgcgagggctgctctggaaaggagtttcaagtgcagcctcacaataagacccgaggctggcctgaagccagaccctaaagaggacaaagctgccggctcccgggttttgcagccttcgctgaaccccaggaatccacgcagctctcagaacccagacaggacattaacaaagtcactctttacaaagccccagtgtgctaaagaaaataagagtcctggttctgctgctgtgtggctctgaattcaacttctttatccacaagagtgcttgagagcattggagagaattggggaaaatagcatctgcaatgcccccacaactctttctttctttctttctttttttgattcggagtctcgctctgttgcccaggctggagtgcagtggcgcaatcctggctcactgcaacttccacctcccgggttcaagctattctcctgcctcagcctcctgagtagctgggattacaggtgcgcgccactacgcccggctaatttttgtttttttgtttgtttgtttgtttttagtagagacgcggtttcaccatgttggtcaggctggtctcgaactcctgacctcaggtaatgcacccgcctcggcctcccaaagtgctgggattacaagcgtgagccaccgcgcccgaaggtattcgttgaactgctgtcattactattatgagctccgccttggtgcgctcttggagggctggactctacagttcagctttctccaagatctcaagaaagtcactcaaaatagcgactgggaaccaacctcttcaagctagccgcctccactaaatggagattaagaagtttgctcactggcagacacctgggagcgataccacacctcagcaggagcacatgacgccaaagagccagtgggaggtggagatccgcccaccccgggaaaacgggtccacgcgctcagagtcccagagccctggggtctgatgctggggggtgagggttcctttttctctttggccttgtctcacccaactcccagtttctttgtaataggaggaaggacctgttagcagactctgcagacctcccctgcgctcctcccttctcacccccttgccccgagccggatcagcgctgccccgcgccggcgcttggccgtacctgtcccgcaggttgccgctgcgcagccccatggccgtgcactccgcctcgctcaccggcacccccttgcaggatttcacagggtagatccagagctgcgccactgtgcccacctgctgcagcagccgccggcgccgcgtgggccatgcgcggcgccaggcgacagcccccagcgccaccgcggtcaggcccagcgcggcaaccccgagccacccgggccgggattgcgcgaggaggacaaagcgcgccagcgcggaggagccggcggcgcccatggctggcttctccgcgaggtggcggcggcaaggccggagcgcgctggtcgcccggggccgctgggggaaggtgcggcctttggccccgagcccaaaggctgggcagctcctgaacccttccgggccaatcagagcagtgcgtccttctggggggcggcgcggggagtgggaggtggtggctcagcttccacttggtcggcgccccactgcctctgcaaccttccgtcgcctgcgctgcagggcgctgtgccctcccccaccccacgatcgctgcaagtgaccaatttatttacttacgtatttatggggttatttgacctaaaataaacaatatacaacatttgcaggacaaagcgtgattttgaaattagaaatcagacagctggcagcagcctctcctgggaatagtggagagctggtaggccctgcctggcctgtgcagtgtccagctctctgctgccgccgccctcccctcagtctgcccaggggctaggagcttccagagagtgggggtctgatgaaggaggatgctaccaggccctccgcgccggcgagccaaggccagagttctcccggcggcccctgggagcggcaatgggcgtctgagagtgccttctacacggctcggggacgctcgactcctaccggcggggagcctcgagctggagctgcattggcaagggccttggctcagtttaacgctgcacaaggtccccgggctgcttccggcgggagggaaagtcacttggtcctgcaggcactcacctcagtcacttgtcacttccaaatcaggttatattccagacaacaatgttagcataccccgaacagcgtggtttaggagtcaggctcctgcttgatgtaccaagctattaaaggaaaaaaattccctcagacgcttgttaaaaaggtaaggaagactattcaaggctactgtaacaggggcatcacaataggggaaagagattaggctcaactctgtattacagcaaagacagctcaggattcatagccaaggagcgaagttcctcggggtcagtgaatggaaaatcactaagcggagacatcaagtgtagaggattcttgataaacccacttaacaggattctactgaacaaggcaaggacttacacactgagggtgacatatgaggaatctgagcagacatcaagggtgatcagatattaaggatgggagaatactctggaaactgactaagcaggattcttgctaaactgggctctgcagggagtagggtggcaaggtcaaggcctcatgaagaaaagggcacaggagagtccgaagtttggtcaaggagagtctgtgttatccccagctcagccatggtcccctgagccaggagtgtacattgcaagactcagccagaattgcccatgcagggcaagggtgcatggatgagaagcgggagttcgccaagagaaaagaacaacactcttcctccagctggcaactcactgcagagcagttcagtgctcagggaggctctgtctttattggcctgaacacttatctgtcctgtttttctgctctattctcttctcttccaaccccaggtcacaccttgtctgtaaaggacacagctcagcaggaggcacgacttgatcctcctcggaaaggcagttccggggcaccaaatgtgcgtttctgtttatctccctcctgaattcctctttgaaaatttaagaggaaaaaatggcttccctattttaatggctgactttgaagttctgatttttcaatttcatcacttccagaatttacccaggcctacagctcacttaccacttttacctcacagggtgcggggaatggtggtgaatttcagtcccagaacccagcaaaggaaaatggaggaggagggaacagccactcctcactgaccactaggaaggccccttgcggacactggccatcctgccacagacaggccacctgtgtgcctgcagctcacaacgccctcgccccctgccaatgacagaagccagtgtttgtggagtcagattgtatctctggaggcaatcagaaagggtaaggaaaaataaattgcagtgactcaaattctaatataaagagaaaaacccaggaagaagactcataaataccaaagataaagcaggattgagattcacatttattatttacaaagaaaccataaaattgtaagtaggtgaattcatccacatactatttcagtgagtatttttgcttaagatcataccaaagttgt

SEQ ID NO: 1250 - DNA, 4001 bp, Homo sapiens
cctgcaacactaattttctctggacatgcatcgtgagaatttggttctcccagttttttggaaggtgtccagtcccacacagcctgaagtctttccagtaataggaaggcttttcttatccttcatatttgaataagctctaaacatcctcttcttcttcatggtctcggataaaatcctttaattatagcatcaaaatcaccagggggagatttaaacattctacacgagttggccccactcttggtgattctgcttccgtagtcctgggatgggaatctcaggaagttatagttgaaaaagctctccaggataagaaatctggggtaagggtgggagaatgaaaatcctcccatgattcatatggtctgtgtacacaacacttctctaagactctctgaagttttccaacaccatggaagtccacatttctttaagagggcagcagtcttcagaaaacagtgcatccgcgtgtcctggagtgaacacagggatgcaggtggctctctgctagaggaatccttgaatgatcaacttgcaaacctccctcccctcggacacaggcccacagctaaaccatctcggccagataagaagacatcttggctgggcacagtggctcacacctgtaatcccagcactttaggaggccgaggctggtggattccctgaggtcaggagtttgagaccagcctggtcaacagagtgaaaccccgtttctactaaaaatacaaaaattagccgggcgtggtggcgcacacctgtaatctcagctacttgggaggctgaggcaggagaattgcttgaacttgggagatggaggttgcagtgagctgagatagtgccactgcactccagcctgagctacgaagtgagattctgtctcaaaaaaaaaaaaaaaaaaaaagaagaaggcatcttaatcctaagtatgaaatgtctatgtgtcaggcccaaaagtcccaaagttccaggctgtgaacaactctgcctatgggagaaggggggacactattcccttaatggcaagtatcacctctgccccagagtccccatgccacttgctcatccttcatcaaagtgtatcaggcctccagggcacccccaggattggagaaatgtgaggaacaaggcccagcaaggcctaagccaatgtccttgaacaacacttggtttctttcttgctgctttctagtgccaatagctttatttttctactttggtatactaggatagaatcacaaactttagagctaaggagacttggagatacaggtcagaccccctcctgttacagaggaggaatctctcgtctagggaagggcaagggattgcccctacctactttaccaaaaataaacctggcatgaacttggccttcccagataaacgaccaacggcccaacagtcagcccagaaactcaggtggcaaacctctatagtccttcccagatagatcgggccccacctgcccccccgctcctcatcccaggcaggctccgcgctgccccgcgcccgcgctgtgctgtacctgtcccgcaggttgccgctgcgcagccccatggccgtgcactcagcctcgctcaccggcacccctttgcaggatttcaccgggtagatccagagcttcgccacggtgcccacctgctgcagccgccggcgccgcctgggccatgcgcggcgccaggcgacagtccccagggccacggcggccagtcctagcgcggcgaccccgagccacctgggccagggccgggctgggaggccgaggcgggccagcgcggaggagctggaagcgcccatggcagagcgagggcgggcgcggaccggcgcacagacccggcagcgaccggagaccgggaggacgaggaggcccttaaggatccgggcaggcgagaggagtcaaagttgacccaactacggaccctctcacactttcaccgccgagacggcagagcagttccgcggagagcgggaatgccttaatgcggtgaccaagcctgcgcggtaatggaggaagacaggcagacagcggcgggggtaccctgggcgccgtgggagcgacgccgcccaaagcaagcgagctaatggggcggcctctggggtggtcagtgtctcctccctcttccccgcccctacaacacgacagttacccatgcaacatgaccttcagcgccagcactctgccacccccttctctgctaatactgcacgcttagtcgctcgacaagatcaccgcagaacgtgaaggcgggttgcccaacggaggatttacaaacatttgggaacgactttttctggcaggtcgctgtgagaactgcaggactttctgcacacaaagacacagtctaaacctctgcactcaaagacgaggaactctagcgtggcttataggagcatgactcaaggtcccccaccctccgctgccgcctaacctcgaccccagtaaaatgtcttcccgagaaagctcaaggcagccaggagaattccccgtttattctagccaacacccgatggtaaagcccctgacctcccttttttaggatattttcttaaaagggcttacaactgtgaatcctttctctgttgctttgagatgtatatgtatcgcctacacctcagaagtgtctttctcaaggacctgaaagccattgctctgaaatgcagtcatggggaggataggcctctgtcccccagtctctgtgggaggatagaatcccagcttcataacggccagctccaggcacagctgcccgtcattaatactgaccgccccttcatgatttttcacttgatcccctgctagcttcccggccctattctctccttcaccctttaaaacgcccattctgctatgcacaaatgagaatgatcagctttttctcctactgtaagtagttactgagtaaaatctgttttcatggtttaactaatgtctggctttgttgatctttaacacctccattcaagcaagctattgggttaacagtggattttctcagacaaattaaggtttgaagtctttcaagttttttgttgttgttctgtttttcaaaagtttgtcccttaaactgtggcacagttctaggaaagtttaaggaggccaaccagtgggccaccccccaaatctgggctggccacctccagagaaaggggcccgttctggagtgtgggaagagactccgggaaggatggagaaccagaggagccaggttccctttggctgttccttgtgaaaagtgaaagacaaaacagggcctgaatctctccccacccaggaaaaaacctcaggccagcagaattagtccctcaatccccatacatttacatcatgcttggcagctgcgacttatggatttgttttttaagcatggtgtggtgaatgtgatgtgtgtacacttgtagctgaccccctttgcctctcccaactcctgaggagggtcagagtcctccctgcccacaagcctgctgtcagagtgaggggcttacaaagccatcgcctcgctatacgtgagctcccagacagggcaaatgtcttattgattaatcatctctttctttcaccacatagatattgatcattcaccaggcttcgtcctagattggcactggggatttaaagtttagaagaagctgcccttccatccagttcactgactccccagaagactgacacctcccctgcaagtctagaggataatgtcagaggagaagcaaggtcaagatgcagaggatgcagaggcaaaagagcagctgaatctcaggacagtgctgttttcagagggcggagctttggagctgagacttgaacatgaggaggggcttggagatgggtaaaggagaggattctgggcaaaaggagcagcacgtgcaatagcctgaaaaaatggaaggaacaagagagtgtggcatgtttgggcaaccaccagcaatccagctgtattaggatgtacctgtgcatgcagcaggtggcgggagttgaggcaggacaggtgggcaga

SEQ ID NO: 1251 - DNA, 4001 bp, Homo sapiens
gggagtagggtaaacaaaacctacttggaaaagaattggggaagaaaaccaacaactgccttatgcaggggtggggacagggaaggaggtagggccagggacaggagcatttcacatcactaacctaacttgggaagctgtaagggaccatcttcaactggccttaagaggagaaccagatggctgatgggagaatccacaggagggagaggaggaaagggaacgtggctgggaggaggcaatagccccttcctttctgggcacaggaaggcagccagggcaccaggtccaggcagtgacctcacaaggacagcacagtttttgcagcttagagatcacccacctgcccctacctagctactcattctgctcagcgctggctggtgtagggccactctccggccccgagggagtggatggctctgtagcctggggccctgcctcttcttctgaggctgcactagcctctgcccccttggcctggggttcctggctctcaggggtggctgcggccttcccttcctgagcagtgccctcgtcgctgcaggcaccgatctccccctgctcctgctcttcctctgtgggtgaggaggcagaagaatcacccccaccctccttccgatttctcttgaaggacaggccgctcaatttgaaaggcttcttgaaagagaatttcttcttcttcttgggggtctccttgggggggacctcccccttggcctcagcaccctggctagggggtgctggctcgatggcatcgccagtggccccggctgcctcatctgttccgttcacagggggcgactccccttcacccttgggggataagtctccattgcttttcacgtggccattctcctgcagggcagagggaatagcaatgagggcaggggctccccctcccccagcccgcttctgatcccttctagaggaaggggtcctcgattcgattctactgcaacccgaaagtctggcttcagcctcacccacacccaggatcccgtcaaacacctccctctcgcccctcacgggcgcgcggggagcgagcgcgcagagggcgcgaccggcaggaggcgctggggtcccgtggcccccacccccgtcccccggggcgcgctctctattccgcgcggaaccgctccggatctgctgtgcggatcccgggcaggcgggcgagccgctctaggcgacattgggcgggaagccgccccggggcgctgtctctctgcacctggacggcctattttcccagcctcccgctttgtgtaagtggcccccacccaccccaggctctcccgcatctcggctcccccttaaaaaaaaaaagaccgtgggccaccgaggtcgggtcggcgggtggagtgcgctccccgccgggccccagctccgcggcccctgggcgcccccttggcgtggcccagcagcgcctttgttccccgcgcggcactcggggcggccggggggcagcgccggggaccggggccgcgaacaaagaaggcggcagggcccggccggcgccccctccccgcccctcccctcgcttcgcccgcgggggctgcggcgccgagaacaaagggaccgggcgggggagggggcgccgcgtgtcccgggccggacaaagcgcgcggccccggccccggccccgggccctagaaggggcgaggtgcgagaggaggggctggggccggccgggccaagcgtacccacctggccgttggccttcgcgggggaagcgcctgctgcctcctcggcggtcacgtcgccccggggagccttggagctctggctgcccatgatgggggtctgctggggggcgcttggagccgccccgggctcgcgccgcaggggatagtacggcggggtcggcccggccggcggaggggtggggctggcgcccgagggggaggggtgccgggggaagccgagctgcacctccgctccgcggccgacccgctagctgcgcccgccgccgctccgctccgcgccagaatgccgcccgccgcccgccgagctgcctatatataagcgcccggagctcggggcggggccggacatttaaatgcgcgcccaatcgaggggcggaggcggggttggctcgcaggccccacttgcgcagcaggcgacgctggcggtcgggtaccccccaccccacccgaatcccaggggcaggtagagtccggtgtgggcaggagcgaggccagtcctcccgcgagctgggcggggcggggcggggggcctggaggaaggagacgggcagtcattccatcctctccgctccacctctccggtgggcgcccccgcagcctggagcggcccccaacgccttggtcctgcagccgctggcagtctcccgcttgaacccttcgaagggctcacacgaccaggctcgtcagatggctggtcctgaattatactctagaaatgtggtcatagaagctgcagggcccctgcgctgggctcggcacccgctccggcctggagagcggtcagaggtcccacccacgtccctgcctgcctgccatggccagccggggagcggagggctctgccttgcctcggggtcactctggtcggactagtgaggcctttccctcattcctcctttcagtcccttggtggccagtcattctgagtggggacagacagattcgccttgagcccctcctgccctcagcctggacccactgcaaagtcccacgtgggggactttgtgaccttgaagggcatctccatccccattgaaaggccaaggctcagaggcattgacaacctgtctgacttggctctggtccttcctctttacctccacacacaactctgctcccctacatcagggtgccccaggccggcagaggaaccccagctggggactcaacaaacctcaaaacaccccagtttctgaaggggagggataggatgctaccaagggtcccttcaagggacagccccttgaggacagccctcaaagctgcccagcccagcttcccaccctgcctgagagcaagggagcccggaggtgctccgggctggagactccctagctttggtcctctgccacctctccttctgctggcctggataggctggtgggaaccccagaatcctggccggccccggatgtctgtgtccggctgccagccctcagcccccaggaggaaagggatgggggctggaaggaagcaaagtgttgcaaatgcaaggctgtgtcccagccagctcagcaagtccctcccctccctcctacggtgaagcctcctgggaggcctgaggctgtgaagtgtggagacaccccagggcctgagaaattgggaactccccagagatctgaccacagaggggcggggagggctgaggtggcttctgcattctgcactcactcctgtatcctccatccccacccccaccctgagactacagaataccctcagctatctcagcttcacttgccccccacccccgccccatttcacagactgggaccctgaggttcaggaagagaaagtgacatgcccaagggcacacagcagctaccagtagctgagggtgagaaaaggcttggagaggtttgataacatgggccaagggctgtaaggaatcccctggcagaattttctgttgagatctggggctgcctggtcagagtgggaggcaagggctagctttgggacggggagaggcactgtgcccccactgcagctcactgaaagtaccgtgacttctccacagcttgccactaagggaaggatgtcatgacctgctctctgtctcagccacaatagggaacccacaatgctgccaggcgctgcccgcaccagctggctgggctcagagggacggagggtgtgtgagtcttgcacgggttggggtcagaggttaagagcagaacctaaggcttctgatccccaggcactgcctggcggggatgagaggcaaatcttcccaaggatcccaggaggggcatcgaagagcatcagggtaaaagaccccaagtccccagagcc

SEQ ID NO: 1252 - DNA, 4001 bp, Homo sapiens
tcacaggtcctctaacaatggtctcttagtagaatttcttctctctttgtatagttatattaaatttctgtgcttccctcctaagatgaaatcatctgtttatacccctccaacaactcagaagtgagcttgtatcctttctctcatgccttttgtctaagaacaccaaagcgcttcgttattttattttaccaaccccatgaagtcagtggtatatcaaaagctggacggctgatgagataactagacagagagctctggacagctgaccaaaacttagtacccctctaggtccttaaaatcagtcggaaaatcagccaagccctatttacaggtcttgagtgttttaaacaaaaacaaaaacaagaaaaccttcccacaaaggaacttgcacacacacacacaactgtacttttcagaaggtggaaatacaagggatcttgttcttttcgtttttcaagagtttaaaagcccggcacatctgcatcttgataacagctccagagggcaatctgatcaaagacacagaaaatccctcctttaaagatgtgcaccttgtgacactccaaggaggagagatatttaaagtaaaacctgccctgcatcattatcactgacttaaggaagagattaaaaagcccttggcttcatgtggcttttcaacattttgctgtaaccccagggccatagatgctgttcgtgaaattcttctactcatccctactaagagtgtcacagcagtataaactcatacacaaacacgcacacatctccacttccattcccatccttctcgctttggtgcccatgacccaaaatgtggacacaatgttacaaaaagcaaagtcatggggcaatgcggggggaggaggggagagtgcaaaggattgaaagatccagaaaagcaagagtgtgagaggtagccggctcgtctgctattgtaaagcaagcattcattcgggtgggggcacagaatgcagaggtagaaataaagcaatcctgactgcccactctgccatcccattctgcttctctgccctccatcaccccatccgcccctggaggaccacctccgagcgagagggcgccacttacggttccctaccctcacccttgaggggaaacaagcgaaatggggttggaatgaagaatagggctgagcagtgggtgagggtcacgccgggctccaggtggagaccctgccgcgggtggccgcgccgaggcacgggggacggcccaagcgcgggtgaagtggggatcagaggagggtctcgcccccactgctcccgagggaggctccggttactcacattttccgtgtcccgctcgttcaccgtcggcaatggcgtccgggccgacattttgtgcgggcagcggggtctggccggggtctcgccggccgggctgtggtgcgggccccggggggcgacaggaaaggggtgcggacgcgagcacaaggccggggcgagcggctcccgcaggccgcggggcggtgcaacaagcggccccggcgggggaaagagggaagaggacgcggaggaagaggagggggagccgcttcccgcggcggcgccgccggggtatgcggacagtaacgagggagggcttcgggcgaggcggttgcccggcgctggcggggcggcgaggctggcaggatgaggcgtggaaggggagccgggaggcggtggcgagccccgctaggctctccggaccatgggtgaaggtgaagccggtgcctcaaatcactgcctggctcgtcctggcgagcgcctgggcgtcaggaaccgcggccctgacagcgtcacccgcgccgcgccccgttctccgcctcaggtgtacggcgccgcccgacccagccgcatccacgcgcccggggcccagcggcggcggcgcccgatcccccggcgcgaatgtctcggctcggtccgcgcggtcacagccaccgccgccgccgcgcctcagtcaggaggagcggcccgagccggctgcgcgcggagcagcgggcgcggcacgcagcgcccagaggcacttggcggccgccgccgggtgggcgggcgccagccgagggggcctctccattcattccctcattagggatgcggggccgcctcctcctcctcctcctcctcctttttctcctcctcctcctcccgcgctctcttgcccgcctgtccctgtgtttatttttgtttcgtgccccacccgcagagtttacggtcgtctaagagcctctggtggttttatttttattcgtgtttggtttttgccgggttgagggtgagagagagctgatgtgaatcagtggcttttttttttctttttctttctttctgtttttgtttgtttgtttgtttgtttgtccgtttcattggagaagaattggattcaatcctaccctggatcctacccctccttttctcctacctcgggacttttaccattcttaaattctactcctcctcccccgtttccacgctttctcaatccctatcctcgcctgagccctctgtcagtctccttctctagggagccgttaggttcagggtcaccctcagagtttggcaaaaagcacagaagcccctagaagcgccagcagcctagggaggcggctggagactcagtacaagtgggtctcagcccccgacggcgcggcctcttcgggaatggggccggcggaagacgtctcgctctgggcgccctgcagcaccctcggagtgggtgagacccgcgagtcacaacatctacactggctgatcgtcacttcctgggacacaaggaagtgtcacttaggcgagcctgtttagggaggatggagagctgtgtctgatttgggccctgtcctccctcttccaggtggcttcctcacacttccacccacctgcctcaagacatcctgtaggcacccgcgtctgtagtgcattgtccaggacccattcgccttttataagcaaggctgcatttttttttaatctcatttgagagcttacattttgcacattcagcctgtagaacgaaaaccttatcgtctctctattcttctttgcaacatttctttttcacttcctttcatggatgggcaggaagacaaaaggaatgaaagataggagcggatacattgattttctgagctgcttcagtatgcctccagtggaattcttataatggtgggaaatttctcgtctcttctgaatttcctccatttgaaagaagaatccctgaaccagatggtttttatcctgactcattaaaggttgtttctgaaaagttaacacttgacccttgaagcatgggtccaaaagacctgaaaatagcaaacacaaaaatcctttgaggaaagaagcaattctcacccagtctatattcacttctagaacaccatctgtgtacttatttctttagcattttctcttgtaaccacttaccaatttcacaaagcaaatgaaaaaaaaaaaaaaaacaagatccctttggtggtcatcaccacttctcaaacagaatttaggcagcggaactgcaatgctgcctcctgaactatgatgtgttactgagaatgtcaagcatttacgtgccctctgcagaaaatcctgaatcaccaagatacattgaagttgcaagggcataatcctgtatttttctggttattttctggttaactattgcgacggctgcctgtaggggctgccatcacagtgtcagcggcatcactgactgctgcagccacacaagggtacctagtgttgcaatagtacctgagttaacctagcaataaacaagtagctgtgaaaaggcgttcagccccattggaatatgaatcattccttcagctggtagtatgtattttgctctttaaagtatactcacatatttttctatctttataatcgtggtgaccctgacaggcatatttatttccattttacaaaattccactaagttaacttgttcaagatcacagatgcaccaggttaataagatacagaagaagataactgaaatatgtg

SEQ ID NO: 1253 - DNA, 4001 bp, Homo sapiens
ctgagaggggaagcagggctgagaaggggagctggaggcagcagggcctagaagcacccagtgtccagggcccaggccctccgcacccctgggcagagcagcaatggccctgaggagccccgggtatcccaggagagggtgcgttggggcccaggcagcctccctcacctgagcaggtgcgcttgttacggtgcaggacgtagcctgcgcggcaggagcagtagaaaccgcccaggtggttgtggcagtggtggtcgcaggtgggcgcctctcccggggccacctggcactcgtcaatgtctgggggagaggcagggccaggcaggccgtcaggagggaaagaggcgggatccagcctggactcctcccaggagatccatgacctcagagtggacctcagaggaggcctcgtcctgtctagggtgcgggactggtgccgggccaatcaccttacaggcctagggtcgctgcaagctcccagcagcgctgggagaaagatgcaaacatcacctctgttaaaccagtgggagtttcagtgtccggcccgaggtcacccagctaatgaggggagtcaatcaaacccagggggcggggctacagcgctgaacccttgcagcagcttcctaaggagcagagaaattgagccacttgccagaggtcacacagttggtctctgcagggactgggatctgaaatcaaacatcctggcagcgctcccgctggcagggccccactttgtcagctgtaaatggggccctcggcccctgcgtcgtttttgttttttgttttttgagacggagtctagctctgtcgcccaggctggagtgtagtggtgcaatctctgttcactgcagcctccacctcgcaggttcaagcaattctcctgcctcagcctccctagtagctgggattccaggtgcgcaccaccacgcccagctaatttttgtagttttagtggagatagagtttcaccgtgttgccctggctggccttgaactcctgacctcaaatgatcagccagcctcggcctcccaaagtgctggaattacaggcgtgagctgctgcgcccggccagtccctgcgtcacttgaggcgatgctgtcctcagatccctggctcagagttggcactcagcccatgtgaatggaggtcacggctgttttggtctttgcattgtggatgatgtcaggccagaggcctctcccctgccctgggaaaggtggggaaactgaaggcagggctgcctggcctaagacagagttacccccacagccagctgcgcagactgagatgttgcaggacccctcttggctcaccctcggctgcatagaaggcctcgaaccccgtgaacggcttctcgttggagtagtcggagcggaaggtaatgtccaggctggagcccagcgagtagaaagtgtccttgccaggggcccgctccgtgtctgtgctctcctgcccgcacagcgtggccagcaccttggcccccgagctcagctgtggggtcaggtgtcacagggagtgaaggcaagacccaggcctgatctccctcctggccaagcctggcccctgctcccaggtgtccctgaaccctggctactccttggggaccccccgaccctgagaaaccccagccctcccgtcctgacggcaccttgacgaagtcgtactcgcagaggtgggagagctccaggtcgaagtgggtgaagtagaggcgcaggcggtagccggggggtgcagtcagggtccagcgccgctcctggtcattggcatactcccctggaaagccgggggatgccaggcgcccgaacacaggttcaggccacttcgggcccaagggggtggccaccgagccacacagaaggcccaggagggtcagcagcctatgggcagggcaggggcggtgagggcccaggcctgtgctcccaccccacaccctgcagggaggctgtgggcgcccacctacctcatggtgtgcccgtccagctggcctggcctggtctgcagccctacgctggtctcacctttgatctgtttgtccagtgacctgcccctgcccccagcctccctgactctgggattctgggaatcgactccatgactccagcctgctcagagttccaggcaggcaggacaggctgctctgggagccaggagtcggacctaggtaacaacagcctggaaacaaatcctggctctgcccctcacccctcccttttttttggatcttgttctgttgccccggcttcagtgcagtgctgcaatcatagctcactgcagcctctacttcctgtgttcaagcaatcctcccacctcagcctcccaagtagctgggattacaggcgagcaccaccacacctggctaattttttatttttggtagggatggggtttctccatgttggtcaggctggtcttgaactcctgccctcaggtgatccacctgccttagcctcccaaagtgctgggattacaggtgtgagccaccgtgcccagcctcaggctggctaatttcttaaaccctgtcagaaggacctggtgccaccaattcccgattcccttgcaggcttagaagtcgcttttggctgggctcggtggcttatacctgtaatcccagcactttgggaggccaaggtgggtggatcacgaggttgggagtttgagaccagcctgaccaacatggtgaaatcccatctctactaaaaatacaaaaatcatccaggtgtggcagcgcgcacttataatcccagctactcgggaggctgaggcaggagaattgcttgagcctgggaggcggaggttgcagtgatccgagatcgcaccactgcactccagcctggacgacagagtgagactccacctcaaaaaaaaaaaaaaaaaaaaagaagttgctttccaggcagttatttcacacctgtttatctgttcttccagcttccagaactttgaggctgctgcttcctcttccacactctgtcctcatggattcatgtcttgtcttttttttttttttatcccctttatatttgtttttgttttttgtagagatgggggtctccctgtgttgcccaggctggtcttgaactcctgagccaaagcgatgcacctgcctcagcctcgcaaagtgctgggattacaggtgtgagccaccaaacctctgcctccggggttcgagcaattctcctgcctcagcctcccgagtagctgggattacaggcatgcgccaccacgtccggctagttttgtatttttagtagagacggagtttctccatgttggtcaggctggtctcgaactcccaaccacaggtgatccacccgcctcagcctcccaaagtgctgggattacaggcgtgagccaccatgcctggcctattttcttttagagaccgggactctggctgggtgtagtgactcctgcccataatcccaggaggctgggaggctgaggcaggtgggtcgcctgagaccgggagttcaagaccagcttgggcaacatagcaagaccttgtctctaaaaaaaaaaaaaatttttttaaattagccaggcatggtggcatgcacctttagtcccagctacttggcaggctgagatgggacaatcgcttgagcccaggaggtctcaaggttgcagtgagccatgttcatgccattgaactccagcctgggtgacagagtaagattttgtctcaaaaaatacatacatagcaataataataatgcaagaaaatttcccagaactgaagaacgtgatactgatcgaaagtgtgccccaagtgcccagaaaaggagataaaaatattaatacagctttacacatatttaaaaacactggagagaataattatgttttacaaacaaagagaaagagaaaaatcaaatagtaaatcacatgcaaaagatcaggaaaaagaattattttggagttaaacctcatctctactaaaaatacaaaacttagctgggcatggtgttgcgtgcctgtaatcccagctacctggaagg

SEQ ID NO: 1254 - DNA, 4001 bp, Homo sapiens
gcagtaaggtcaactggacaggtaaactgagacaggaaaggacctggacttgaagttcattgtacaagttttgactagatgatactgcagagaatgtaaaagataagtattaggcacatgggggagtaaattgcagcaagaggacaatgctcagcagctagaagcggggcagagatggtcaatggtgcagtctcctcagggctcagtggggaataagaggtggaagaacaaaaggggggaaaagtccaagggctacctagcatggtatataatttttaaactgtctaaagggccgggcacactggctcatgcctgtaatcccgattacctgaggtcagagttccagaccagcctggccaacatggtgaaaccctgtctctgctaaaaatacaaaaaaattagctggacatggtggtaggcacctgtaatcccagctagccgggaggctgaggcaggagaatcgctgaacccaggaggtggaggttgcagtgagccgaaataatgccactgcactctcccctgggcgacagagcgagacttcgtctcaaaaaaaaaaaaaaatgtctaaggaaaatgctaatttatctgagagaaaagaggtaagagacctataagaagtcttaaaacattcatggatgaagtcagtaggatcccgaatagagctgaacaaaaggaaagctgtcactagagttcattactacagaacatttttctgtaaatccaacaagaccaaggattacttattctcctttcactaaacttattaccgctactagtggcagcttctcctgcctgataaaactgacctttatcccctactcataaatacacctactcttgactaataaattacataaacatatcctgttcattcagaaactccatgaatatttgtatgctgctgtgttttcccagtaatgtgttttcagtggaaaactagcaggcaaaccatatatctacgaattctgttcacaaaattgggcttaacactgctcacatgcaggtgtttcacaagtgctttcttgtgaaatagatggttggtaaagagagccttaacaatgattgtgaacacactggtacaaaagtataatgatggccaaatcagagaatgcttgggagtgtcatccgtttttacaattttaaggacaacctctagaaaacaggataacactacatcaaattgacttacatcttactctatttactcctatggataactcctcaacgcctctttagtaagcctactcgttgcagctcacacactcagcccacattccagcgtcctttcgccccatccagaacccctgactatctcttgcaccaatttttcattcttctacacccccatttccaatacaaccccaggccaccacttccatttctccactccccatttctcggcctccccagacctcccactcctccccgcgaactactcagaccccacccctccaaagctccagcccgggtcctcccgccgaagatcccctcccccacggcttccattcaggttcaccctcccggatcccaacccgccctacctgctccttgccctcgggccccgcggggcccgtccgctcctccagccgctgcctcccgggcggcgctcgccggcgcggcggcaaagactgagacagctccgctgcccgctgaactccatcctcccggcggtcgggcggcggcggctgcggtcggtcgcggcagcggctccgcttcatatctgcagctggggcccgcgggcgtcagcgccgcgactgtcccggctccgcactgccccgggccgcagcgcagccgcgccaaccaccacccgcggccaccatggccggacgggctccctaagccaccgaccccagcccgcggcgccttcgagccttctggggcctccggcgccgcgacctcctctgcgctcctcacggaagagacagcatcgctgacgcctcgccttctcccacccagcacacgttgggcaggccacccgccgccggctcagccgcctgcctacagccagccttcggccggccccgcccctcacgcgcgcgcaccgggagcccgcccgccacctccggccgcgcgccgcctcccgcgcacgcgccagcgaacggtcgcaaaggacccgcccgtggccctggcgcgcagtcggaggaccagaagcgagcggggctctcggcgcgccgtcagcggctgcggactcccattgaatctttcattcatccattcatgaaactgctgggccaagctcagtgctggggacccaaaaatgagttcgagtcgatcggtgtcctcaaagaactagggagagaggggccgggagcaggaaggagacagaataacacaactaatgaatagaaggctaatgcatgcttttttatttagtgcctgccaactctcacctaattctcacatcacacttaggaggcaaatctgcgcattctcatattacagataaagagactgaggcgaagtgaaatgcaccaggtcacccagcaaatcagtgatcaaactagacggaattctggctcttctgtccctttccaccgtgtttgctctttccggacagtaagacagtgtggaaacgcctataaaagtggaaaaagtgatggattccttctgggaggaggagaggacaaaaaaggcatacaatgaagtcatcgtgtagagcccagcccagtctgctgtggcctgggtagcctgacctgctgcctgcagtgactcatctgctcagcaacatgtggtggtagctcagctctggcctccctctggcttcagctggtctgccacatgttgtgtttttcctcttttgacctagaagccttgcttaaagccttcacccatttgtcctgggcctcttccctgacccctttctgagtaataaaaatagccaacactatggagtgcccactgcataccacacactgtgcattcaattcagacatacacaaacaagaagtaagttgtatttccattttacagttgaggaaataggctcaaattacataatatgctcaacatcacacagcttataagtccagagccaggactcaaacccaggtctgccagatccggacagaaagacagtgcggaaacacctataaaagtggaaaaagtgatggattccttctgggaggccgggaggatgcacataaccaatgtgctctacggcctgtcaccagcctgctcctctattccctgtcccagttccttaccacccatccagttgcctcaaccagaaacctggaaatcatcctggactccttccttgtcctttcctcacatccaataaatgaacaagtcttattgcctctataacctcactatttctccaatctgcctcctctttccgtcccattggcaccacctcaagtttcatcttccctcacctacttgactgagaaagccttcaacgggttcacttatgccagtctcattgtctttaaactcatccttcaaaaagccctcacaagactcttcctatatgttacttgcttgcttaaaacaattaaatggaccgggtgcagtggctcacgcctataatcccagcactttgggaggccaaggcgggcagatcatgaattcaggagatcgagaccatcctggctaacacagtgaaaccccgtctctactaaaaatacaaaaaaattagccaggcgtggtggtgggtgcctgtagtcccagctactcaggaggctgagaactgcatgaacctgggagacagagcttgcagtgagccaagatcgtgccaccgcactccagcctgggtgacagagcaagactccgtctcaaaaaaaaaaaaaaaaaaaaaaaacagttaaatgaggccgggcacggtggctcactcctgtaatcccagcactttgggaggccaaggcaggtggataacgaggtcaggagatcaagaccatcctggccaacacggtgaaaccctgtctctgctaaaaatacaaaaaattagctgggcgtgatggcgggcgcctgtagtcccagctactcgggaggctgaggca

SEQ ID NO: 1255 - DNA, 4001 bp, Homo sapiens
ctggcatagttgaccatgcccacccgggtggcattgggccccacgtccagcgactcgatgacctgggacaggaataccttcactttctcaaattcaacaggccgaacgctgcgagagctgtcgacaacaaacaccaggtctgtgggccgcgtccggcagagatggcctgggagtggggcaggaggggtaaggcagagagcagagacacaggtcagggactgggcctgaacacacagagtgcggcttcttagatccaggtgcgaggcctcgggcccagtaggctgcaaacttcagctgggcagctgagcccttttatcaacatgcagacaccagcaagcaacttgccaaaggccccctgctcagcccatggggaacacagagggccaagcctggccttgggccatttgcttcacttctctgagcctcagtttcctcatctgagcagtgagctagcaatccctccttacaggatgttttgaggagccagcagggggccaggcaagcaatgagtattccaggggtggcaaaggaccctgcggccttgaaaacacatttaggtttcagcccagacttgctgccagaaacaagggcagctatttcttctagctgggcaggagggcaccaaggatgggccctccaggcatgggcacaggcttgagagccaaagcagtgcccgtcaacatggcctctttcatctgagcatcaaagcaaatcaccaaagtggaaccagtttccctcagcctggcagcgcctgctggcgggttgccaaagacagggaaaaggagcaggaattcctggtggccacctcggcagcctgatcaggtgcacaccaagacacacccccgaggagcaatgtcctccagagacccaagaaggcagcaccctgtgctgggaagtatgcagggtcagagtgagttcaggcctgggttcaaatcctggctcagccactctgtggggccctgggcagatcattgcacctttctgagcctccgtgatctcacatgtccagtggagagaataaggctactgtcactggcctgggcctgcagtcaggaaggtctcactacaaaggcccttccctccccatcccatgcggagtctgaactgagcagagccaatcccaaagaggaaaggggaaacgtgcagggccgtcccaacccccaagtcacagtaactcacagtgccctagactggggctctggacatcagagttcctcaggagaccttagaaatcaccatgcagcaggctccctgctgtctactcgctaaggctacaaatgggtaaactgagacccaaagagggaaagggaattggccacaccgtacagcagtagatcaataacctagaggctctggcgctatctcactgtgtggtcttaggccctcactgacctcagtttccccatctgtacaggaagaatgggcattccaggactcagtgcccaaacctgaaactctggggggtgttattgcccccagggagcccaaggctggaaggacctgcaaagggggcatgagctcttggcatcccaggtctgctgtcatcaaagagccatgggctcagccctgggcttggtgcagctccagacgtcagccagctctctgagtagcttctgctccccagagacctggaagaccaaggtccctgcctcatgcatggtccctgagggctgaggagcacccctgccctgacccttataagcaccatggtccctgtctgctcctgcaccagcccactgcccaccactgccgccctgctcccttccccatcctggatcccgtgtgctccctgccatatcggtacccagcccccagtgctgagggtcagggcccactagctcagtagcccccatctcacgcaagccccctcacctctggactggggggcgaggccagggctgcacagggcctggagcagcagcagcaggctgcagagcatgaggctagtgccagagaggaccctcatagttctggcagcacgggcagcagccggcacggttgtgggaccagtggggtccaggtcttatcaaccccactgcccgcccagcctttgggtcaggtggcccccaactgacgactgacgtgggggcagcccgccctggcccccagcccccccaaagggcggggcttgggctgaatggaggtgtgtgtgccctgagagggcgggagagcctggcccaggcttcagaggcccctctgaccacaagggctcctttgcttgcagaagcaactagagcggcagctggaatttgggaaatctcaggtgggtggggggtggctcttccaggggctggagcccgcgctgccttgaagctccaccccaagcctaggcatacctgagtccaatggcccggcccagccctgtcctgcaccttcatcccacacccaaatccttcccccactcacaaccccaagtttctcattaaattcacttccccttccccagcctcactgtgccctgctctccgcacacgccctgctctccagctacccctggattctcctcgaaggcctccaggccatcacacatgcagggccatctgcccagaatcctttcctctcactaactctctgccttgtagaatctttcaaggtcataattagggctaacatgtaccttcactgttagtatgggcagggcagtggagaccatggttaagagcacagacttgggagccaggttacctgggtttgctataccagcaaaccacctgtgtgaccatgggcaagtgacttcacctctcatgtctcagattgctcatctggaaactagggatggtaatagcgcctcctagggttgattcaaggagcaaaggagttagatgaggtttctcagttaatcctcttgacaactttttaaagcagctactgttaaagaacagagaggtaaaataacttgtctgaagttacacagctaagaagtgttattgccaggatagagccccaggcccggctctcagccatgctgctgtctcagtgtagcttgatgtaggtggcttctccctgcccatctcttccccctgtgggtccctgcttggcccacctcacctgtcagccagtggattcaactctgcatcaggcccagcacagagaaggcaaagataaagccttctaaacaaagtaacatcagcaggaacgatccccttctttgcatttgggtcaagtagttcatgagatagagcagaaagagcatgggcttggctacctgagagatccaggttcaaagccacttctgctcctaactggctgtgtgacctggagctggtgacttaacctctctgagcctcagcttgccatggtgcagtgggaatggtcgttcttgatctgcctgccccatgtgaggggcaagagggggacagaagtggaaatggagttaaaggattgtcattgctccaggaggcagaatcctaagacttgggacctatgcacttcactctgtgtaaattatacctcaataaaaggaaatgtacagacaaaaagcgactgctgggtgcagcagacccaactcaccgctaccacactctttagcaataattataacaatcccttccacccttgacatggcagttactcattctatcactctatctcatttgctcacccaacaaacctgtgaagtcagcagatttgagtctcttggcccatttgtcagatggagaaactgaggcccagagaggttcactgacttacccgaagccaccagccagtttaggggcagagccaagcctaaagctcaggcctcactcccctttgcaccagtgttagagaaggaggaggttaagagcattgccttctgactttttccccttatatttcatgtgtgcctaattcactgccctccccaattccaaaaaccacttgaagctgctgattcctttttctgctacaactttgaagtcgaattcttctccagagatgctgcaaggtgtgatgatggtggtgcctctcccttcccaaaatggtgtaattaaggtgttacctgtctccccaaggacgtgagc

SEQ ID NO: 1256 - DNA, 4001 bp, Homo sapiens
gacttccagagttcccatgaggtaaaagacgaaaacccttattctcaaatctccaccacctaatatttcagtaacgcctcaattgcgcagatcagtttttctcaacgtagttaagtacatcctgcatcagatctgggtttgtttaaaacgcaggctccaccccatatcttctccattaaaacaggcaccgccttaggaattatttcagctatcctcccctggtgacttattttttcatggtttgaatccactgaagagtattcaactgaattggaacaaaaaattgcctagagaaaaccaagatttttgatacaattcaagaccgccataccactatctctaaggatccactacttaaatcaacatcaaataaacaatggtcctttagttagagcctgcaaacagccgtgcgtcataaaaacctttagatatccccacctctctaaaaaaaatccttcattctacttccactccaaggcccctttcatccttaaggcaaacttacccagcctctttgtttaactagccagtcccgttttgtccttacgagaacgtctgtgatactttctgctaatggttcgatgcagctttcttggtttatggtcttcaagtgtttagccacaaaggcaccaaaagaaatgagagtcacaatcctgccccagtttgttacgccgtcgctgaaaacatggatcatcactcgagacaacgatttcacatcgtcttcgtttttgatgtccagtttccgaagcatgcctgagaaagaaaagcatgcaggtcctcacggcctcctttgtctaaaccggcgcaagattcgcctgcccacccgcggcgggaaaatcgctactgggatttacagaactcaggttgaccccacttgaaattgacatcccaccctttccggtctttgaacaagagctgccatttccaaaagaatcaagatgggcggaaacaatgactcatggccagaatattctggcttcaggaataggatgagacacgtttcaacactgactcgtttcggtttccaacccacccttggcgggtgagtccggggagagatggaaaaaagggagtgaggccttggcgattaatgaacccccttaccttggaaggccgtctcgtggttgcgctgcacgccatccccaacccgtcgtaaggtctccagcgccttcctgctggtggccccagacctgcccattggctttgtgtccttggcgccggtggcctgctcccgaaggtaccgagagataatctccagcgactgccggtacaactcgtcctcctcctcctctgctggcggcggcgtcgagggtagtgacccgtccgtactggtgttattaccagattccccgaccaactccagcagcggcaggacagccggccgcttcccgagaggctccggctcgtacccgtccagctcctcttcgggcgacatgatggcgtcagcggccggggcttccatctcctcaagcggcgccgcgcggcgggtgggcgcgaagaaaagcagcctcgcgggggtcgcggtgacgtcggggacctcggcgccaatgggcggcggccgcgcgaccctccgggagtctggcgtgagggtggacggggggcttgcgccggcgcttccgccaatcaccgcgccggcctcccctccccctatctctcgccgggccgaggcctccttctccgtagccaaaagtcgccctcccgggcgggtggcgccgccgctgccggcccccaagccggcccccccacagtagaggttgagtccgattaccgcgtttcttttgaggccaaacattgccagtcgccgccgccgcctggctgagaaaactggggaagaccccgactccttactggaaggaagcggaagtgagaagtggcgagcagctcctttatcacggttttagggcggccagtcctacggggtggcgccagcgaactctttttttttaaaaaaagtattcccataaaaggggaaaggggcggcagcttccggagggttgcgcacggcacctaccagctgcccggccgggccggggcggggccggggccggggccggggccggggcctgagccggggcctgagcggggccttccggtcttcggaggctctgagtgccggttacgtaacggcggctccgagcgcctggggtcctcccagagctcctgggctcgagctctttccatgagcacctcgggccttctcgtggctacctctgtgcttccctgagacctgatttgtgagccctttttgctggttttcgccagaggttttttaccaaatcaaaatttcaaccattgactaacacaggggttgaaggaagaggacggggaagttcagtgatggatgggaacaacagtcttagatgatagggataattaagagggcatagttggggacttgtggttattttgcacagctctctactctcagtccaatgtttggaaatgaggatgctccacgtgctaccctaaagaaccatttatgtaagtggactaagctaaaactgccacagctaaactattcctgcctccctgcttgcttctcccatctctgttccatagtctttggtgctatttacatataggccttaatccattagaatctcgtctgagagtcttgacaccattttttgtttgttttgagacagtctagctctgttgcccaggctggagtgcagtggggcgatctcggctcactacaagctccacttcccacgttcagacgattcggtacctcagcctcccgagtagctgggattacaggcgtgcgccaccacatctggctagtttttgtatttttggtagagatggggttttcacgatgttggccaggctggtctcgaactcatggcctcaagtgacctgcctgtctcggcctcccaaagtgctgagattacagctgtgagccacctcgcccagctgattattgtatttttagtagagatgtgtttcatgcgcgtctgtgtgaagacaccaccaaacaggctttgtgtgagcaacatggctgtttatttcacctgggtgcaggcgggctgagtccgaaaagagagtcagcaaagggtgatggattatcattagttcttacaggttttgggataggtggtgaagttgagagcaatgttttgtgggcaggggtggatctcacaaagtacattctcaagggtggggagaattacaaagaaccttcttaagggtgggggagattacaaagtacattgatcagttcgggtggggcagaaacaaatcacaatggtggaatgtcatcagttaaggctatttttacttcttttgtggatcttcagttacttcaggccatctggatgtatacgtgcaagtcacaggggatgcgatggcttggcttgggctcagaggcctgacaatgtggtttcaccatgttggccaggctggtctcaaactcctggcctcaggtgatccacctgcctcagcctcttaaagtgctgggattacaggtgtgagtcactgcacccagctgacaccatttatttttgtactgataataaggcacatttgactctagaggtttgtaaagcccttgagaacaaggatcttcttatatgccatgtatgttagttaacgttaattaaagcagcctttttgttaaaagatctgtaaaaataatagctaaaattcaaaagcaaggtgctgagagacataggaaaggtgagcaagctcactttttatttatttttttgagatgaggtcttgccctgtcacccaggctggagtgcagtggcaccatcagtgctcattgctgcctcaacctcctgggctgaagtgatcctcccaccacagcctcgcgagtagcgaggaacacaggtgcatgcccctatacttggctaatttttttatttcttgtagagatggggtatcactattttgcccaggccggtcttgaactcctggactcaggtgatcctcctaccttggcctcccaaagtgttgggattacagaccgggctctgtgcctcatgccaataatccca

SEQ ID NO: 1257 - DNA, 4001 bp, Homo sapiens
gttcatggcaccccaaaacaattacagtagtcacatcaaagatcagtggtcacagatcaccataacagatataataataatgatgaaaaagtttgaaatattgagagaattgccacaatgtgacatagagacacaaagtgagcacatgctgttggaaaaatggcaccaatagacttgctggacacagggttgccacaaaccttcaatttgtaaaataaaataaaattgaattaaatgcagtatctacaaagtgcaataaagcaaagaacaataaaacaaggtatgcctgcacttttttctatgaaccccttaacatgtgacacaagagctcactaaagagtgatttaattcttcagaactgacacacggaacttagaccctaggccttaaagaaaacagcccagcttcaggaaagtccacttttacttttacagccagaagagttttctttggccactacttttactttgaaagctatagtcacaagaagccatctctttttccgccggttttaaaattgtcttgttctaggtttcacttcactgacagagacatagccaaagagatcagcttgtgaatatgatcattcttgactttcagttctgtatttcgtgcccctttgctcaaactatgtctctcagttcttctcacttgcttcattaaaatattttatatctattactctatttttttaaaaaaaaacacttttgatatgttcctccttcacagaaaagaatgtggctacctcaaacactttattaggattcactcattttttattacaggaggttaaataaaattggtattatgatggcctctgtatggaaaatgtgtcgtttttagagttccggccacagaaactgacctatgaacggttttctaaaggagaagggtgtgcctgtggaaagttcacggcaacgggagtttgactcctcttaaggtatgaagaggaagacaggctaaagtctcaagaaacttctgactcaataggggaaagctatcaaatttcccaaaagttgtgcgattttggttagcacatcacaaaggtgatgagcagctcctgagagtgaaacccacatcccatttctggggagaactacgtagttggttccctctacataaaatatcagagtctacatcctgacacccataagaaacctctcccacctttctcttactaaccttttcttccattctcagtttacaatgacacacaattttgtttcccacaagtaccgttcaaccagagacacacacacttacacatacgtatatatttcatatatatatatatatatatatatatatatatatatatgtttggagagcaggaaacgggggagccaaggtctgtttgtactcacaactttggctcaactgtgctggggtggctggaggtttgaccacggaggaggggcccgctggcagcgccaaccggctgaactgtgcgccttttcataaaggccgaggaactggggttagccacactacaaccctcccacctgagggaaaggcctgtttgttctggaaggcacagcctagccttatttaactaactgcaagcagttaatataagcattcccaaggcagcaagcaagctctagtctacgaaagtaaagccatcgactttaggaagatttctccagtccagcatcctgaaagatgaagcccagactcctcacctgacggttaacctgaaaacacctgatcctctctccggaatccttgcctggggaaaacgataaggctgccgggccatgcctcctccttcaaaactttccagggctctcgggattcggaacaggaaacaccgttcacggccgactcatttcgccctcgccgtaacgcgtccgccgaagttggagccctgcaaagcggggttcccttctcttaccctttctgccggccgcgtggtgcgcgcagaccccggcccgagagcaggcgccgcagtcgtggagtgcggcgggcagttctcgggcggctgaaaggcggctctgtgtgcaccctgcaggatgcggcgcgtggccaggcgctcccgccccgcccccaaggggctgccccgccccgccccgccccgccgcctcctaccggggaccggagcttccccagttggggtcctaggggacttattccacgcttcagcggaccagcctccccgcgctcccggagaagggggtcggcgacgcggaggcggggtgggggccgtaggggatggaaccgaggcgcgcgcgagaagagccgaggaagtaagcagtcccaaaagggggcggcggtggggcccccagggaggcgtggggcacgccaagggcgccgtggggcactgacctgtggtgcggcccccaggacaggcccgaggcgcggttgcacaccggcaggtccagcacctccatgcctcgaggcatggcgcggccagggagcggcaggaggacacctagcgtgggacggctacacctgtctgggcgcaggcccgccgcccttgcactctccacccaagtgcccaacgctgcggtacggcccgctttggctcggggtgtctgccggagaagcgccttacagagggacccgggcggtgggccctgcggcaaagtggcccacgcaccctccacaccgctcccgggcggccgcacctggcactcccggccctctggggttcctgcctttttcgggggggtggtggtgagaccgggtctcactctgtcgcctgacctgcgatcactgctgactgcagtcttgaactcctggacccaagcgattctcctgcctccgcctcccaaagtgctaggattacaggtgtaagccgctgcgcctggccccttcttttcttcactctctcatgcattcatttcttgtttccacatgcattaatttgtccgttgctttggtcattcctgttttgatgcttagggaaacactcactgagagccaagccgaccgttgggtactgtggtctctgggatgacaaagacatggtcctttcccttgaggacttcacattaaactgacaagttcattcattctggcttttctctaaagtgcacgatcatgaaagtctgtgacaagggccatatttctgagatgttagaaagtgcgaccggcgcgcaaggaataggaaaagcgagttgccctgcgcccgcgtcgggatgaaaggcagggagccgggagggagcgtcagcgtggcccggcgggcgcggagggagggcgcacggccccagggctggactcgtaaccccagcgccctgctgcagccgccgttgcttttccctcttggtgcacgaaaggaagacgcctgtgggaaatcgaacagacaatcggtcgccgttcgtgaatcttagagatgagagtcgtcagtacatgaccaaaagccgtgttcggctcctagtgatgttagcttggtagtttggacgtggccgacagcctcctagagctcgtacccctccttttcacgaggtagcagcagcaaagtccgcagtgccaggctctgtgagtctgcaagcgtttaaaagatctccgggtttagctcaggcaaagaatattctgccaggtaattattttaatatgcgtgtccaggcagaagcagttggacagacgatgtatataaaagcacacataattgaccctcttttaaggcacttccaaggggttattaggcagaaatgccttggttttgagcccctttcatcggaggtgcgcaatcatccagctttgtgaatagtaactgcactccagcctgggcaacatagtaagaccccaaccttttggcaccagggactggttccatggaagatgatattttccacggacaggtggggggatgaggggaggatgttttcgggatgaaactgttgcaccttagatcagtaggcattagagtcttataaggagcacacaacctgcaacttagatccatcgcatgcgcagttcacagtagggcttctgcccctatgagaatcgagtggaaccgctgctctcttgctcaatgttcacttcctgcagcgcggctt

SEQ ID NO: 1258 - DNA, 4001 bp, Homo sapiens
aataataacttgtactcagcaatgaagaaggaaaattgtaacctgcattcatacaatatcttacaagtcactggttagataccatgctgctttccaagtctagaaccccacttttgattccaattcaagcattcttaggaagcccaacatctccgaacaatagatactggctataaagaatagcatggggaaggttcttaaactcttgttaatgaaaagattaataaggatactgctggatgaataaaccataaaacatatttactgtatggcaaatgcagtaccttcaaaatgaaataattattatataactcattaaagtgtggctcctgtgtgcgtgttaaaatgcctgtcaaagcataaatgcagtaattcttaggtaaaggcataaaggaaagaaaaagttattaataaattaggattttcacttaacagttttacttccttcaaaaaggcaggatattttaaccagcatttaaggagactttatctataggacttaaaacgcagatgatttcatgttgaccaaagctcgcatatgaacaccaacataatgatgaagctgttaataagcatgttggtgagttgtatattgacactaagcgctttccactttgatacagggaaaattaaattttaaacaaactagccacacaccatgtacagtaatccacaggaacaaagagaaaacaagccaaccagcatatattcagcacatcacaacgagttgtcccggtagacatttcattcaccaggaccagatgctgaccttggaaaagtcaggtttacccagtctgaaaagcccttccgagggtgcacttttaaaaactgcaaactgtcgggaaccccagcagctgaaggaggtattcgcagccagccacccttgacattcacccggagcgccggcgcgggaggcagggtgggcgaaggaccccatcaggagaggctacccgacgaaggggccatccggagaggctaccgaagtatctatcaggcatgctcttagaaggagcaaacggacacacacaggttacctgttcctggcgggcagaggcttgattggagtaagctgtagaaaattggagaaagcccgggagtgtataaatagcaaaggcctcccagttggcgacaaagttatgcaacctcgttttttcagaagcgctttcccacttcaccagacacaaaactttagtctctccagtcttctttttttttcaaacaaacaaacaacaagggttgacacttttgttgggtagtgtgtgcgagaaagatctgcagggttgcagcgatgtcccagagcggtcgctgccatccccgggcactgccgtggagctcagacggccgcagcccggctggcggctgctttcagccagcgcagcgacccgggcctgagcccccacttccagccgcccccacctctaacagggggacagtccgccttgaaaggggccagccgagccgcgtcaaggccatctggagccccggccggcatccaagccttccagcccaggggctccgggcgggggtggcttccagccctctgagccctggccacaggtgggcggcggcctggagggggaccgaggagcagagcacccccacccgcccagccccgggcaggcccggcaggcgcgctcctccactgacctgcgggcggcttgggggcggcgcggaacagctgcatctcgcgcccagctccagcccgcctgccctccatggcgccgactgcccggcccggccttcccgcggcgtccccgacagctcgctgcctcccggcctccccggccctccctgtgcgccgcgggcgccgttcccgcgacacccgacgccccggggcagcgccccgcgggctcacctgggggacagcggggagcggccgcagctccggtgtccgcggcgagggcgcagggcgagtcagcgagcgactccagcagcctcgagccccgctccgcccagagtcagacgggaggagagcgccccgtccgccgcccgcgcatcctcccgcccccgccgctttaactcgtgaccctactcccggctcgggttcccgccgcgccctgtcgggggccgcttttcaggagcacaggtgggacgcaggaggccgtccggaggaagccggcgttgtgcccgttccctgccacccccaccctatcactcccttcattttctccctgagcaacccgcaccgccctgctcgggtttgccaggtttgctccggagctgccgccggcgccggggggccaccccctcctggccaaggcccctcaggtggttgccgggctccgcgggtgcgggatctatagcgcctagctccggtgagtgtgaggccccgctgcagcctcccattctgatttttgcatacaaggtgaaatcttgaatgtcttagcgtttcaagcctgaaccttgttccctccctgggtcttctagtttcagacaagtgctgtgaaatgagtggacagtcgactagactcttctgtagattggcggctggggcagaaagagccctgggaaacttttccaagaaatgtaaatagaaatacctgaagtagactttgaaccgtaatctttttcttcataaattatctgtaaatattaaacctaataccccttatcaggattggatcaggaactttggttaattttaattataattactttggatgtgttctgatttttaatttttacttattttttttttttggccacgggtaaatttgtaaaggtcactgaatttccctactagggtattcctgaaattagatcgatacctagcaaaccttttataaaacctgttttcaaatcctaaaccagtatgcatggattactaataaatttttgcaacagggtacaagaattttatgctgttcctcaacctggatcccacatactgtgaacaaggtagatacccagaaaggatataattggcacagtcaattctcaagtgcaatttggaaaatataatgtaatctttaatccccatatgcctacacacgatgtaacgctatctccttacttgatggtaagagtttgaaatgcttgattgttcaggaacaatctgaactttgaagaggttcacagtcataaatgatggcacttgcttaaccctcgttttagctgagttataaggaccggtgaatagataaagccaggttttggagtcagacagatgagggcccaaattcccttctgtgccacttattggtctctagggagttacttaccttctctgaaccccttttcttttttatgtgcaatctgtgaagttagccgagagaaaggacgagagagagagagagagagggagagagagaccgagagagaccgagacccaagttcaggcaagcctttattcaacctgccggctgctccattacagacagaggaggcagccctgagcttacaaaatgagggttttatgtgggggagagagaccctggagttgtttgttggttaactctgccacatatcaccttgtgacgtttatggtaccggagggtgtaggtaaagtttgtttatacttcccacgacctcccactgtgcagtccggatggtttgtaattgggtttgctttatagcagcaagacctgataggtaaaagtctcctggcttcaccgcggtgcctagataggggcttagaaatgtaaaaaggtttgggggaagaggaggggtggtacggagaggtttgcgggggtggggggcgggggtgttggcagtaccaagaagcttttttggggtagcttgtccctaacacaatctagctaataaaaggaatggtgatttttaattaatatgatacatgtaaagcacccattactatatgaggcatatgtgatgtgcttataaatgctgattcccccttttatttggaaaacttaatgaaaatatcaaccatgttcataaattacaagactcagtattattaagatgtcagttttcaccaagttcatttatagattcaacccaatctcaatgaaaattctagcaaactgttttgtagaaat

SEQ ID NO: 1259 - DNA, 4001 bp, Homo sapiens
actgggaagattaaatctttaattaaagattaacgattgttatagaatcttaaaaaaccaactgcagccggtggcctgtgcctgtagtcccagctattccggagggctgaggcaggaggatccctagagtccaggagtttcaggctgtagtgtgcaatgatcacacctgtgaatagccactgcactgcagcctgagcacacagtgagacctcatctctttttttgagacaggctctcgcgctgtcgcctaagctagagtgcagtagctccatcccggcttgctgcagcctttacctcctgggatcaagcaatcctcccacctcagtctcttgggtagctgggactggaagctcgctctatgacactgatttttttattttttgcagagatggggctcagtttgttgcctaggctggtgtcgaactccgagactcaagcaaacctgcccccttggcctcccaaagtgctgggattaaaggtgtgagccactgggcctggccgaaatcccatctattaaaaaaaaaatgtatgaggagagagaagactaaatctaaactgagatacagtaatacttaacaccaagaggttccaagtatctttgacagatactagttccacgtgccaacagcacagagctgcagcattttctccgggtgttgcttttaaactgtggttttcggccgggcacggtggctcacgcctgtaatcccaacactttcggaggccgaggtgggcggatcacctgaggtctggagttcgagaacagcctggccaacctggtgaaacctcatctctaataaaacacaaaattagccaggcgtggtggcgcacacctgtaatcccagcgacccgggaggctgaggcagaagaatcacttgaacccgtgaggcagaagttgcagtgagccaagatcgcgccactgcacgccagcctgggcaaaaagagcgaaactccactcaaaaaaaacaaaaacaaaacaaaaacacaaccaaaaaaacctgtggttttcaagctttaaggtatacaaaaatcactgggaggtgtgctcattaaaatatatttctctgagccccatctcgatactgtctgtaggtttcagtgtggccccaaaacgaacattttttctttttttttttttgagacggaatctccctctgtagcccaagctggagtgcagtggcgcgatctcgactcactgcaacccccgcccacggattcaagtgattctcctgcctcagcctcccgagtagctaggattacaggcatgcgccaccacacacatctaatatttttgtatttttactagagacggggtttcaccaggttggccaggttggtctcgaactcctgtcctcaggtagatccacccacctcggcctcctgaagtgctgggattacaggcgtgagccaccgcgccaagccaaaacaagcattttcaaacaagcactcaagtgcctctaaggtagactgtccgcagacctaaaaactaacttaaaaacttaagacacgtcaatgtcattctacccggttccctctctcccacctcctttctccaaattgcctcaacagtcctcaaatgttgtgtccagttaaactcaatccaactacgtcgactttaggtttgtcacctgttggccaaagttacttcacgtcaccccacctccacttttatcttccgcgagccctcatcccacaactcttcccctccccccgagcccttcttccgcctggcgcggccttccccacgccgcccgacccacctctcaagctcctcccgcccgctacccgcacaactggcggtacggccgcctgctcctcactctccagctcccgctcccggcaccccgccgacgaaggccaagagccacaccttacggcagctccatgagtcgctcccccgccgagcccgggtggggggaggggtggcagtcacagatcctagggcctcggcagcattttgaaatggcgagtaatgaagccgcaacttccggcctcccacacggcctcacacgagggcttccggtgaggcctccggaaaccatagatggagcaatgggaggactagagagctagaaaggctgagctcactaccatagagtagatcctagtccggggagagagtcgtggggcccgaacggttgaaagtcgtcagatttgaagagataataagtgagggacttgcagggtcttgtgatatttacagacgtgtattaggagatcagaaaacagagaagaggaagagctaaggtcataatcacaggctgccttcagctcttcggaaaaactacgcttcctctgccattccccagtcctcacccttactccccaagggtggtagggaagggaaacggagcgatggcggcactagggtggcaaggaagcttgaagccatgtcaaataaatagttgaaagcaccagccgctgtggctcacgcctgtaatcccagcactttgggaggcctaaggcaggcggatcacctgaggtcaggagttcgagaccagtctgaccaatatggtgaaaccctgtttctactaaaaatacaaaattagtcgggtgtggtggcgcatgcctgtaatcccagctactcaggagaatcgtttgaacttgggaggcggaggttgcagtgagccgagatagcgccattccagcctgggcaacaagagcgaaactcctcaaaaaaaaaaaaaaaaaagaaaaagaaatagttgaaggctcaagggagtttttaacctgcatataaacgagggaggccgggcgcagtggctctcccctgtaatcccagcgcactttgggaggccgaggcgggcggatcacctgaggtcagcagttcgagaccatcctgcccaacatggcgaaacccccgtttctactaaaaatacaaaaaattagcggggcatggtggcggtcacctgtaatcccagctacttaggaggccgaggcaggagaatcgtttgaacccgggtggcggaggttgcagtgagccgagatagcgccattgcactccagcctgggcgacaagagcgaaactgcatctcaaaaaaaaaaaaaaaaaaaaagagggaaagggttgagcatagaaattggaagctgtcttcaaataactgaatagtataatattggaaataacggagccttattctcttctccaaagtgcagaactaaaaccaatagaaattacaaggcagtatttttaagctcagaaaatcctctaacatttagagttgttctgaaataaatgaaattaggtatttgggggaagtaatgtcatttgaagacagcctgcctgagaggtttgttgaaagctcttctatattaggaaacattaaaactggctgtgtaacccaagaaagctccatctcagtgttctttgcacctgtcttttagcatttaccacgtattttttttttagttatttgtgtatataccattcttatctctcccaataagcaacaacaaaacctggctcccaatgctagatacagacccatgcaaaagaacacagggcagtaaccttccttaaatttgtacattccgctttgttctacttctagcataacctcctgcatagctgggagatccagggttccattaaggagctgaagaattaacttctttttcatagaaatctgcaaccacctcactcacaaaaaaaaaaaaaaaaaggtcaagggtgcttttttaggtgaaccactgtcaactatttcccctgtccttttgtgcaattagtattttttaaaactttcaacaggaattttttttttgtaacttttaaatagcatctggttagtttggatcctttcctaatgtctcctggagccttggaatatgatctgttcatgcaattcagtttgtgtgagatcaacaggtatttgttgaggccaggtgcagtggctcacacctgtaatcccaaccctttgggaggccaaggtgggaggatcgtttaagcccaggagttcaagaccagcctgggcaagaaagcgagaacaccatctctacaaaaa

SEQ ID NO: 1260 - DNA, 4001 bp, Homo sapiens
agtctgaggctgcagtgagctaagttcgtgctactgcactccagcctggacaacagcgtgagaccctgtctcttagaaaaaagaaaagtggccaggcgtggtggctcacacctgtaatcccaacactttgggaggccaaggcagcagatcacctgaggtcaggagttcgagaccagccaggccaacatggagaaacctcgtctctactaaaaataaaaaaattagccaggcatggtggcacgcacctgtaatcccagctactcaggaggaaaaagaaaaaaagaaaagaaaaatactgtgagggtagaactcatgactgattaaaatgtgtaaaaaatttaatagaatgctattgtataaagatactgtatttaagcctcacacaaccctgtgccataggcccaactttcgctattttacagatgtgagccttgtctaagattattcggtgaggcagtgcctgagccagagtccaagagttcaagtccagatcacaccactactttactactgcctccagcaaagttgccactaagagcatacagtcctaaaaacaaacgttactagggcacaataggaacactacaggctttcgacactcacttttggttggtcagataccgatcccagccacgaataatattgccatacatctgagtgtcttccaggtagcttccctcaaaagcatagatctgtcgctccaaatttgccaatgtttcctgagagatgaaaaacaaggacatgaatgataccttttaaatgcaaacacttaagtctggccaaaatgaaatcctgatattagactcgtaaacgcaagcttgcccacactaaaccaccctgtggagagatggaagatacggggaggaggagccgtttaggactaagacagtctagacctttgggggtgatggacccctgaatgtataaagcatgtctccagaaaaatacacacacacgcgaaattttgcatatactttagaggattcacggaaaccatgagtcaagagcccaggctaacgcagaacttgggcgatgtccactcccacgcacaaaaggtatcgctaccaggagagggaaaggtgagcagcctttcagcgtcaactcgctcccctccccgcaggctcaagagaggccgccgacaccgggctgccagttgctatggaaacctagaagggcagcttcaggtgagaggggcctcccgggtgcccaagccgagacgcgggggcaggaagagcttagccaccagagtgcattgggccttgggtgcctgtcacaattctgaattctccggaatgtgttcttctccctcgcctgtcaccttctagatgttcccaaacacatcacaaccctgtctatcaaaaacctccattcaacggatctactcccagtaccaaaaagaacacgctccccaccagcctccaaagtccagacggggtgactgggtccccctcccacactagcctccttccccaccccctccccgcaaagatcacggactagcccgcctcgcccacccccgcggctcactgacgctcgcccttcctagcgccctctccccgggccccggcaccgtcctccctccacgccccctcctgcggctgccgcttcccctccccctcccgcgctcccggctctctcccggctccggattcgcacagccgggaagctgaaccgccggcgggccgcagaatgcgcacccggcctcaggccgccgagcacccggcccgccgcgccgcgcccccggagtaacaaacggcctagcgcggccgggcttggggcctggaggcggggcgggcgcggagccccatgccgtgcaacccctgtcctagcccctcaccgccagctcctgcttccgcttcacgagctccgccagctcccgccgggtgtccgggatctgcggcggcgccgccttgttgtgcatcgccatgttgggctgaggcgggcggcggcggcgcgaggttgggggcggtccctgcgccgccagggggcgcccccccgctctgcgcctgcgcgcgcggcttccggagacgcgtgcagcgccgtgccgagcttcgctaaggccggggctctcgaaggtccttctcggagagctctagagatgcggcttctgctttctgccgtttcctgcccctcggctggccgccggctttacagacgccacaaatccaccgcgtccaaagcctagctcgtcctcaggcctccgagtctcctgtgcgccccgcttcagtccacttcagtgaatgactttcactatccaccgaattgcctgcgtcagaaacgcggttttcctcactctgcacctggagtaaaacgcgatcccaggtcaagctctatggactcgactccggaagagctcgcgaatccatttgcttgtgcctgcgccttctgccacctcactagttcattcaggccctccctgtttggggctacattattccagcggcttatttccacctttagccccacttaatccactatccacagtggtgccaggatcttccagaaacaaatgttatcactccccggtttaaagtctttcagtggcttcccattttcccagtgccctttggagaaacaagtatgtgtagtggttaagggcacaaaactggagcgagaactaccttgttcaaaatcctatcgctacatcgataaagtgtgctcctttgggcaaataaccaaatctcaactccctcatctgtaaaatacaagcagtaatagaatctacctaatacatttgctgtgaggagtaaatcacctaatatgtgtaaggggtttggcaggcgccaatgactgtgcaagtacgagttcgcttttatcgttaagtccaaggtgtaaacgttgttttcacttggcccctgtggatttctccgtcctcagctctccatctttcactgttctgcagtttcgctatcataagtctaagtgggatattttttcttccttttgttttgtttcttgcttggaagtctttggatttctataatatgtgggttggtatcttccaccagttttgggaaatcgcagtcatttttcttcagatgcctgtctcatttctctctccttctggaactcgaacataagaagctttttaacctaccgtctatattttccatctttttgtccctctgtgctgcattctgaataactggtttcgtgtgcggatcttgtaacctgccatcttgctgaactcccttactaattttagggggggttgtatagattccttggaatttttacatagataataatttcatctgcaaataaatagggagtttttttttttctaagctgagtgctttttctttttcttccttattgtgcagatttccagtagtctgttaaataaaagtgataacattagacatccttgccttgttccctgttttaaggggaatgcaggccgggcgcggtggctcacgcctgtaatcccagcactttgggaggccgaggcgggtgaatcacaaggtcgggagatcaagaccatcctggctaacacagtgaaacctcgtctttattaaaaaatacaaaaaaaattagccgggcgtggtggtgggcgcctgtagtcgcagctactcggaaggctgaggcaggagaatggcgtgaacccgggaggcggagcttgcagtgagccaagatcccgccactgcactccagcctgggcaagagcgagactccgtctcaaaaaaaaaaagggggggtggcgaatgcattcagtctctcaccattaagtatgacattagttgtgggagttttgtagatgctgtttttcaaggtgaggaagtacctctatattcctagtgtaaaccaaaaaacaaacaagtaaaaaaacttttaagccactgggtgcggtggctaaatcccaccactttgggaggccgaggcgggcggatcacgaggtcaggagttcaagaccagcctgaccaacatggtgaaaccccatctctactaaaaatacaaaaaattagccaggtgtggtggtgtgcgcctataatcccgtctac

SEQ ID NO: 1261 - DNA, 4001 bp, Homo sapiens
cattcctggaaatggaggagtgttcatcagagctgtaccagttccttacaacgcagtccttagtgagatgtcttccctgacacaatgctttattacctacgatcaacatacaatttggagtttactgactgatgtgtcttcttgacattcttttcgtttctataatgcgggatgtggctaggctgattggatgaccttgaatttatctgaggcttatcctcaccacctgtcaaaacatctagcttgatttttttttttttttgagacagagtctcgctctgttgcccaggctggagtgcagtggcgcaatctcgactcactgcaacctccgcctcctgggttcaagcggttctcctgcctcagcctcctgagtagcagggattacaggtgcccaccaccaagcccggctaatttttttgtatttttagtagagatggggtttcgccacgttggccaggctggtctagaactcgtgacctcaggtgatccacccgcctcagtctccctaatgctgggattacaggcgtgagccaccgtgcccagctctagcctgaattttaaccattaaagtaataccacatttgcccatcctttggaaaataatcaaactatttgctgggaatcaaagagttaaaaagaaggtactgcacaagagtatgcaggtgttttttggtggagagcactacatagatcttaggtgattaccactatgaactttgtctgtactgtctccattttttaagatgatgaaaccgaggctcagagaacctcagtaacttgccaaatgcaaagctaggacaaggatttgaccccaagtattttgattcccagacctgtgcttttgctttagctccacttcagtggccccaatagcccttctgaatggctatttatgtgcagatttacaatggttggcaactgacatactatttttatcaaccacgtgcaaaaagcatgaattaagatccaacagaattttaggaggaggacaaagtcataaaagtaacgagaagttgaatgacttctctaagaccaaacagctactaagacgttgagcctgtatttgaccaaatatagatacttgggtctgtatggcaccaaagcagctctttttaaccaagccaagatgcatatacggtgcagtggagagaaacatgagtttggaatcagaagccatggattccagtctcctgttccaatcacttattagcggtatcactctgggcaagtcccttgccctctggaaacaatgatctatgacctactctttactgacacatgaagatccaaatggatgtaaaagtattctgaaaacttcttccaaataataataataatagtaagaactcacgcaggtcagtcagacataggttggaattctgaccctgtcacttactggctgtgtgaccttggacgagtgattttacctcttctgcctcagttttcatctgcaaaatggggataaatcaataactaccccaaaacattgttgtgacaattaaatgagagcatccatttaaacaagggattgcctgacacaatattcgatcaataaacatcagccattaataccctgataattgcctctcgggtcttcagctaccttcaagtacggtctttctgacctaccaaaaacgccctgggcttcggcttcggtttgctattctctgcccccttcctcggaccctgtccctctcttcccagtccgcagctcgtgttaaagccttccagaaaccccagtccccttccccggcttcggcgccgtctcttactcgacgaccttggctggatccccgtggtgcccatagacaagcgcccggacccgggcaggctcggcggatgcggagtaggaggaggcggcaggtccgtgacagccagaagctgggagcagcccccgccactgccgggcgggggttcgcacccgccacagggtactgcagacccacatgctcgctccaaccaacacagagcctgacgccccggctacgtcatcttccagcgaccgcgcgcctgcgccccgcccctgccccgccgggtgaccactcccccttggtccctttgaagggcgtttccttccttcgctgcccaagtggtggcgcctggctagactgcgtgtgggccccggagggatccgggggtgcggagcttgcgaggccgccaaagctgttgtctcaacaaggagagtctggggctagtccaaagtcgtgtctacagcctgcagtttggtgtttgatttggaggaaatatttactctccctggcctcagtttacccttcacataatatattgagtgctcaccgagccaggctctttaaggtattatctcatttaatcaccactaccatgtaacggcatagggaggcaaagcttacttccctacactgaggagagtacacgaaagctgctgtggaggcaggagtatggggcttggagttagaaaacttaggttcaaatcctagccctgccacttcctagcttggccaccttgggcaggtgaaactctgaatttttctcatcggtacaatggggataatatgcctccttccggattgttgtgaggattggatgaaataatagaggaatgctattgtgggtgggagaacgcattgtaaaaaactctgttcagatgtaagacaggaatcacaaggagaagggtcctctctcaaaatgctcacagtgtagaaagggattaagtggaacactggaaatgcctgtaaaaaggtgtagccctatgaaggatctagtctgatttttggtgtagggaagacatgaacattactaaaaccccagatcgagctgtggctcgtgccagagtgcaatgctgtagtctgaagagaagtgctctgggatggggtgggatggggtgggggctcttggaggaggtgctgttagagccagccctgtgattcaaaatcttctgtgtgcataaaaataatccgaggtcccatcttagacctactgaattagaatcttgcggatgggggttccaggaatctacatccttacaagctcccaagaatattctgatgcaggtgtcccaggaaacaggttttaagatactgagccagggctttgaaggataaggaagagttcctttcctggattttattgacttgaagcttgccatctccaagcctttcctctgaggaagagagcacagcaaagtactgtgagctagatttggacaaacctggctttatgtcctagctctgccattttccagccatttgatttcggacaagtcaccaggcctctctgtgtcttcactttcttactcttaaaatggaaggaatactagttatctgtttcaagattgttgtgagggtcaagtgagatattatccacttgaagcatttagtacaatgcttggcacatggaagcatttgataaatattatcgggggttattgtgattaaatgagaaatatcacacataaaaccctcagactagggtctggcttatagtatgtgctcactaaatgtctgtacttgtttttattattagagaaagttggtgtcccatggtgggggaaaggcttggccccacatttatgtgccagcacacacacgatgaccagtcctgcttacccttttccccagtgacacataggcttacttgaactgggaagtacaacgtaaccttctgttgtaagactccctaggtgacattgagatgtcgacattctcttcttcaccaaattggctcctctgaatttctggggagcccagtcaggaagcctgaagaatcatccagcaagtcctcctccttggggctggactttagcctcctgtgcatcccaatagccctcacttttagtctaggccatctgggttcttgcaggggcatagtttgagaactactgactgaggggttcaagtccaatttcctggacttgcattcaagattctttgcactctgactcccacactgcatttccagcttcatcttctcctgttggaccgtgcatagcctgtgatccagctgcatctgatacccgtctt

SEQ ID NO: 1262 - DNA, 4001 bp, Homo sapiens
gccaggatggtctccatctcctgacctcgtgatccgcccacctcggcctcccaaagtgctgggattatacgcgtgagccaccatgcccagccaagatggcaaatttagtatgtttagtgcatataaaactataatttaaagtaacagttaaaaacatagctgggtgccagaaactgtgcaggctgcttttgtgttaagtctctcatcttaagggaagctgaacagagaagaggaaaacaggtaatccaagttccctagttcacttaccctgcaacaggtactccatcatgttaatggtgcccccagtgacaggcatcatggtgactggaggtgcctccatggtgtctaagttgaagacaacacaactggactcagagcccccagtcaggtaaggcacgggatatacctggaaaagagttcacttgtttatacatcaaagtggtggagagagaccagatctgttgtggcactggccttcaaatcaaagattcattcattcaaaaacgtttgagtatttccttatatggccagttccaggaactgatgacacagaaatatagaaaggagatctggtcatggagttacagcattaccttctagtctcaagttctgaaacctccacattacctgtgcaatcttgagaaagtcctatctataacccctcaccctgggactcaatgtcttccttataaaatgaggccagtgatttttttttttttttttttttgagacggagtttcactcttgtcgcccaggctggagtgcaatggcgcaatctctgttcactgcagcctctgcctcccaggttcaagcgattctcctgtctcagcctcccgagtagctgggattacaggcgcccgcaaccaagcccagctaattttttttgtatttttagtagagacggggtttcgtcatgttggccaggttggcctcgaactcctggcctcaggtgatactcaggtgatccggcctcccaaagtgctggcattacaggtgtgagccaccgtgcccggccaaaggccagtgatttttaactcccaaggctatgtggctcaaacgagataataaagaggcaacaaaattcagaagaactgaaaaagtgacttaagggaccttcgttttatagatgaggatattgagacttggagagggacagaaggatacacacagcaagttggtagcagagtttggaccaaactaacatctaggcgttctatctctctgaaaatgccttcccccgtacgcttttcttttttggtgacaggatctcgctctgtagcccaggctgcagtgcagtggggagttcctagctcactataacctcgaactcctgggctcaagccgagtagctgggactactacaggcgggagaccacactgcggctagcctaaaaatgccttttaaagagagccaaggccgggcgcggtggctcacgcctgtaatctcagtactttgggaggccgaggccggcggatcaactggaggttgggagttcgagaccagcctgaccaacatgaagaaaccccgactctactaaaaatacaaaaaattagccaggcctggtggcgagcgcctgtaatcccagctcctcaggaggctgaggcaggagaatcgcttgaacccggaaggcgaggttgcggtgagccgagatcgcgccattgcactccagcctgggcaacaagagcgaaactccgtctcaaaaaaaaaaaaaaaaaaaaaaagagagagagagccaaggggaagttattttaagatgatggtatataggtccttctaagccggcatccataacacgtatccaattaaacactagaagcacacctccttgaggctgtagtgtcttctcgagaagccgggaattatatccacccgcgcacctaggagcttttgagcgacgattagataccagcactccggttacccgagcccgggaagcccccagatcggtgcaaccagccaacttcctcctcttctcacttccggtcggaagccgacgtctcacaaacctcgaaactgccgttcccaaacgtatgggtgccgagaaggccgaagagcttcattgcggacagacaatcagaggcgcatgcgcaaaattccgggctgctgtatgaaagatggcggcctcctttggcgctttcctccgggcgctacctggatccttgacgtcataggccatgctctaggaaaatctttttaggtttgacaacctggagatgtatttgtgtagaaagtctcttggaactgataggacttacagagattatagtgggtttcaaaagaaaaaagaactgaggggttgggcgcggtggctcacgcctgtaaccccagcactttgggaggccgaggcaggcggatcacttgaggtcaggagttcgagaccagcctggccaagatggtaaaactccgtctccattaaaaatacaaaaattagccgggcatggtgacgcgcgcctgtaatcccagctactagggaggctgaggtgggagaatcgcttgaacgcgggaggcggaagttgcagcgaaccgagatcgcgccactgcattgtagcctgggctacagagagagactctgtctcaaaaaaaaaaaagagtctggaaaaggagtaggtccagatccaggagtactctgcagtgccataccaaagaatacatgtgagctttaaaagaaccctggctacaacatggagaaaagtttgggaaaggagagagcctagagaaaaaagaccaggccggacacggtggctcaggcctgtaatcccagcactttgggaggccaaggcgggcagatggcttgagttcaggaattcaagaccagcctgaacaacatggtgaaaccctgtgtctacaaaaaatacaaaaaattagctgaacgtagtggctcgcacctgcagtcccagctacttgggaggctgaggtgggaggattgcttgagtccaggaggcagaggttgcagtgagctgagatagcgccactgcactccagcctgtgcaacagagggagatcctgtctggaaaaaaattaaagaaaaacgaccagttaggcgctttggtacaactccagctgagaaacaaatgtcagaaaaagattttaaaaatgtaaaaagaggacaggcgcggtggctcacgcctgtaatcccagcactttgggaggccgaggggggtggatcacgaggtcaggagatcgagaccatcctggctaacggtgaaaccctgtctctactaaaaatacagaaaattagctgggcgtagtggcgggcgcctgtagtcccagctacttgggaggctgagtcaggagaatggtgtgaacctgggagacagagctggcagtgagccgagatcgcaccactgcactttagcctgggcgacagagcaagactccggctcaaaaaaaaaagtaaaaagaggaaattagccgggtgtggtggcacacgcctgtagtcccagctactcaggtggctcaggtggtcaagagaccaaaattgcttgaacccaggaggcagaggttgtagtgagctgaaattgcaccactgctctccagcctgggctacagagcaagactctgtcctctatatatatatggaaaataattctttaatgactaaccagaggtaaagacagagatgaaggagtcacagatgtcttgggtggctatcgtagcactttttttctctaagctaggaaacacagagcagtgtgggtgagacaggaaagatgagttcatatgtagacccactgagcatcaggtgtctgtgggacacccaaatggcaaagttcaggggagagaaatgggctacagatagagatttcaaaaccatagcctcatagatggtagctaaaagccatgacattgaatgagatcatcgtgaaagagtgtactaagtaggaaaagaagattgacaaggattgcgtatgccctagggtttaggatgtgcctcctgatcaacctggtgattcacaagattgggcagagtgaccagctctcaagtgctgtaatgattaga

SEQ ID NO: 1263 - DNA, 4001 bp, Homo sapiens
atgaaagagggacatagtttcagtttatgaaacagacgtagaaaaaacccagttcattgtttgaatggggtgaggaacagtggcaaaataggaaccagggctacactgttataactaaaacttcagaaaccgggtaaaagcctcctttccagcctggaaataagatccacacttcagagtaggttggctctaaaagactcagccacatctgtggcaagagatccagcacgaatagagctgtagtgggaggacctcctcaccagagaagtcaaagggtaagaattgaaagctagaaagaacttgggttaggaaactgagcatttctctacttccttgccatggaatccacttgctaaatgttaggaaacccagctctttccaaatcaaaagatgtttgcaaactgataaatggttacatcattagaaatgtcctattcatcaggaggctaggcccccccacccataagcccttcctagcttgccctggtaactcttaccaggtcagccggccatactcgttctccaacttgcaaatgaaactccccagagagttcttcagatcagccacttgactcagcagtgcatctaatgatgcctcaagctgcttctcctctctctgcaccaataggaacaggttggtcacccagataaacgagtatgacacatagaaaggagggctggaaagccaaggagatggtgtgcaacaccagtcaggtaacacaggatctcattggcataggatagccaggttgttttctatctttggtatttgggttatagacagcatcaaccctgagaccttccaacctgtttgcctgaccccaagtccttccaccaactgattccttttccccatcacctcctaatctatgcctggtttttctctgtgttaggtacaccctacactccctcactgagacattttcgacagacctaatgccaggagatcattctctcatgtgcacctctgtagcacatgcactccagcttcctccatcctagcatctgtgagcctggctgtcttgtcagtctctgggaaatctgcctactcatgaagacttctctgaacaccagtcctgctctcccctttccctcccccaaccaacgactccagctttccatctgctctcatcattttgtttcaaccttctccttgctgaattaatatgcaatcatctatctctgtgtcaatattcccgtgcctctttcacaagctcagtcaacccattaacatttattgagactaccagctgcaagaaactaagtgacaaatgaaaaacaaaaaccacacatgcttctaagcactggacaaacaaattaaaatgctgggggtctgcaaagcatttccttcccatcggtggtctcctgttttactccatttcttcacccttaacaactatagggcacaggctgggaagagggatgcaaaactgtcttgcaaacctgcctgacagaaacttgatcccgggttccaccatggcctctgattataagctgcttagctttcagccatcgcggcccacaattccctcactgcttgggcttctttccaattagatcccctgctatatcggcaaccaacagcctccatccagcagcttaggacagggcctgagccaacccaccaccttcttgagccgtcttccttggactgcatctcagcctccccgtattacaacctaatcctttcccacgccaagcaaacaggtgctgcctcctccctccggatttagcccgactgtctcctgtcaggcaagctccacccccacctctaatcgccgccgctcccgctccaattagcctcgccccccagcccacattcccttatcagccgtgggttctgccctctcttctcagtcccaactcttcattctccttagccagcccactctcggtccctgtacccgaagcttgccagccgctagtacgcccaacgcaactctcacctgcattgcggcggccgaggcggctgccacgatttcacttccggttttccagtcagcaaacgcctacgagaaggcttcgtccaccaatcagaaaactggaactcggccctcccaccaacttccggttcctgctgggtgccgaggtagcgaggtcaggggtcaagagtggaacaccctcactggcccgggccggcgcgggagggctgtgtgatggcctcggagcgcccggagccggaggtgaggggcgggcgggcgcagcactgggccccgagatccgagggggagggtccggcgggcaggcgtggcgttggcctcctctaggtctgggggtggccgggctgcgtagcctcggcagggaccagcccagcccggaaggcccgactatggtacccctgcggactgtgtatgggacgcggtccgcagtttcctcggggagctaaaggagtaactgttcgctttgttttgtttactgacatgtcacccgcgtcgtcgtctctaagacttatagcggtgttaacaaaacttgtattttgactttctgttgcagtttcaatgggcaacacggcagtagatttactttgctggtttttgcatttctttaggcattggaataccataaacagcatgaatttatttagttctagggctcatgcttttagaaaagcagctttaatttcatgaaaaaaacatttgagtcggactgagacctcgttccaatattggcgctgtcatgtagctaatctgtgcaacctcaggcgagtcttcccggatcctgtttccttctttataaaatatctgtcttatagtgtgttgtgagaatcacatgtaataaaccagaaaggtgatatgatatattcgttaaatgctaaggaacatgcaaggaaccttatatatgttgtgtcattcagacttgtgcaaggaaggtggcattctcacagaggagaaaactgaaaaatgagaaagatttagtaccttactcaaatgccactcatccaggaactagcagtttggagttagaagatctgagcttaaaatctcagattcggataaaacaccaccaccaggaaaggtgccaacatatcagtaggtgggaagggtgagagatgtgtataatgatagaaatagtattcattactgcatacatactgcatgctcagtaccattctaagctctttaccaatatcagttaatcctcagccctatgaagtggacactgtatcatctcctttttttagtttaggaactgaggcacagagatattaagagtaacaaagtaagccgggcgcagtggcttacacctgtaatcccaacactgggaggccgaggtgggcagatcacctgaggtgaggagttcgagaccagcctgaccaacatggagaaagcctgtctgtactgaaaatgcaaaattagccaagcatggtggcgcaggcctgtaatctcagctactcgggaggctgaggcaggagaatcgcttgaacccgggaggtggaggttgcgatgagctgagatcatgccattgcacttcagcctgggcaacaagagtgaaactccgtctcaaaaaaaaaaaaaagtaacaaagttacacagctattaagtattagagtcaggactccaaaacagatggccaggctccagtccttgtgttcttaaccatattgttcatggtataagtaataaagtagccacagaatggtaaatctccagttcactgggatttggtgtggtaagacccaacattgaatatggtggtaggaaactatgccttatttaaaatagtcatgttcacagaggtggtagaatagctcatgcatcagaaatatcaatcaagatcaatcagaaatattaacacaagaaaaactatgaaacagtttagaggatgtttcattatagattaaagtgaaaggaggtggagggatgttgtggggaaatgcaacataccttttaggcagatagtctaggacaacaccgtcctgtagaaatctaaagcaagccacatgtgtaatattaaattttctgatagccacataaaaaaatgaaacaaggccgggcgcggtg

SEQ ID NO: 1264 - DNA, 4001 bp, Homo sapiens
ccactcccacaatagtcctaccccacccccatctcctgcccaacacactgggaaaccacaggaaggaaattcattcccaggcagggccgtgggagctgggacagccagactaagtcctggggcgggtgtgaccccgtggccacaagcgggtggacatctgtgaacactgacatgtgccttttcaatgctctcctcagctactgagaccttcctgttggggttgggagaggagtgggaggtggacagctcccaaacgccaaaacacccaatctcaggctgacctgcgctcccctcctatctccaggccagagcagcccaaggtcaccgccccagacggcaaacttcccatagtctaggctggaccctgaattgctgcggagacccactgaagggataggaggaggagtggataagggccacctccaccccaaagcaaagaaaccaggactctgaggaaaactcaaatgggggttgggcacagcaaagagggacacaggatcccccccaacccgctataccctcccccaacccatcaacaatgcaccaagcaatgggaggcagagggaggctcccattcagaagggcaaacctgggataacccggtcggtggcttctagagtgccttcctttcaggaggagtcctcggaaggctgctgagaggacagcgtgattcactagggggagggggcccctttccccatccccctaagacccgaacctggtaggagagaagctggcattggagtgggggactaaaagcattttggtctccttggcccatcctcccaaaagcccccccaaactccctaaacccccgctcgcagcccagctccgcctgccataggtggaaaggactagagaactcttgcccagatgttgaacagctgcaaacttctggccagggagttctccagttggggttactgacaaaccacatcaggggtctcggaagcggggctaggaggtctcaaggaagggtcctgcgtgcccacctcgtggcgactccgcgtcccaactccacaggcacccggcaaacacgggccccggagacacacacactcacacaccccaacccactaccccggtgtcatctgaacaacatcccccctccctcccccgcttcccaaacagctgcggctccccccgcctccaccctcccgccgccctcccaggcccccttctgcaccatttcgggccaaggaggagggaacaggcggcgagaggagggagagggagggagggccggctgttaaaatgtcagtcgctcccgactgtcaccggagaccccctcggaggatggcgccccgtcccagaccgctcggaggccgtcgtaaaccccctacacgaacaggcgggcgcgcccccaatccgcccgtccccaccccgtactcccaacacccaagggaattgcagcccactccacttgtcccccacgacagactccctgacacaaacagtcccctaggtaatccccgccaacgccacacgaaaacacggcccgcttcgcgagttcctcccggcccgggggctgccccatcccacccctcagggggacggtctagaccaccctccaccccaacccctggaccgggtgggggagggggcctcttaaagtggcaggcgcattatttttctctactcaccagcccggctgggggaacggtgttgtcacggcaaagagcgggtagccctcgcccctggtccgggggatcttcaacaccgggaagccgcagctccgggcggggagaataataaatgaggccggcgtccgcgcgggccctgggcggcgccgtgaggcctgggcccccgtcgtgggcgcgggggccagcaggcgggcggcaggcaagcggggaaccggggccgagcgcctgagccgcctcggctgttgttgatattttgcttccttcctcctttcgggctccaaaggtaactcctccagcccccgggagtcgaggccgacgtaggcacagctcagcctagcttgaggggtggggggaaaggggtgacggacaggcgtgggggccaatgggaggcacctgtgggggtggcggggcggagccggggctggggcggtcccgaggacgcggccccgcccctcgcttccccagggctggccgggccaggccgggtcggcccccaccccaccgccctcccaagctaggctgcggcgctgggagcggcggatccctccgcctgccgggagggagggaggaagggacgaagcgaggcaaagtagggaggcgagacccagaggcctttaaagggatcggtccgctcccacggtgcccctcggagcacgccggccgcccgcccgcccgcctggcgctgctgccaccgcgtgctccaggaggtcctttccggggaggccgtgcgagctgcacgcacactctcaacacgcgccacctcggcacctcctcgcggccccgggccccaggagagttgggaggtgggagtctaagtagataaattaaggggagactggaagtggtgaaaagctcccatctcccccacttggtgtgtgacaaagccccactcacgggcgacattcttggggttggggggtgttacctagggagctcagttgctccctctacctgtgacaggccccctccggtcccagggcccggctcggcagacgcccagcaatttaaagcgacagctcatagttcttgggtgacctaatctccagtgcttgcggggccccacagcacttactgccgagggggcaatttaaaggggcgggaccctaattcctccccacctcccgccgcacagtaaacacccagaaatgtcttattaaagaagcagtagtagctctttaaaattttttatttttatattcctggttgctccagggtgtggtgaatatttacgtgccctacaacaggagtgtgggtgccatgcctactggacaactgacccgtcaggcttcagcatccctgttacttccaagtcctgctgctttctcccaagagcgtaaggaaatgatggcatctggcttagatctcaaagaaccttgcagaacagaagggcactcactcagttcttcacacaccccgaatttttttttttttttttttgagacggagtctttcttcgtcgcccaggctggagtgcagtggcgcgatcttggctcactgcaacttccgcctcccaggttcaagcgattctcctgcctcgcctcccctcccgcctcccgaatagctgggacgacaggcgcacgcccccacgcccggctaattttttgtgttttagtggagatgggatttcaccgtgttacccaggctggtctcgaactcctgagctcaagcaatccgcccgcctcggccttccaaagtgctaggattacaggcgtgagccaccgcgcccagacacacaccctgatttctggctggatctgatttaccggacaaagactccaatatatagagagaggcaacatgtcattgtggttagaaatgtcaactttgccgtcaagctgtcctggttcagatcctcactccaccattcattagctgtgaacacaggcatattatttaactttcccctacctcatggtgaccatgactagagatggtgataatagtagctaactcagaaatttagtgtgaagattaaattagttcttctaagcagattgcttagtacagtgtcttatgctgtataataacccaaaccagaccattgggccaagggctggtctgcaaagaaccctctaggcctccattggctcatgcaagccttaaaggaggtgagttcagtggaattgctctgcaaataggttggagacttatcttgtgtgtcctaagacaggaagccagcaagctcctacttccttggcctcagtttccaacccttctacctgacccccccctttcaggaaacagtgtcccaccgtgtccccaaatacagcttctcagttcctcattggatctgggaggctggggccccaacaccagaagatgtgagttacccctgccaggcagggctagtttgcccaa

SEQ ID NO: 1265 - DNA, 4001 bp, Homo sapiens
tgatgtgcaaaatgtaccgtaaaggaggactggtttggagggggcatgggagaagaaacaggtccctgcctcccccaatgcaacacctctgggtacctgagcaatattcaaaccattctcgggtttcagaatgatgctatctcagttcctgtgtgaaggtggcctggggccagtggggagagcggtgaaggggagaggtcagggtagcctccttgcagctgcagcagggctgagcagggctgtccttcccatggagctgcaggggaattcctttccgatagccagcctctatcctctctttcttgctcttggcaggggagtacctacctgtccttctcccctacacccttccacccatatctgttcccatcctagtggtcccaaggctcaaagaaactacagggcatctgcttccagagctcccataccagcacaggtcaaaagggagcagatgcccagagaagctgagtgagcagcctcgcatcacagagcagtgggcctcaacctgctcttcctcatggtgagaaagggagctctcattaggcaggcccttcatctcttcctcccaggctgctccgggctgcaggctgaggactggaggggaaggcaggaggcgctggagacagctgtcatccctcctcccgccccttccctgtggctgggctgcagggcatgaaataagcagcaggcgctgggggagggggtgacaatccaatccacctgtcacccccacagtcaggcagcctcaagcagcctgctcactaacgagggaggaggcgtgggtgaggcagacacagaagagggtggcagaggggggacagacacacagacacaggaaagatgacagagaaaaagaggcagcgaggccagaaggcattatggggcagaggcagagacagataaggagagggctagaggagagggagaggcaggagaccacagagacaaagattcagagagaagcaggtagagaacaagagacaggttcaacaacggcttccaggactgactcctggcccagcgctgggggaataactcaacaggacaccatccctgccctctgagaacttgcagtgcagccaagagacagacaagggaggggcaggtcccacccagggcaagggcagggagaggcaagggggcccttgggggcctggactggacccagacacagccccagaaggagcatcccagagcaggcaggccggccctgagaggcagcagaggtgaggaccgaggaccaaggacgacagctgcccagctgaatccccaggccctgccttattacccagtctaccctcaggttcacaaccttcctagtcattctctcttccaacttcagccctgggacctcctccctagtacagagacacaggctaaggagctctgggagacagggcaggaaggtgaagccggtgatgcccccaaacacccaggcaagatggtccaggatcattctgtggttcacacagtgagctcttccttcacaaaagaagtggggggcattacccctccgaagtctgagccaaggcaggagcctcacattgtccctctccccatcccacacacagcccaattctcacaacccctcctgcgaggcctgctccccacgcccctactcctgggcccctctcgggtctccttctcatgctccgttccctctgccccctctctgtccccgccccctcccacagcagcctcttttcttcaccccagaagtgcttctagggtctgatctcaaaggcagagacccagccccaacccttcaaagttctgtctggcaggctcactacccaaatccctggttcccaccgtctttccctccctcggggactcccctcccccagtccagcagcctcagggctgggcaggggctatttttagcctgggcactgagctaattttaactcaccgactggggacctgggggcgggctgttggtttgtgggggcaggcagtccaggaaagctgggcctagggcaggggtggtctcaggccccaggcaccctaagaactcaaatggggggcaggccctgcagtctcagcttaagggacaggaaccgacttgccaaggggagcacacggtatggagagcagggctgagccctccccctagcttccgctggacaactctcccgagccccaccctagccttcccgccctcttctccctggcaagtctcctgggatggggtcatcctgttctctgcccaggagatgcctctccagtgagggtctgtctcctgagcctcctccatgtcttcctcaccccagcttgttcttcctgtagtctagctctcatccttcctgtagcagctgtgaggccatttggctctctacaaggcagcagcctgtccgccagggtccagcacttcccactgcagctctgaccttccccttatggcctctgggctggctcctaggtaaccaccccgcacccccacaaaacaagctcctagagctagccagactgttctcagaagtatttgggggcaacaggagattgagtcccagtagagaagggatgggtgaggtagggcaatgaacagcttagggaaatatggggtctctaagctgggattctggatacctgggttctagtccctgctctggtctaagatgtgatcctgagtaagtcactgccttctacaggcttcaccccactggccagtattatgggtagctgggtggactaggtacccaaatgcccttctggcccaaacacatggctcctgtgctctctggggaggcccaaagggaagggagatcagaattgtgtaagtcacggagaggaactgaagagatggcctggctgggtctgtcatcctcctgctggggaggaaaggcaatgagggcgctagaagacagtcaggatggggctggtgaaggggcaggtgccttctaaacagtaaccccccaacagatggccaagggttcacaaaggctctggtcagccagaacaagtaccaagtggggcacacaaggcccttgtggcagaggctcagtcatcccaatcccctcacacactgggaatgcctatcagacccacctgcttgtggttactgagcagcaactagcccaaggtcactgtttggtccctggtgggaccagctctagaacccaagcctaaggctgtcttcatactccatcccagcaggccgagctgcaatgactcaccaccactcatttgcatgaggatttgcatagcgtctctgaccttattccttcaggctcaacttcccattccaggacctgggtcacccccacccaggatccgtaggcacttgcggacaccaagtggagttcttggcacctcaggcctttgttcccatctttcccctccagaaagcattcttggatttatagtaactcccagtgatacagtatagagctctcagtccaactgggtcccctactcttgtctaggcagagatggggaaggggtgtgaaatcacgaggaataagcaagcatggcagctacaggagtttggtaagattcacagggtgaagtgtggctctgtcactgccttggggcgtcacaggagaagaatcccattcccctctttagtgctaaggttggggcggcagcagcaggagggaggtgagctgtcctttacttccatttctagctccatttccaaaacgcatccacagtgcagggtgggagtaaatggcccaggacagcaggtaggacagatataagactacagaaagaacttctcagggctgagtccttggactcaaagtagtctctggggctcaaacttgctttgtcagaagccctccaaccaagcatgcgaggctggtgacacgtgggagggcatggaggccccagcattgtatgccaaccaatgggagctgcagacaaccaatctcctacctacctttaagtctgacctacatttgtccagagtatctacacctctcccatatcttctgaaacaatgaagcccagcagtggtctccaatcctaggaagtccttcctgctatctaacggccat

SEQ ID NO: 1266 - DNA, 4001 bp, Homo sapiens
gcctgcagccaagaagataaaccaggggcacaggcccccagcgcagccaccgccacttactgcagccagggaggctccccaggagaagagcaggatgtgaaggacagagaagggagaggaggggaggcttggagaaaggatgagcaaagagagccaactctgctgcaacccatttccaccacttcaaacagctttgccccagggtcacgaaggacctcccgagcccaggtgcagaggcaggacacaggaagcagaccctccactcctcccctggagaccccagcaagtctgagtccggcagcgggcccaggaaggtcgctgacggtttccacagtgcactggtggcagaggcccctcgcaagagcagggacatccgagcagagacagcgggacatccacctccgccaagcagcagcccacccctgggactctggggagcctatgcccctggaagcccctggctggtcctgggaggaggtggctggctgagcagcgaaggccactgttgtgtcccttctgagcctgcagctctcctcggacaaaggcattggaatcacaggaaagaggaatgtcccgccgtcatgtggagtcaggactagggccgttcacactgcggatgccaaggcccccaacccagggacagcatggctttgaaaaggcctccactttctggagtaaagccagacccagggtggggtcttgggagcttggaccccctcctcttcaccagctcgacgtggcagcttcttctgtcagtccccagccagctgcagcttggtcctgcaccgccaggtttgtggtgggccctagagcaccaggccctgctggggagtgctggacgggaacagcctgagggcccctctgtggcccctggacggggaggctgtcagacaggaggccttcacctggacctggccctcgcccacccacccctgccagcaaggccagggagtgctgggtgggggcgccagcgactcccctcctcctcctcctcctcctcctcctccactgccgcacgttttcctttgaggccaacacaaggattgatttgctgttcatgagagaccgctaaacggcccgttggggaatcatctttcaaaattaaattcatctcggctggcttcctgcccattctggcactcagttccttctccaacagcccaaagcacacatgtttaccacacagaccaactccattcagctcccccatctgggcactgctcgcccctgcgaaggcccccagaccccaggagacaggctttggagggaagcgggaacagacggcttcctctctgccttctcccagccgggctctggggccagaccctgcccggaaaggggcccagattcctcaccgcttccaagtacagtatctgcctgagcctgcaggacccacatcacggagcaaaagaaggggagagtgggagggggggaggggacacggcgaggggccctgccacagaagggccccagactcgaccctggagccctgtgtctcagccacctcctccccagttaacgcaaacagcccattgttctggagccccagggacaaagcctcggagctcggtccaccacgggcctccagaggccccggggtccctggacgaccggccgagccctcccagctcctgctactcacatgccgggctgcagcgggagcaggggccgcggcggaacgctggcgcccacgggcacggcggggagcagcagcagcaccaacgccaggaccaccgcgcgccccgctgccctcgcctcttcaaggaacgacatcgtgcgcgccggtgcctcctccgctctccggctcacaggcggccccggcggctccccggagcctccgcctccacgtgcgccataggacgcagccacaggtgcccgcgcccgctccgcggagcccaaggtcgctgcaggtgcggagcgtcccggcttcccgcccgcgcccaaagtggcaccgcggagacctgatcgccgggtccaccctgcaggaactcgccccggcgcgttgagcacagtgccccggactcagagcctggaaagccgccacgcccccggcccgcccccagcccggaccccagtcccgacccgccctggctcgcccgccccctgcgccctcggccccgccccttccccctccccatctcctaccccaccagcgccccgcccccggcacggcccctgtacttgcccgtatccctcaccccagcccggctcctgcttccagccccgcccctagccccctcccctctccggtcccggccccgcccacagccttcccgagtcccgccccagaccccgcggggctggcgcagcccctttgcgctccctgctcgtctcatgcggaaagtccaagtcctaaccgactccagtgaccaatccaggaggggccgggcgccagggggccacaccccgcaaaggcagctctctgggatcccggaccccagacctcgatctcaggagacagccctcagcctccctcacttctcaagtcccacggggaagccagcctcggcttgtcctgcccgtggacgctccgtccaccttcgccctgacacctcacccacttcccgcagggcaggggtcggggaagggcttgaggagggcgtggccagcctctgcagcccgcgtgcaccctggacacccctgcttcggggacctgcattgttggttcccaaccaccttctgggcatccccgttcctctttctgtgctgcatgttcttggacagtggcctggagtgggtgggcgcggggtcccagcagccacagacaggaggaggcgctaatttctagggtgcccatgggcacagaggcactgtctagggtgctaacttctagggtgcccatgggcagagaggcactgtctagggtgaggcttctgcgaagcaagattcacttgtctcctttgaaacctggttttggtttgaaattgactccaggggccaggaccaggtagtctcagggatggagatggagtctctggtgtcagagctaccagacactcaggagagtctctttttgaatagcggagggaggtgcaacctgggtgagaccggatgggggccaggtgtggccccctcattagccacacaaagagccagccatgccggtccctgctagagaggtgcgctgaccatcagctcagccactgaagcctggccaggccctgttccttggaaccttccccctccaaggcttcgtgtggtttgggggaggaacttcgctaatagggagcactggagggagccctggctgggaggggcttgggaagggagcaccccctgactgtcccgataggagggacaacagtacccccaacacacacaggctgtctgtgcctccacaccacctggaggctacagtcctctgggggtgggtggccgtctggccagccttgctgtcaccccagctttacagaaggggagacctaggtcacaggagggggagcaccccaaatcacccagcttgtgaactgcagatccgggaactgaacataggggtctggctctggggaccttcgcctaaccctgtaatctgctgcttataaacaacaacaacaaccattgacaggcacaaaatagccaggaatccccaagaggtgagctagttcactgtcttctaaaaccccagctaccagttggtgcccccgttgctgatgctccaaacactgccctactctgtcctacggggttctcaattctgcctctcacccacccccactgaccacccttcccgggatctcggctgcaggggctgccccaagcctgggtttgggggctactttcctcctggtctcccaagagcctgcacccaagaaaacctccccagtgccccacttctgcgctgggcccctgtcctcgggtggaggtgcaagcccgtgagtgtctcccccaccctgagagctgtggaatggcttccccatctttacatctgattcctgctctttgagagctggcttggcacccatgggtggtcagcaagtgtgtgtcaagtgaatgaattaaca

SEQ ID NO: 1267 - DNA, 4001 bp, Homo sapiens
attttacattgggcgtcagtggaatattttgtcaaaaactttgccttttgataataatgtttttttaaaaggtcaaaactcattggtaaaacattagcatatttacaaaggagaaaaacacaaaatcaaaatgattttattgaacaaaaaaagggattgagactaaatataaattatagtccatttgtgccaaattaattttcatctgcttttcagaagagactattgtattcaactttttaactcatcttcagctgccttcaaaggtgacttctttttctctctagtaaatatttttaaagtttgacagtcatctgcctgttagtgactctcttctcagctgttgtaattgatatctttctccagtctaataaaaccaaagctaccaacctactcttattgaggtatggcctgaagagtgtctccagaaaagcaatgctttgccagtatatgaagtgactagaacatcatcaccttccatttaaactgctgtatttttttttccttttggatatagatgagatgtattatacgtcctaaaagaattactcatgggcagtgtgatctaccaaaaaaaagccctggactttggtctttgctttcatattactctatctagattaaatatcatcatctctgaattttacttccctcctttgaaaaagtaaaatgaaaggaagaaggagggaagataggtagaaaaaaaaatgataacttaccctatctatttcatagtgtgactatgagaatcaaataaagtcatagacgataaaaagttttagaaagaagttatataaatatgagatgaaggtatttgtatgtttagaattaaagatccctcataaatggatttacaaaaaggttttggtaggctgctaacattcggttgcttgaatgcaatacaaagaattatgtagctgcttcgacagctggaaaccctgaccacatcaagtgcacaatggggctttcaaacgaccttaagaaaacagactaggctgatacacagccttcttgctttcactgggggaaaatacaaatcaaagggagaagggtattttactctttaatggtaagttatttcctcttcagtgctgtttagggtgccctgaagtaactgctttcacagaggctgaaaaaagtagagtaggcaaaacagataagctttttattgctctattgtccaattctctgaaaactagaggagataacaaaaatggagacagaccactgacttcttaatattcaaaaaccaagctaaaatctcctttttttaggctctctgactattcttgtgattcaagaagaccgcagaggattgtaagtgtgtacacaagcacagacacagaaacatacatacataacccaagcacattttgatctatcattatttagtctttctttttaactcttactcaatgtattaatgcattaatactctcatctttgaattatcaaatttgcccaattacaattttttgtaaatattaaacatgtctgagtttctacaagcctgatactcatgcaacagacacccagagaagcaaatcacagtgcctgagggtgcatggaaatcccaaaataaagtcctgactctattttaggcacttaatctttgtattctccataaagaattccactgaaacatttcagcccagtgacattggttgtggagttttttttgtctgaaaagtgtccttgttttaaattctcttctagaagccccatgacctcatgcaatcccatcagtcatttcttgtttcttatctagtagctctgactcacttacccaggggaattttttccagcaggtagagatagctctgaaagaagtcattgcgaatggctttgtgaaggataaaagacatgctatgtctacagagttcatcgtcggtcttctgccagcgggatctaaaggcaaaatgggctccccggtgggccatgacaaagggggataataatgattcctacagagaaaggaagcttgccttgctgtttctttgaattagccttctctttctaaatgaacttgagactgtcattttaaaccagtcccctctccatctatatcaggacaggctgtcatgggtgtggggaggaggggcagcacacagtgggaggggagggcaggctcttggcacgtccctccgtctgattgcttgggtgacaccactccaagccagcaggtgctaagtaaggatgaaaactggctgagagagatcctgcttcatccaggaaaaagcacgcctctctcctttagccaccacttcaaacaggcaagagcacagcctgctaacaccctgaatatttgccttaatttgatttctaaattggaatagcctaatttccatttcaaagagttgtgaatattttgcaagagatcttgttccctgatttccatcactcctcgtagaacactgaatcctcaaattacaaggacccttcaaagtcatcttagccactcatgctcctttcatcagtacaatttctcccaaataatttcatagaaatgtgtatgtgtttcctattttgaaggatcttcaagagaagcaattatttgaaagcttgttttgacgttaaatatccttctctgtcagcaaactcttccatctagcttgctgtaaacaacaactattcatgtaagcctgtttcttcctctctgcctactctgaatataattttcctcttaagtacatttgttttctgtaccgggtatcttctgattgtccctccggatacactctccactcttcatacattactatgtgttccccaggaggctgacctacatcagtggactccattgccctctagcttctagttggctttagccaatggatagtgccaggaggagacaggaggaaagtgaggtcaaggtatttattcccttggcaccttctctgtggaaatgccatgagctgaccatatcctttaacaaaaggtcatacgtctgaccagggtcttctcatacaaatatcctctcctggttctgttcatttctccttcacctgactgcttgaggcccagggggagtgatgtatcaggtgacaagcccaattccttgtaattttcctatacttgcccacatatttgtaaatagtccctttattaaaccagttcgaattcccaatttgtgaattccatctgttccctacagggaccatgactactgttttcctccccttatgttcctaacaggaaaatgtgtaagatctcaatacactattggccctatgccatgtgcacccacagaccccctgcctgtacatatacacatgctaatatacacaaatgcacacattatggtaggcaacttctaatgtgacccctgtcttagttcaggctgctctaacgtattaccaaagactatgtggcttaaacaacaaacatttatttctcacagttctggaagctgtgaagtcaaagatcaaggtgctggcagatcccatgtctagtgagggccctctgtctggtttgcagattgccctcttctcattgtgtgctcacatggcagagagttaaatcaagctcttgtgtcttttcttataagggcacttatccccttcataagggctccaccctcatgacctaattatctcccaaaggcccccatctccaaatcccaacacattagggctcagaatttcaacataaaaattttgatggaacacaaacattcagtccacagcagtccataagaatccccatcttctttcttcctggtattcacctcttcctgtaatcctctttttttgagtataggctggacttaaggactcaccgctgaagaataaaatatggtgaaagtgatgagatgtcacttttaagaagaggttattaaaagattgtcttaggtgtcttctttctctcacttgcttgtttgccatgtgggaagactgctgcctattgtgagtggccatgtggagaggcctgcatgtcaaggagctgaagtcctaggtcaaacagcccagaagacactgaaatccactaacaacagtgtaagt

SEQ ID NO: 1268 - DNA, 4001 bp, Homo sapiens
actgccagagaaagagcgacattgtagagttgatgctagactctatcttgaaacaccacatatacttgctagtgaaaaccacattcagctacaatacaggttatatgagaatgggctttgtgttgcagaaacaaattaatcataactgttcttttctctaaatcatgcacttattactcaggaattaataggaagtcagagaatccaaatatagagttacagttgaaatcctaggccaggaataaccctatttcctcactctactcatgcctttggctcctttagacaataaagtacactttgtgaggattcaaatcttacttccatcacggattccatctcatgatatttggctatcttctgaagccgaacttaaaattcagattgttgtctccctctccagggagcaatctcccattcaaacttagaaattctgatattgccatctttggaaaagcatggtacaaagagatgtgcatatgctctggagccagacaggcctgagtttaaatccccacatgaccacctggacatgatcttgggcaaaaaaaaaaaaaaaagtggctctcggggcctcagtttcctcatctgtaaaatgtatgcatggccactcacctgaatttatgatgagaattcaaagattgcacatgcacatacacagcacccaacataaggcttggcacataaagcttccccacaaatgttaagttttctaccttcctccttccctacctccagtacaatctcacctataccaaacccattgttgtacttatcacgtttcacttctggaacatgtgcagggtttacgtcttaatgctcttatagtttaaggactgagcagtgcctgaaacttggggcgcactcaacgactatttgaaaaacaaattcatacacaaagtcacacctgctgcaggttgcacaggaatgcacagtgacagaagaacatactttcaagatgggaagtcactcttcaagtagggttattaatccaagaatgagctggggtgggaggtctattatctgaaaacctttaaagaaatgtttttttttttagacagggtctcactctgtcacccaggctggagtgcagtggcgtgatcatggctcactgcagcctcgacctcctgggctcaagcgatcctcccgcctaagcctcccgagtagctggaaatacagatgcgcgccaccacgcccggctaattttttcattttttgtagagacgaggtctcatgttccccaggctggtctttaactccagggctcaagcgatcctcccacctcggtctcccaaagtgttcggattacaggtgtgagccactgcgcccggcctgaaagaatattctagtttgtcttttagcaggaacaatgcaggaaatgctgaaatatgcgtccaactagggtcctcccgcctgtcactgtccaccaagtgcaagattcctgttaccagttcccaccttccggagcacgtacgaagggctaccaacccgcgctcctcaccttttccctgggcttgatatatttatgtagcaccccgcacagttccaggtaggttccataccactcgaaagctttctttcctcgctgctggaagaacttctcccaatagtcaacggagccaaactccctggaacttttaggtaagaggttcatgttcctactgccgaagctgcgttttcaagactcccctattccctgtgagataccatttgaggagcttgcccaccacacgcaggctccgggacactgcagtgggaattctttccacggaaaaacagccacattgatttgttcccccactccaaaccccaggaatgacccttacacgacaaacgcacgcatggaccactgaatctcacacacgcttgccccctcctccgcgcctgctgttccttccccacgtgaagagcccctcacacttttcccgaactagatttccgagcccataaccatatccgggtgcgaagcctcgtgattcgtcggccggcccagcccaactcagctagtcattggtcgctgctttgcgtttctatcacctcattggctgcgacgtgcttgcctttctccggaggctccgtcgcagacacctaaacgcttttttgacctgaggccggccgaccattcacggaacggggcgggaccgcgggccggagttgtggcggaagaggccgggcctctgtgagaactaggtcacgtccgggtgaggagtgagcgcggctgtgctgtggttgggccctccctccaggcggggcggagagcgcgcttgcttcctgggctcggcctccgctttgtcttggagccggcttaatcactgactccgatcgtgcgccgcacaagggcggagcgcggcaggcgggagcgtactggtagaggaggacgaaaagaaaaacctatacagataggagagaagtgaggcaggaaatgagtaaagccagtccgtcgtaaaaacgctgcacattctaaccttgtcagcttctgcgcaccagcaccccccgccttattttgccacctctgcaccaaaatataggattctgctatcaaaagtgtaataacatgaaaactccctcttccttctctccgcaaagcacagcatgcaaaactagcctttcattttgataattggcctccttgtgttattctgacgttatttataactgcttattttatgtgtttgataaacatactgtactttcacatgctcatgctaataccctgaggaagcttctgtgaagggcacttttttttcagacagggtctgtctctgtcgcccagactggagtgcagtggtgcagtcatggctcactgcagtctccactttccaggggtcaggggatcctcccacctcagcctcccaagtagcacgccactaccgctggctaattttttttttttttttgtagaaatggggtttcgccatgttgtccgggctgttctcaaactcctgagctcaaatgatcatctcgcctcaccctaccaaagtgctgggatgactggtgtgagccactatgctggcaggcactatttgaaaatgaccaaatatgtgtatcactgggcctttcataccatgataaattgcaggaggaatatactgattgcggagagcagataggcttggaattgagcatgtgtgctgtgggctgttacatactacactaccacaggtagatagccaggtagactgttaatagttaagtaggttagattggacttaaacattggtttaaaaaagtgattctcaaactggcatgcgtcagaatcacctggaggacttgttaaaacacagaattccccagtccaacccctgttctaagtcattagttcagtggtgaggcccaaggatttgtgtttctaacaagttcccacgatgctgatgatgttggtcccggaaccacacttttttgagaaccactgttttaaaatacaattaagtcaaaatggatatggttcaaaattcgcaattttcaatgataaatctaaaagctttctacaagtaacataagagaaaatctgttttcatgatccctttgctgagttcacattgttcctctctacccaagataaagagaaggagtccttgaagtagtaacttcagctactacaccatgcaaggttctgaatgggtgaaatgtgagttctttaggaagcacttattgagagcggaggacatcacttgtactgaatgtgctacacgataccaaagaagcaaaacagcatagcagccaggcgcggtggctcacgcctgtaatcctaccactttggtaggccgaggcgggcggatcacttgagatcaggagtttgagatcagcctggccaacatggtgaaaccatgtctctaataaaaatacaaaaattagccgagcgtggttgtgtgtgcctgtggtcccagctactcaggaggctgaggcaggagaatcgcttgaacccgggaggcggaggttgcagtgagccaagagattgcgccaccgcactccatcctggccaacagaaggagactccctct

SEQ ID NO: 1269 - DNA, 4001 bp, Homo sapiens
gtgttacttttggtttcctgcatcttttcacatctggctcatttacatcattttcttcatcttccaaagtggagttagctactacattaggtaaggttacttcatcaatcaccatactgttataatcttgaaagtgaatttctttggaccctcccttgaatgcagttatacctagtaaacctgatccacaaccaagatccaagacttttttcccagcaaatttcactttggcctttgtgaaataagccaggaggtcaaaggtacattcccagatttttaagcctccctcataaacacctgtaatcagatcagagtgagaagaaaagctttttgaaactatgttttctccagggaagttctctttcaacaagatggttttcactactgataacttaacatgctggaaacctggtaatgtttctatgactttattttctaacatcttctttaaatctttaggcatagcatgctctttggcagctctcaaggagggctgttttccatgtggctccaagttccttgaactgctggctgcactgagtggactgtctgtgtcttgagagggagctgcattttccattgacttatgttcccacaagtgatcctgaggcaagtcaaattgttctgcagaacattttctgtccctctcttctcctttttgactttctgagactgacagctcttttgaggaatccagggtcaaagctccatctctaatgggtgttaattcattttccagatggtcttctatagtgaaattaaactgaaaggtcatcctcttattaaatgcacacaatctttaaattcagattcttcaacttctggatagaatttgatgatacacacaaatctgcctcaattattcaattagttttgttgggcccaatttctctttagcagcttatacatggtaacaaatatttagagatatttccaaatgactttttagacgtctttggtcctctttccaagcagctctggaaagaaaaaaaaaaaaaaaagaaagaaaatgatgattaaagcaaaatggcacatttcactaaagtgtaatattaaacagccacccccacccctccctgtcccaccatacagctgctttttcttaaaaagttgtggggaagagagagagataagagatttggacactcatacacaccttaagggttccaaagtgggagaagaaaatcaactataaaaacaaacagaagaacaacagcaaccaccaccactaccacctggacaaacataaagtccaagatattcagacaggacagcctagctacttgctgtctttcagctgtcttgatttgtgtccaaccatattcaccccctaagcttccagaataacttcacttctgtcttttacagaagaggtgcagtattttattttggtaagtcagcgtccctttaaaaacatgcataggtatggcctggtgtgtgtaaattcatccaagacttcactccaaacatttagtcgagaacagcagccctaagtgtatagaagtgggggtaatttggcaataattagtaaagactaattcggtggcagagcaaacgcaaactagggcactgcagtagtttggagagacctgtagaaataagaagcaactttattgagaatcttctatctactgcgctagacactataccatctgcctcaattttcacagttctggcaagtgggatctttgttccctttatacaagatttacaatttgggggagaggcgggtcacccagtcccgcggctaggaacgcgcctctttcctctcccatcacgctgcaaggcttggagtcacttccggctgcaggtcccggaacaaatccgaccccagaagtggggacttctggccctcacctccccatttgaatgtaatgtttacagtgatccagacctggggatgcttgcttcccgacgtgtcctgggatcgcgcttctgaaaaagctcacctcacaacgcctcctccggacctaaatcgcgcaccagtgagtcgagtcctccaggggctagagaagcccgactttctttccggccttgagggacccgggctcaccaagaaaccagccgccctcctctctatggttttggagccggcggagagcgcgcaagggttggcgggactgcgagtttccggtctgggctttggcgggtctggtttgaagctctcctgtttgacgaaagtatgtctcaggaaggtgcggtcccagctagcgcggttcccctggaagaattaagtagctggccagaggagctatgccgccgggaactgccgtccgtcctgccccgactcctcatatccttccttggttgtcacttctacctagagaagggtgtgggcgggtcgcgaacctttctcttctgtcccttcagacccaccgccaggctgggttatattaccgcggcctgaaccccctcttttctttgtcagtgagtgggatgaaaagtgagggactggaggggaagcgacaaccgtggtagatttaagtaaggctttggccctggaaagcctcgcggacgtgttctgacccaaggttttagcagtggatgtggcgttttcttccattccttctttcagtttttctgtactcgttgcttgcaattaagtgtaaatacttttgctagtggataatgggggaggcaaggactgagacctgcggtatgacgatagctctggctcttaatagtttgaggtaaagcgagatactctgagcttttgtctcccgtaaaaagggtggtgaatatgaataagggctttcttagcgttataagaattaaagggcatagttctgtggtgtgaaatctttaaaagatgttcagtaaataaaaatgattttcctccttcccctctcagacctctttttcttctttctttctttttttttgacaagttctcactcctctcacccaggctggagtctttctgaaagagttcttccgcttgttgttggctttcaactgttggatttgaggcgcttagcgccttcttcgtccgggtgcagcacattcttgattggtctcatgcctttgtggttgtaaatgtgcctggaatcctagcctttcatggtaaaccatatgtatatgtatctttttcacaacatttgagcccagctttatacaattacactcaaaagaaaaaaagtaaccttcacttgagagaatctcaatactgcacaaatattgtgcagctaaagccctatgtaatcacatagaagtcattcacctaggcattagcaaaatctcagaaggtgccaaagcccccttttttagtttttgtgtaggtacagaactgccgtcttcaaggagtttcaacttgaaaacaaatagccaccctcaaaacattcaaaaacacttaaactgcgtgcataatgtgtgtgagacatggtgttaggctttgggagaacagagacacggaacgtgattcctcttcttccccacaagcttatagagagacttcattaagttgaaagtcaacattcccacctagctttgcacttcaaacgacatattcaaaaaagcccaaacttcctctagttttcttcatctgagtaaatggtttcacaaactgaaaccttgaatcctctctgtctcacacacccgatcagtaagttctattgtttctgattccaaactatgtcttgaatcaatccgtttatctccatcctcattgctaccactctgattccaaacccttatcacctctcacttggagtattaatagtttccttgtttctactcataattcattattccaaaaaagttaagaggggaaaaacatagatctcgtcatttccctttttaaaccactttaccttcaaggttccaggtgatctaagccttgcccttctctcatacctagttaattaactacactctgttcatgaatacattaggctcacctacctcaagatctttttgctcagcctgatttgttctctcagccttttgcatatttcatgtttatgtcttggcccaaatgtcacttccttagaggggctttttca

SEQ ID NO: 1270 - DNA, 4001 bp, Homo sapiens
gacaagagggaggacttccatatacttgactgaggggcaggcttatcttttgtgaataaaaatccccttacttttatgagggacaagcccatctgatgcggaggcagaagaggaaagaatgactccattaaattccggggcctcccaagaccacccccacacccaagaaaagatagcaatgtccgtccccacccaattccagggctttggatccccagtttctgacaagaggaaatccaactttctaaatcagaaatctcaagagatggagtgccccagggggatgagggctgtgcaggggagtggcatcttcccctcctccattctggatctctccgtgaaatccccctaacccccagcactcccagtggataaggtgggatgtggagtaggggcccccctggcccgcctccccttttcctctgccagaagctggcctcctcccgcactcccagccggaatgcagctcctctattgttccccactgtgggacagctcctcccccaccccacacctccccagcccagcctctttgcaatttccaaatcctgccccccacactctcctttgagaagccaggagagggaagggtccccaagatcccgtctgctcaatttggaccttcaccaacacccccactcacccacccagggatgctggagcagcagagggtgtggtaccagacatactacgctggattaattctgcaccccctcccaacacacccagacacacgccctccaccaaatttccaggtgaaggtttcttaccccccagcattccccctcctaccctgtcctactctttcactaccagagacccctctctaggcctctggcccaaggccgtggccagcccagaacaaaagccagagagggaagaggagaggtccaagccaggacgtagcacttccttggagacaccccttccaaaaccccagagacaatccaactttggggtgtgggtgaccacaggaccccctcctctcagcagcccccctcaccgcctcttccccaggctgggaccctcccctgggccacacccccttccattcctacactcagcccaacaaagagacagatactcagtctggcttcgagggccaggtctcccccaaagtctgtaactccaggcggctgggggccccagggatgccccctccccagcctaggagcagataccagagtacaggcttctgagtaactctttgcacattccgtcagtttttctggttaggagtggacaccccctcaggacagcctccctggattgggagaccgatcccctcccctttccctcttccagtgcgaggatatttctttgtctaaaggcagagtcctgggggaggaaggatctggagaaccgtcccgactaggggtaacggggaactttgtggcactttgaaatcagggtagggggcgggtccccctttgtggggaagggacagagccggaggcgggcaagaagggaagaaatgaactttccgcgctagggacgagggtgcccccactacagtccctctcagtggtcccggcgccccgcttaccttgcctgcccacgatctcggccacgtgctcggaggtgggcacgggaacacactccgtggtgttgctgctgcccttcaggcgcagctcggcctctttgtagagagcgcagagcttggcgtcgctcgcccctttgggggcggtggggggctggggcgtctgcgctgcgggggccgccgtcggggcggccgggggcgccgcgggcggcggcggcggggccggctgcgggggggcggccggctgcgcgggggcgccgccccccccacctcccccgtcctcgcccgccgtgggggcggggggctcccccaaacccaggaggcagagttgatcgagagccagctgaagggcgcgctcgtcttccagcagccctcggtccttagcgcttcccccgaaacatcctagttctccaaagcccccatttctttccattattccagataccactagactaggcatggcgaaacaaaagctgggggagagagagagggagagagagagagagaggtggtggaagggaaaagaggagagaggaggggaggggagaggagaggagggggtgtgtggggaggggggaacaaagaactggggaggggggaagaaagcgagatagaaagatagaccctccccctaagcccccctccccaaacaccctgtaacccgactcccctcgccccagcccccggggtgggggtggggggaaagagaagcaaaaccaagaaagcagatctcctctcctctccgggggtgacggggggcggggggctgcaggatctctgcccccacccctcccgcctcggacctgggagtctctagcccccgctgtccaggcgcccccgttaggctcccgcaccgagccccagtccgggagcggcgctcagtggcccccaatagagcccagccccttccagcgctcaaactcttttgttttaaatgaactggatggagcagcatgaaactgacgggaggggggcgcgccgggggcgcccggggcatgccgggagttgtagtttcccgcccttgggggcgcggggacaaattccttgacccgaggaggatagggatgtggccttcggtctttcctcgcagctccggggcaagctaggagtgggatggaagtcgaggtccctaattttttaaggggagggtgcggggagaaggggtagtatgcggaaacagagcgggtatgaagctggctaacgccgcgcgccccctcccaggacccgctcctgccccgcgccggccggtcctgggggcccgcttttttatggaaatgaggagggggggccggggccgggggcggggagccgggagccgtccccgctcgctcactgcggctttctctctcgctcccctctccccgctccctgccgcgctcactctccgcttccccctcccgctctcccagagtcgatcccggagcccggccgcggggagaggttctcggcagagaagacaaagcccgcagcagcgatggggggagagctgggctctgcgtgttgtgggggccaggaaagggtgccaggctggggctggaaccccctggcaaaggatggggtcccctcatccctaaacagcaagccatctcccctcgcccgccccccgcccccccagtctcggagatctcagaggcaccgactgggaggtgagttagttcacgtccttctgctcggtggagggggtcgggagggcggtggagtgatgaagtgcagaggttgaaggagtgcagggacagaactgggggtcggacggagagtgggcaggcaggaaaagtcttaaaggcctggggtgacttaaccgtttggggtgagggccttgagctttggatatgacaggagggaggagagaccaggatggactgggaacccaggcttccttcaggcctgggctgtgaatacagcttggggtgatctgtcctttagcactcatcgtaatttccactctgtttcctccacctctctcccattgaaaacctattcagggccgggcgcggtggctcacgcctgtaatcccagcacttcgggaggcagaggcgggtggatcacctgaggtcaggagttcgagaccagcctgaccaacaaggtgaaacctcgtctctactaaaaatacaaaaattagccgagcatggtggcagacgcctgtagtcccagctactcaggaggctgagacaggagaattgcttgaacccgggaggcggaagttgcagtgagtctagatcgcagagtgagactccgtcccccccacaaaaaaacaaaaacaaaacaaacaaacaaaaaaacccattcagtcccgtttgactccggaaattcggtgagaatgaaaataagtttttaaggcttggagagttaggcacttttagagtttcaggaaggtggagtgtaatgcaattttttcttctccctttaccccatattttctgcatttattttatatcaccctttttatgtctggatctttccc

SEQ ID NO: 1271 - DNA, 4001 bp, Homo sapiens
ccccacaccccattctgaaaacccttgacctcctcatgggagggggatgaaaagacccagagagccttccttgcccttctccccatccgtcaggtcggtcggagcccccgctgctcagcagaaggcgctgaattggggcaagaggggttgcaaggtgttgggggatgcctgtcggtaccctgcggggagtcttcctcccctaggactggcccccgaacccaggcttattgggggaaggaggcccacgggctagcggggaggcaggaaagagagaagtcagtgtggagttcatgaactcctcccacgggaccacatctccgagctcttctagacgaaggggttttggggcgtgcgggaggccaggacctgcctgggaggctgccccacccccacctctggcctcttccacagctgcggcctcccccacccccgactcccctgcgtcctgggaggtgggggacagggggccccgacgctcgctcagacatcagacggagggagggctctgccggctccagagccgggctcagggggaggggtcccggcgggagaaacccagatgttgcagcgccgcacagctgggaacaatcagccgcggaaacttgctccgcgcgccctcgcgctcccgtctctgatctctctttgtctctctgcgtctctgtctcggccattcccaccggaccccccccccccaccccacccgccacattccaacctccccgggagaacaaaagatgtcccatcccccgacgacctcacctctggctccccccaaactcgggctccccgcccttcccaattcgcgttctctctgcagagcaaccccaaactttccaggtgcccccttggcctccgctctgaaggcgcggggttcaggaacctccgcggctgccccaggatcgaggacccagagagcctggcaccctcgcccccgcgccgggggacccgccgacgcccctgaccgccccccggggcccccaagcgccaggcccgcgcctacctgtccgggtcactccgccgcccgctccgagtccgcccgccggagccgccccttggcccgctccgagtccccctccgggcccccgacggggctggcgcccgccctccagccccggagccgctgggtcctaacgcgagctgcccgcatgggccgccacgccgtgccctcggggttccatctcctgggggggggggtgtccccggggtagaggcgcccggggccgtcctcacgtctgtgcaaagcttcctcctcctcacagctgctcctcactcgacgtcgacggggtgaggggggtgaggtgggcaagggtaggtgtgttgcccatttcacagaggaggaaatcaagcctcccaaagtgactcaccctaggcccctcagccagaaagtaagcctcgatctccctctgccttctcccagcttccaggacactctcctgccttggttttccttctgcctctccagccaagcctgctgcctctctcaggcccgcaccctcctctcctacactgctgagctctgggccatggctggcttccacaaccagcggttctttctttccttttctagagacagggtcttgctgtgttgcccaggctcgtctggaacttccggcctcgaaattttggcctcaagcattcctcctgtctcatcctcctgggctgttgggattacaggcatgagtccctgcccccggccataaccagcacctctttcagccctgacccagcctatgtgtcccacaaatgtcctcaagatgcatcagcttcaacaagcatccaagtccaaattcacgacctcctaactctcccccagacctggccctccaggattcccagtccccccttggccccgcagccttccattacccaggcttcctcccctgcccttagccctgcatctaatccagcacccacccgtgaatgctacctgaaaaatttcttttgtgactccgttcactgctcccaccctggcctaagccactgtgagaccaagttgcaatcccaagaaaccgcatttgctctttctgcttgtcagaagctgacaaagccctgactcagtgactgggggcagcccaacggaaggatgccttgaagatggcaggcagggcagaacacaggctcccacgcctcttgcctgaatcactgcattgttagaaaatataagttaaatgatcctggctgtgccttttcctgtacataagatagcacctgacaggattgacgattatgcctctataatctatataactaggtgcatcctcgaacccaaaccttggcgagatttgcactagtgtagcttctgaagacatttgatgtaaatttttcttcttctttttttaatgagaccgggtctcgctctgtcatccaggctggagtgcagtggcaccatcacagctcacctcttgggctcaagtgatccttccacctcagcctcccaagtagctgggactacaggcaagagccgccatgcctggctaattttttttttttttttttttttttgtattttttgtagagaaggggttttgccgtgtttgcccagtctggtctcaaactcctgagctcaagcaatccacccgcctcagcctccaaaagtgctgggattacggacgtgagccaccgtgcctgaccatagcttctgagcacacacagaaccgcctgcctctgtatctaaactgtgggctgaaatgctgctttggcgcagtctaacagaaactctctgaaaccctctcccagggtgcagtcctcagtaagactcaataaaactaactttaattttttcaatggctgattttttttttttttttgaaatggagtttaactctgttgcccaggctggagtgcagtggtgtgacctcggctccctgtaacctccacctcccgggttcaagaggttctcccaacccagcctctcgggtagctgggattacaggcacatgccagcatgccaggctaatttttgctttttttttttgagtagagacagggtttcaccatgttggccaggctcctgaccttagctgatccgcctgccttgggttcccaaagtgctgggattataggcatgagccactgtgcctggccaaaaggtggattttttctttttctttttttttgagacagggtcttgctatctcccaggctggagtgcagtggtgcatcctcaactcactgcaacctctgcctcctgggttcaagcgattctcatgcctcagcctccagagtagtggggactacaggcacccaccaccatgcctggctatttttttttttttttttatttctcgtagagacgaggcttctccatgttgtccaggctcgtctcgtactcctgacctcagctgatccacccaccttggcctcccaaagtgctggaattacaggcgtgagccactgcacctggtcaaaaggctgatttcttatttagttgacaccaccatcatttgcctgggctctgcgatagcctccactctgggctctcccacgtgggtcctgcctccctcacccccgcagatcgtgccccttctactgatcgcctttcactcaggttagaggctcaacttccctgtggcttccagggccccggccctttatggcagcctggctctgcctcctcttcctcctccagccactggcctttgggggttttctcccaaacccctctccctcccacactgaggcgtttcttcctcccgagcactggctgaggtctcctccatggggtcacagatcaaaccctcccttcctcagaggggccttccctttttcctttttttgtgctttctagctttactgcttgcagttgtcttgttggcctatgtctgtgaccatctgagccctgtccctcttcccgatgagactgtcatcttgccccgtgaaggccaggaccaaggctgtttttgctcatcttcagttttgctcattaagttcagagcccggctcagagcagcagttcagcaaacattggtggaatgaatgagtgaactgtacactaaactctt

SEQ ID NO: 1272 - DNA, 4001 bp, Homo sapiens
ggctccctgggtgtccaaggcactgactgcgtgaatcactgaacccaggcccatccttgggaccccagccctggccagccggcatcaccgcctggactcagcagcttctgccaagccaccacctgctcccaattagcccctgggccctaagcatcctgctcagcaggaaaccacatacacatgggcctgcccggcccccagagcggccaggccgggcagggctcccagctcccagaagactcctctcctgccaggcctccaggcctcgcaagacctggctgtgtgcatcacaggctcacgagacccgggctatttgcagcagcaggaagcacgagagtgaagcctgagggggctcctctggatcccagaaaggcagcactgaaggggccgtgacatcacccaggctgggggttctgcaccccctgacactgtaggcaagtgtgtgtgtcatttggagggagagggcatggggtccgtggctttcatcaggctcctgacattcaagagcccagcctccagtcctggctacacggtgggacttgggggagcctccggttccccacatccagccccagctcagtggagggccacctcaggtccgtcagccttctgtagggagggctgcgagggcggggtccatccaggagggcccctcccggctgcaacccaggaagtcctttcagagagctagctggaaaccccaactttggtctattttccccactgggagtccagggagaggggagggaaaggggagaaagcaggaggtctttccctccttcctctcaatcctgaggcctcctgaccccctggctcctctcatgcattaggcacctcactaaggtggagtgggagccgggagacgaagctcaggaccaagctgccccagaggcgagggatagctggctccccacaccccattctgaaaacccttgacctcctcatgggagggggatgaaaagacccagagagccttccttgcccttctccccatccgtcaggtcggtcggagcccccgctgctcagcagaaggcgctgaattggggcaagaggggttgcaaggtgttgggggatgcctgtcggtaccctgcggggagtcttcctcccctaggactggcccccgaacccaggcttattgggggaaggaggcccacgggctagcggggaggcaggaaagagagaagtcagtgtggagttcatgaactcctcccacgggaccacatctccgagctcttctagacgaaggggttttggggcgtgcgggaggccaggacctgcctgggaggctgccccacccccacctctggcctcttccacagctgcggcctcccccacccccgactcccctgcgtcctgggaggtgggggacagggggccccgacgctcgctcagacatcagacggagggagggctctgccggctccagagccgggctcagggggaggggtcccggcgggagaaacccagatgttgcagcgccgcacagctgggaacaatcagccgcggaaacttgctccgcgcgccctcgcgctcccgtctctgatctctctttgtctctctgcgtctctgtctcggccattcccaccggaccccccccccccaccccacccgccacattccaacctccccgggagaacaaaagatgtcccatcccccgacgacctcacctctggctccccccaaactcgggctccccgcccttcccaattcgcgttctctctgcagagcaaccccaaactttccaggtgcccccttggcctccgctctgaaggcgcggggttcaggaacctccgcggctgccccaggatcgaggacccagagagcctggcaccctcgcccccgcgccgggggacccgccgacgcccctgaccgccccccggggcccccaagcgccaggcccgcgcctacctgtccgggtcactccgccgcccgctccgagtccgcccgccggagccgccccttggcccgctccgagtccccctccgggcccccgacggggctggcgcccgccctccagccccggagccgctgggtcctaacgcgagctgcccgcatgggccgccacgccgtgccctcggggttccatctcctgggggggggggtgtccccggggtagaggcgcccggggccgtcctcacgtctgtgcaaagcttcctcctcctcacagctgctcctcactcgacgtcgacggggtgaggggggtgaggtgggcaagggtaggtgtgttgcccatttcacagaggaggaaatcaagcctcccaaagtgactcaccctaggcccctcagccagaaagtaagcctcgatctccctctgccttctcccagcttccaggacactctcctgccttggttttccttctgcctctccagccaagcctgctgcctctctcaggcccgcaccctcctctcctacactgctgagctctgggccatggctggcttccacaaccagcggttctttctttccttttctagagacagggtcttgctgtgttgcccaggctcgtctggaacttccggcctcgaaattttggcctcaagcattcctcctgtctcatcctcctgggctgttgggattacaggcatgagtccctgcccccggccataaccagcacctctttcagccctgacccagcctatgtgtcccacaaatgtcctcaagatgcatcagcttcaacaagcatccaagtccaaattcacgacctcctaactctcccccagacctggccctccaggattcccagtccccccttggccccgcagccttccattacccaggcttcctcccctgcccttagccctgcatctaatccagcacccacccgtgaatgctacctgaaaaatttcttttgtgactccgttcactgctcccaccctggcctaagccactgtgagaccaagttgcaatcccaagaaaccgcatttgctctttctgcttgtcagaagctgacaaagccctgactcagtgactgggggcagcccaacggaaggatgccttgaagatggcaggcagggcagaacacaggctcccacgcctcttgcctgaatcactgcattgttagaaaatataagttaaatgatcctggctgtgccttttcctgtacataagatagcacctgacaggattgacgattatgcctctataatctatataactaggtgcatcctcgaacccaaaccttggcgagatttgcactagtgtagcttctgaagacatttgatgtaaatttttcttcttctttttttaatgagaccgggtctcgctctgtcatccaggctggagtgcagtggcaccatcacagctcacctcttgggctcaagtgatccttccacctcagcctcccaagtagctgggactacaggcaagagccgccatgcctggctaattttttttttttttttttttttttgtattttttgtagagaaggggttttgccgtgtttgcccagtctggtctcaaactcctgagctcaagcaatccacccgcctcagcctccaaaagtgctgggattacggacgtgagccaccgtgcctgaccatagcttctgagcacacacagaaccgcctgcctctgtatctaaactgtgggctgaaatgctgctttggcgcagtctaacagaaactctctgaaaccctctcccagggtgcagtcctcagtaagactcaataaaactaactttaattttttcaatggctgattttttttttttttttgaaatggagtttaactctgttgcccaggctggagtgcagtggtgtgacctcggctccctgtaacctccacctcccgggttcaagaggttctcccaacccagcctctcgggtagctgggattacaggcacatgccagcatgccaggctaatttttgctttttttttttgagtagagacagggtttcaccatgttggccaggctcctgaccttagctgatccgcctgccttgggttcccaaagtgctgggattataggcatgagccactgtgcctggccaaaaggtgg

SEQ ID NO: 1273 - DNA, 4001 bp, Homo sapiens
ccaggagagcacacccctgtccactcagctcaaatccagggtgccagaagtcacagctactacttacttttttggatggtgagagatcttcacagggtaggcatcatggacatggctgaagtccaaaagacaaaaagattctgagttctcttctgtcctgtctcaggttgaggttggctattgattgactgtgttgactccaccagtcctgacttattagaaaagaaaagggagatggatccggtgtccaaaaaaaaaaaacactggtgtacaaaacatgtctaatcaggtttcaagccaaacaaactcatccctgagggaagcttactcattgaggtattggggagttgcgctggcatgtgaggaagtgccctggggaaaaaaacgcagaggtgtgggaccaatcctgactgtgcacacgtattccgccatgtgcgggtttgaggcaccacggaggtccctgcaggagccctgggaaaggtacatccagagaggggagaagaggacagagcaaaactaggaacaaaactgggcttgaggactgtggaacagctgactattgaggaacagaagaactgactgaaagccaatgtgttcagctactgtaaagtatctcacttaattctctattctgtgggacagagggctggaatacttgaagatttgtctaagctgggatctgaaatattagctccctttgactccaaagctcctggagtgcagcagcgcgatctcggctcaacctccgcctcccgggttcaagcgattctcctgcctcagcctcctgagtagatgggattacaggcgtgtgccagcaagcccggctagtttttggttttagcacagacggggtttcaccatgttggccaggctggtctccaactcctgacctcaggtgatccgcccgcctcagcctcccaaagtgctgggattacaggtgtgatccactgcgaccggcctccttccttttttaactacattgagctgccttcctcccccaagccccaaaccttgggacaccagaggcggataaccagagcccttttctgggtagaaaagagataaccagagcccttttctgggtagaagagagagagatgattgagaatttaaagagggcaatgaaggattacgagagggggtaacgggcagttctgccttcgtgcgtcttaacagctatttattcaacattttctgtgtgccttctctgtgtgtgtcaggcgccacgttagaaatggataagaaacagtcctgccctccagggccttacagtccggtgagaagtcatataagtaaacagggctgaacgagaaggcagtaactgcccaaagtggggatggcagggcgctcccgcggtgaacgtggacacctatcaggtgctgagtaaatgctggcaaaatgaagacaggatgaaaaatagagaaggggcaggggtagaacatggccgtgaagggtggaaaggcgggggcgatgagaagctacaggggaccccaccgaccagtcccaggtcccgtggcccgccccctcctctcagggccggggagggcccggcggcgaggccggagagtggggaccccgcttgactgcatcccagacccccgtggccccagaatcccgtcggcccacgccgagctgctcaggactcgccgggccgggccgggccagtccccgccaccccggcttgctcgccctctcaccttcaccttcccggcctcgcggcggccatcacactcactacgtcaccagcgagcgccaccccagggggaggcgggaggagggaagtggataagcgcgtcaccagtcgcctcagattgcccctcgacccgggtgagctggtggaccctgagcccagccggctcgccccgcctactccttacgcctctgctgccccgcgactcggcgcttcgagcggcgtctcagcgcgccactcctccgcgcgccactcctccgccggcgcgtcccaagcggacgacgcagaggctcggactcccactgcatcatgggggctgtagttccggtgggcgtcggccggagctgggggggcggggcaaagcggggcggagcctcaagctgtcaaggggcgaaaaaccaagggcgtggagtagaggttcccgctttttcgccggttgtcctagagcctgaccctggggcctctgccagctctggaatccagatttgcattctgtaatcttagaggagtgttctctagagggccaggcctagggtgaagtgactcatcgggcagacagaagcgagcatgggcctgctgcccttcagtcgcctttgaggaaagaagagcagcaacaacggcgaatcaatgccagtgactgaactgcgtctctaacatccaccgctgtatttaacgtccacagcagtcccaggagagggagaggagaggttacccaagctcacatggttacccagatcaccgggccccagtgatgcggcagacactactaggaaaccgcagcaaacagatcccttgcaggacttggcctccgcagagaaggctccaagcctgagcgcgccagaacagtaggcactagccacgtgtggctctcgagtcctgagccagtgcaaacggagatgcgctataagacttaggacaaaaaaggctgttaaactatctcaatttttaggaaaaaaaaatatcgaccgggcgcggtggctcaagcctgtaattccagcattttaggagggcgaggcgggtgcatcgggagttcaagaccagcctggccaacatggtgaaaccccgtctgtactaaaaatacaaaaattagccaggcatgatagtgcactcgggaggaagaggcaggagaatcgcttgaacacgggcggtggaggttgcagtgagccgagatcatgccactgcactccagcctgggcaacagagactccgtctcaaaaaagaaaaaaaaaatctatctttgagccagagtctcactctcactcaagctggagtgcagtggtgcaatcacggctcactgcagcctcgaactcctgggctcaagtaatcctcccacctcactcagcctcccaagtagctgaccacagatgctgcagccatgcctagtatttatcttttgtagacatggggaagcatttcactttgttacccaggctggtgtcctgaactcctggactcctggagtcaagcaatcttctcctgcctcggcttcccaaaatgccgggttacaggtacctgccacagtgcagggctattagcccattactatttatatgctgactacatgttgaagtgataatattttgggtcatttgggttaaatacattactaagattaattgcacctgtttctttttaaaaatgtcgctactagaaaatttaaaattacataagtagcttgcatttgtgggtcaaactgtaattctgtgggatggtgctgctctataaccatggtagaacaacctcaatttattgccacaaacaacctcaagaggcaaatcagtactctgatatagaagtgactggtttatcagtctcatgacgatggccaaagggagctgtcctgcccacactgccctctgagtagcctagtgccccgcgggtctgactgtggactgtggggccacacgcagactcagcctcagggtgtagacagggccctgtctgggatgtagcgtgccttggggcctcagctgctagctgcctggtactgggtcggattgtttcctcctccacaatctctggactccctaaggagaggaactctaaattccacttccattctctgagggcaggaactataaattccatttcctctttttttttttttttctttttttttgagaaagagtctcgctctcactctgttgcccagactggagctcagtggcaccatcttggctcaccgcaacctccgcctcaggcaattctcccgcctcagtctccccactagctgggattacaggcgtgcaccaccatgcctggctaatttttgtatttttagtagagatggggtttcaccatgttggccagg

SEQ ID NO: 1274 - DNA, 4001 bp, Homo sapiens
tgttgtttcttctttttcggttctttctgggaagaggaggaaaagatgaaaggcccaaggttctggcctccatccaagaaggttccacaggaaggaccatccctctggccagctctaccagaacaaacaactctgctttgacctgttcctatccaggagatcccaccttttttttttttttttttttttttttttttgagacagagtcttgctctgttgcccaggctggagtgcagtggtgccatctcggctcactgcaagctccgcctcctgggttcacgccattctcctgcctcagcctcccaagtagctgggactacaggcacccactaccacacccagctaattttttgtattttaagtagagacggggtttcaccatgttagccagcatggtctcgatctccgagatcccactttatacaaaagaaaggtgttctccattcttaggaacatggaaaaggggaatccatacttgtgtgaaagtagcccctaagccacctccctcctggagattctaaggaaacttatcagcccaccatccctaaagaactcctcccaaggcctcaggcactgctcctttccaggtttcagggggagcatgctccagcagccgacctgtccccacccggcaccagctgccacaacctgaaaatccgcttgctgccaagagctgcctgagcccagcccaggctcccaccctgcctcagagacaggatccacctgcctactcctggtgagagctctagagagctacgggggcccggcccagctggctgcaggcgcagctgttccacctatcccagagcatccctgaccactataggcagccagagcttcaggcggacccaggaactgtcctactctccagcttcccgacccatcgccctccacccctgagctcctagaggaccttggagacgggaggaaaggcctccaggttcaggcctgatccctctccgggtggggcactagggaggttgggttgcccagggaaagtagatattactcatacatagtaacagcataattgctcacccagctccttccaaagatcagttaataaaattaaaaggaaaaggcagtcacctcccacgaaggtatctattgcctgagatcctttcctagggggccgcctcattttatttggtccttcaataagtccccagggctggggatgtggtcgatggtctcgatgcgcaaagcaccgttcccgcgcgaacatccacattcagacaaatgcctgagggacgcggctcctttaagagcagagctcttgttcttatgaatgaacttgagcggccctaacagcagagttgaggcgcaagagtaggtgggtggagtgggaggtaggggatgagagatggggaaccaaggggagtttcccagatttctggggtcatctctggggtttggggcggcaagccccagccgctcaacacggaagaatggaaaccggctaggcagagcggggaatcacatggggctgccggcagagcctctccgcagagcgtggagtgcgggtgagcaaaggggggcgagggcgcccacagcttttctccgtcaccccctgtcccagggcacccccaggtcctctctggctcgtaggcttcctgtccctggctatcccaatggtcccctgaccaggccgaccccgggacgcccctgatcccccatttccgcctcctccctcccctcgccctccacgcggggtgccgggccctcaccttcacctgggccgggcgttcagtgctttggaggatgctggtgggtagcagccccgccgcggagccgctctcggcgccttctcctttggccatgacccgcgggccacgccgcttgggacctggtagacgggatgctcctctgccccgcaggccgctgctcctcccaagctcgcttcgtagcagccttagccacggccgccgcgcgctagccaagccggctggcagacgaggaacgcactctgctgcacgccccctccgcgcctcttatagttctgcccagccctctcggttgcggccaatccccgagccccgctgccccgcctccagccaatcccgtcgcccgcctccctgcccccgcctcgcccggcggctctgtgccaccgagccacgttctccaagccccggaaccggcatctgcctgcgctggctcctagcaatccgagaagcaggccgcgagacctcccagacacgcgcgaggaaaccgaggccccaggctgaaagtgatctgcccggggtccccgatctgcccgaggtccccgaggtccccaaggtccgactctccccgagtcgggcctaccacccatgacttctgagccccaggcctaggaaaggtaggggctctgaagcccactttaaaatctggagtcagggcctctctccttcttcaagcctagaggacgtacgctgacactttccctcctgatgcctctctctcatccccgaagacacaccattcccccgtcctgcccttggcatccgggcaatggggagaaagatgaggcaatccagtggctgcccctgccagaagggagctcccaagtcgtggagagaagccggggctacgcccgctagtacactatgacaacagtggcctttttatggatagcttcctccatgcttaatatgatctctttcggccctcaaaaaccaccaagtgagggtggtactattattatccccattttacagcacaggaaggggaaacttggagaagtgaagcaactgttatgtagcagagccaggcctgaaaggttttgtccgataccaaagcagttgctctcaacagccctgctctatccctcttagcataaattacagacggcagaatggggtgtatgtgtctcccaacaagaagccctgggagatacatggctccagaggcactgagggttgaaacagggaaagttttgaaaaagagaatgcccagaaatgtggtcctcaaaagaagatgggagggcattagtttggaacagaaggcaggcacggatgccagaaaagaacagtctttagttccacctctgagtcccttatgtcaatgtcaccccggtctttccagttctctgattagtgaaggggctgctggaactctcaaaggctacccacccggttcctgtgctccttaatgtcagcctccttcttcctttctttaaatctctgattgcagggaggagagataaggtctatctgccccaggatggtcacaccatgctccctcatacgccagcagatcccatctgggcacacagctcttggccattgctgagcagaagagagccaaagtgaggcactgaatactgtggaaagggaatggctggccccattactccaagctgtgtgacactgttctgtctcttttcccctctccaggcttggttagctaagctcccttgcagcccccaaatcttctctcccacagtcacaccataccacaagtgatctgtatcccccggttgacaatgagctcctcaggtaggaaccgcatctttttcacttctgtgtccccaccaactagcttagggcctgaattattgtgttcagtgaatgaatgttcagtcttcccctgctaaggtacaagcacacagaaacccattaggaaaagccctaagtgtctccatttactagctgtgcggctgactctgaacaactcagttaacctccctgtgtaaaatggtgatattaatagtagctactggccaggcaccctggctcacgcctgtaatcccagcactttgggaggctgaggtgggtggatcacgaagtcaggagttccggaccagcctggccaatatggtgaaaccctgtctcaactaaaaatacaaaaataagccgggtgtggtggggcacacctgtagtcccaggtactcaggaggctgaggcagaagaatcgcttgaacccaggaggcggaggttgcagtgagccgagatcgtgccactgcactccagcctgggtgacagacaaagactcttgtctcaaaaaaaaaaaaaaattaatag

SEQ ID NO: 1275 - DNA, 4001 bp, Homo sapiens
tacaaaactacccaggaagagatggcccagctgggtgggtgtgcatctctgctggcttcacaaaccctgccctgccaacctgtcatttcaaattatcctccttcccctccgtgttctttgcactacatattttctttaaaagttccaggtaaaggagcttttgtaagtcaaagtacttaaaaccaaaaaacctgtgctagccacagatactttatcttagtttctaattaaacctctaggcagaatgaatcttgagcttgtccttaagattttctgaatcttctgtatattccaatcctgtaccacacccacaaaacactggtgtacacaaggagacttgctttttaagaagagaataatttggtttacaagaagatttggggaaaatggggataatcgcttccaaaattggtcatgtttttaaggcttaaagtggggtccatctgtactgacacctgtgctccttccaccagctctggaagcaaggtggatggaaacacctgccctcacgaacacctgtaggcgttaagccaaagggcatgaccacagcccagaacggcccctccagaggtttctctgggatagcccaactgcggttttttctccaggccggctgcttgctcgactgagtccatgggatctaggaaaccactcagccaggagctgggactggggaaatcaagcagcagcctctggcttgcaagtcatctattccctattctattatgggtctctgttttccatgctgcactgggagagtgaatctggctgtctttccacaagggagcccggaggtggccctgtccaatttaagccgagagaataaggctctgcaatagtgtcaaagggggatttctgggggtggtgccagggagagtccagagccctgtcgtggggcagaggcccagcaggagtaggatgaggtgggtggggagtggaggggaaccttggcaccagggctggagagtcaccttaccaagctatgggtaaagtgccctgcccctcccaacctggccttaacggtgaggtcctgtgtgtctcgggggcccatgcaggaaccatgttctggctgcctcaggaggagggctacacagaacccactaaaccccgtggctacccgggggaagggacagcctgtgttagctgatgtggagctgcctacagtggagcctggccctgggaatcagtcaagccgcaggccacctccagcaccctgcaccgccacagagctggccctcccacggtccttccacctcactgccaatcccgcccccggcagccggggctactgacaaaccccagaggagctgtgtaagaggggcaccctccccacctctgcaaactctatcactcctctccccacggggcggtgggtgggggaagcaggtgggaactggttttatcctctcacagggatgagtgatgacaaataaataagccagaagtcaccttcagtctctggagagagttttccagggagagctgcgggggagggagggagggagggaggcagctcttcggccaagatggagctgggaggggtggtcgcggccgggaggcgggggcgacgggcagccccacggggccgggggagaggccgggtcgcggggcgggagggaagggtcggcccggcgagggtgggtgccgggggccgcggggcgggggcgcacgggcgcggcactcacgtccttttgaagacgcccccgagggcgctgcccagcaggaggcagagctgctgcgagaagaagacccaggagatctggggcagcgagctgtgcgtctgacagcgcaggtccagcagcgtgggccccaggaaggcgatgcacaggccgaagctgaagaagacgctccagtaggtgagcgtgggctgcaggttgcggcggagcagccccgacacgcggccgtcgcagcccatggcgcaggctgacgggctcgcggatctggtcccggcgagcccggtgcccgagtgccgcccgcgggagggccggccgggctggggaggcccgcggcggggagggaggggcggggaggggccgccccagcgaggggccccgcccttgggcccgggcggcggcgggggcgcctctgcggcgggtgggcagtgcgtccgctcccgcgccttccccgtgcggtgccaggcgccggcctccccctcctacccgagcgcacatgctcgccctcccccggctgcggagaccaaccgggagccgcgctgccccccgcccgctctccctcgaccagtccccccagcctccggatgcagcccccagggaccgagcgcccattttagagcccggcagatggagagcccgagacatcctgtatctccggataaggctaggggccctctccccgcacccgggctgtggcagtggaggaaacccggacccctttaaacctaggcgcttcacagatggacttcgagggtctaacggcacccccctttcccccagaacagaaggcaaaatcttgttgtacatatgtttctccttgggagagtattcgtgcatggctttcattagaaccccaagaggttaatcacattgccctttagaaggagaaccctagaaactcaacatcttcctcacactaagctccctggaagggcctgagatgaggccctcctccccacctggccaggtgcgggaaggaggaggatgacgctggtctatgctgactctctctctctccttctaactagttggaggagggcagagagggaagggccgcgtcctggaggaaccccgggaggaattctgaaataatctcctagaaaaaaaaatttaaaaagagttctggggaaaattctttcttccatggataaatccctggcagtgagtaggggttgattattctctagactgggtgtccttcgaggagcctgcagctgacctaggctgtcccttcattaggtggcctcgggctggctggtgggttctgtgtgttcccgctcctaagggagccaggatctggcccctggaggcagaacagtaaggccctgcggtgtcccctctgcccaggtcttctggtaatgacaggagccatgacatcatttccactggcccaccagggggaccagggctgaaaagactgaggaggtatgtgggcgggtgtccccaagacaacttggcatgaggtggggcaaccaatttctcttgcaggtactggtcccatctcatagccgcacccctgcatctgccctatcccttcttggacagtgagccccagagaagggggagccccagggtccctctggctcatcactctgtgggtaatgacaagtacttattcgatagtgatgatggggggcctgcacagtaattgtaataaactgaaaagctaccctctgggggaaaaaaaaagaaaaaacaccaaacaaatcataaccacaagtttttgactgagtcttctctgccactatcacagaactccaggaaccatagaagctcagaattggaaggaatagcctccaattgagtcccctatcccctccccataactgcctttgaatgcttgccagtcctgttcttgactgacacctctagtgctggggaccttgcatattcctaggggctctgcttgcagtgtggatgagctctggttgtagaaatggtcttaggcaaaattgaaatgcttcgccctgtaactgctccccacggccccacacagaacaaatctaattgctctgtcatgtaagtccttcacacccaaaatgaccttgccctaatgattttgcttctctagcccaaacacctgaaatccttccataatttccctaaatggcgttccccaactacagcaccttgctggctcagctcctctagccacagtaacaaatgaccctgccacaatgaggtagcccccagtgcctgggatgctggaagcattctgaagcttgatctaggtggtagttacacaggtgtaaatatatgtaaaaacttattggtctgtagatttaagatttgtgcatttttgtgtgtaagttatacttgattaaaatg

SEQ ID NO: 1276 - DNA, 4001 bp, Homo sapiens
tttctctgaatagtgggtaaagcccttctttcctgtatgttccttctcggtgctaatctccaggcgaggaggatctcttccaggattgtgtcttttcagaactctaagccaacaggaagaaatctaaataaagcggaaggctgcccttctccagttttgttccttaatctaaggaggcccctgtagcgcagtttctatagttggcgacagtctccctgcagatttatatatagtaacattggttaaaaaaaatcacttgacaaagttttctatttccgtaacattgtgtcaggagggaagcttaacggaaagtcttcccagggatgaaagtatttgtttctattttatatgttagttttaactccttaaattcatctcctatgagaataaacattcttgatctgactcaatgtgctctctgaattcactgaaataaaatatagcctgtaactctgaccaataacctggggtgcctcccagaactgctggctccaggtgatctacagatttcccaagagaagcgctgcagctcctacccaccagcaatctaaaatctgcagcaattccgcaggaccacacctaggcccaacagcacatacctgcagagccggaagcgccttcccctccagggcatctcctgtccccagggaaggaattaaagttctaacccctgcctctccttctacccatcctagtatctgcttttcctttacctcgtcttccacacttacttgcccccgacgctattatgtagcttgtaaactcgtgactctcaaggaaagtatcagcagaagccacaacttcggggaatgactcactaaggagtctccagcgccttccaccgccctgcaactgccccactactgtagccctacggctccgtgctgccaccccacataaagaaggggcattttctgaaatccaaggaagaacctgaagagtcccccacccgcctagaggcgtctcttgctctaagtcagcggtaggaaatgaccaccttcccagtacaaatggacaaacgattctaagaggcaggaggaaaacaaacacaattccttcagaggctctcccgaccgtccctagcaacacatccccaccgcagcgggtgcattgctcacaggccacttctgaaaccagtgttactgatcaggcctgcacaaccactcccccggcagtgtccggctcgccatcctctgcgccggaacagcagagggcaaggtcgggtggtctccggaaggcagaaaggtgcccccagactgcagagcccggggacagcaggagaggaaaggaaggaatggaggaagggttgaccttgagaattttcctgagttacacataaataggtcgggcctcgcttagacgctcccaacccactccaccagggaaaagatgcaaggcaaggggagagcagagagggtggaaattcagatcgctaatttactgataagggtggggggaggttagagacagcgggtctctattcagctcgcataggctgaaatatgggagtgccctgcgcaaaggctgaagtgcccccggcggcccggtgctcgtggctgcccgcaggtgctagcactcacctggatcaccttcgaacagctggagcagaacaaaactgcgcagcgcggtgtgggtgcggcgccctcgcctggggcggggctagatgaggccagaagcaggccccgccccagccgaccagcgcgcggccacgcccccaaggcggggctcctggcgctggcgcgcgctgtctaagttgccaactcagggccactggttgggaggtggaggcctaattttcttcctgctcatggtcgtccagcgatttactcctctcattctcaaaaacatatatctactcccccaggtgccttcgtggccatcttcctaaactgtcccagccaggtcatacctcccggattgggtttgcagaacagtgggacgtgaataatttgtccccagcagagccaccgtagcggttttaggcgctctgctgtaagggcgaagcacgggcatgcaaggcgcgtgcgcgaaagtagccgcgcctcaatcgatgtgtccctgaggcgcgtagctggggcgtgggcggcgcttggtgtcccaggttgctacactcccgaagtgaatggatttatcgctgttagggcctttttgtttagggcctaacaaatattgttagttttgccgagagctggcgccgagccctgccctcgtggtgggccgtacccacgccccctgagcgcggagtcgcgtggctccggagttttgtttttttgaaaggagtctcccaattgtccgtggagttttttttgcggcacatggagtctctgccttcgcgacccagacctttgatgtgaacacctgctcccgttacgctcgggtccagcgtccggggcggggctcgaggccgggtggaggaggggtgggggcgggggtcttggtcttgggtgagacctgcagatacggtcgggctgaaggagtagaactggcttctaaatgccggaaaatccgaaggaactgactgcagaaggcacgtttccaattttcgcgtgttttaagtgcaccctcccgccacctctcctctggacatccctcatccttttgaagattgccacacctgggcccctcctagagtctcctctttggaggattcctcacctccgagagaatgcttaggaacccacctgaatgattccaagttaaggtgtggaaaggcagaaatctagatttttgaaggctctaggttatgtgtgtgtttctttttattgggttgtcatatttgcacatctagaggtactttgagagctcattaaatctttactgttgctgtttcagcaatttccaaccattctcatactttctgtcatgttgggtttctgtcatgttggatgtagagagggctttgttttgcttgaacattgaaaggaagtaagttagggagacagttttgcattattgaggcaagtttctccacttgctggctgttctacgtaagaagtcattccaaggtggtggaagggatgattcaaaaatcaggagcggggatgcaccttgcaccctcattttacaccggagactgcagtctcaaaaaaaatttggcctcttctttgccagttatctctgaccacagacaagtacttaaccactgaggaccttcttttaaaaatcttattacaaaagcagtattcctttatattagaattttcggagatacagaaaagcccacaaaaaaattacatacacacacaatagaatcatactgtatattctgttttgtggtctgctctgttcacttcataaaatgtaaaccctttttttgcttttcatttctttttcttttcttttgatacataaaccagagtgtcactttattgatttgcaactgggaacctaagtatgttgtggactagaaaactcctgtcatgcactcagtgtatttttttcatgtaggacgcttttcatttcttgaacggttcatgctgcaacattatttggcaatcagtgcatgtcttttcatagcatggatgtaccaatcctcttgctggagttagcttgctttcacttctttcctattgcagtgtacaatcttgtagataaatctgtgtacgtgcttatgatttctttttttcactgaattcctttgcagaggaatttctaggttttgatctctgtcaataagatgcactccaggaagagagttacagtcctctcccacactggatattggatatcattttcttccatctctctaaaggggaataagacctttctcacaaagttattgtgaagttcaagtgaagtgaggacaaagtgctacacaaaagtcctgcccttttgtctcaggataatatattttgcaagtcctattgaggtgggaagttaaagaaaaaattaaaaagagaagtaagttttcctgtattaggctgacttgttccagaggcagcaatgggcacagcccagacccagggaaagtcttgataatactatctaaggagccaggacac

SEQ ID NO: 1277 - DNA, 4001 bp, Homo sapiens
ctgattactttccaacatgtcagctttgtagctcagatataattgagtgtgaggccaggtttaagatgatggacaatttaaggttgggaataagatcagaattgaaaatggcaatgtttcttttgctcccccttacaatagatcatagaggatttataataatatttgagatgccaacaaaatgcaccctgtggaacagctatttgaaaaccacacaagggcaccgtacatactcacattactaaacactttctacaacacaacacagacccatctagaccttgctcctgttgatgcctattgtatttggtttcctctgaacacgtaccatttctcaagttatgttacaaccgtgagctcttctaacatcatgcctcagtactgaagaagcatcagtgatgtgatgattctccaggtaacctgttttgaggaacccaggcagggcaatgcttgcaagcaaagaataccaactatcttgccattgccaacggcaaatgggtaacagcgtggctttgacccaagaaaactaaagggaaaaatcatggcagttgtaccgcttttgtagtgtttatttacatcaaccacagggttatctctaggaatggcttcacactcattagagatctcttttcttgattagtgttgtagagatacaaacagttcatattatgaaattcggttttgataacatcaatttgaatataaatagctaaaccatagagttcttggccttcttaaaatgaatacgtttctataggcattgcttaacagtgtatgaaaaaccgtttctgcagtggctatcagtaagttacaaggttgagacggtctgggaggccctaaaatgatcctggtccggcgaacatagagggaagaggtttcaacacgcaagcggctaaggctaaaccaagcttggcttatgagacccttggagtatttactgtcattcctgtaataaccttcttcatctgagcctgaagatctgtgccctctccaccgcccacctccaatcccagactggagagcaattccgcttcctgcgcacagaagaggaggctgccggtcccaggtggccggtgcagatcctcggtctctgcagagcgaaagattttggtcttcctgcagtcctgcctagcagtctgcaaggcggcttccaagcacagaaacgacaggattgatcaaagtcggggcagagacctcggaatacaatgagtgcttggactccagactcgtcccaaacctaaactcccaattcctgttcaaaaggcggtacaagcccaaatcccaataaagcagaagggcaaaggagcagcgccagggagcctttccaaacaaaccccaccatcaacctgccactgggaaaacgcccaccgagcccttagcgcatctgccggggtgatgcacccaccgaggtccccgcagcgcgggcaggaaagctttggttgcggcgtggggagcccagacgcgcggcgcgcaaccacatctaccctccgagcccaggcggattgggggggtgggaaggggacgctgtgagccactattggggaagccggggaccaccgcaagcaaccccccgcctcagcagaggaaaaataaaacgctggcaacaagtgggaggtgcagcccccatggtcaggcccgaggggccgggcgcaggcagagcgggagaaggcagacacagggacccggagcgcgcccacccccgcgttcagcccatcccgcctgcgacccccgggccggccaggggctgcggaactcccgtccccgcacagcccaggcggcgccgccgcggagacccccggggccggcggagaccccaaggccagccgccccgaggccagccgcccctccagcgcactcactgctgcattcgtcgtccgcgcagagtttgtgctccgagaaccgccggccagtgctggggtccagctggcccggcacccgccagggcagccggagcacgagcagccagacgagcagcccaggcgccgcagccatgttgtggtcacctcggggagccggtgacgcggaggaggaggccggggcgggcgcagaggggcgggacgggggcggggacggggcggggacgggggggctggggcgggggctggggcggggacggggcggggacgggggcggggacgggggcgggggcgggggcggggacggggcggggacgggggcagggacgggggcagggacgggggcagggacgcgggcagggaccaggcggagcgccgggggcatgtgggaagacaagcgcagaggggcggcgcccgcgaaggtctgagcagtttccgactgacacgtcagcagaggctctaggagggatgcgggagacctccaggaggaggactgacagcagcctcctcctctcctcgaagccttctcctctggtcgctgccgtggcaaccaggactccctcgcccaatcacctgcctttgccccagtccctcgcagcacctccgcgtgactccattcttagttcacccctccccgcgcgcttgggtcccccaaccctgcgccatctcaacaggtcccttctggcgccttctcgcagtttctggtttgtggcctgtcccgaaccagccccccacttcaccccgctacttcaccccgctacccccactcttggcatggtacctccttttctgaactgccaaatcccacccgcgatttgccactgttagtctctggtttcaggctccctccttttcagcctcccagggcttccttgggggcaccatcccgtggtgctctttgattaagaaagggggaggtgagtggaatagggggctgaggatataaatcagagcccgtggcctgcttggtcgttgatagaaatgggtaatggtccttgggctgagatcttgagattcctagatctatatccataggaaaaaagtaaattaatttaataacagtgtgatgagcttccattttatacttatttcatgccagaattaagattaatcttcacaacaatcgcaccttagagtagtaggtcctattatgatccccatttcagagatgactaccttaaggcattcaaacacctagtgagtgatggagctaagattcaaacccaggtagtatgctcctttttaatcacagctctgtaaagcctccatcaagcaacaagcaatttttgtactttctttctgagcagggaagcaaaatcttatttaaatcatactataactggatgatttatatgtgcagttaaaaaagcgggggactgcatgagcaggtcagcccagagaagagtggctacaatgctctccagaagagtggctacaatgctctccagccctggttgaagaacttggcatctgtctgtgaccagcagcttctcattgcaatctctaaggttactcatcaaccttgaacaacaaacccagcagctggtttcccaaacaaatcgtattacttaaaagcaagaagaaagaatgtggcttgtctgtgcaatccattatatcgaataaggaaaaaacggtaaacagatgctcacaaatttttgtctgtaggagccgtgagagttcctactgggccaatgtaattccaatgctgtcttgagaaatatacatttggtaaggtcacggacaagcactttctatccaagtagtagttctgttcattcttcatttcttttctactgtgtatttatttgttttaatatcttagatgtgtctaataggcatctctaacaatatgttgaaaaccaaactctttatctttttctctcaaactctgctcctttcggtcttccctatttgaggaataggaatgacaatttaattcctatcttctaggtgcttaagccaaaaacatacaaaccatcctcgacctcttttttctcacacccaagtccaatccatcagacaatcccatgtcttttttaatagctttgttgaagtataattaacctacaataaattgcacatgtttaaagtgtacaatgataatttttgacatatgtctacacccatgagaccattaccacaatg

SEQ ID NO: 1278 - DNA, 4001 bp, Homo sapiens
gctgggattacaggcatgtgccacaacacctggctaattttcgtatttttagaagagatggggtttcatcatgttggctaagctggtctcgaactcctggcctcaagtgatccgcctgcctcggactctcaaagtgctgggattacaggtgtgagccactgtgccggctgactggttatttctttaggatcgattactagacatgacattaatacaatataaaaggatataaccatttttaaggcttatcatacacatcatgaaactatttttcaggatggctctaagaattcctagttctactaacagtgtacatatgacctatctaattctttcttttcatcctttgtgagttgaaatacagacccacctaattcttaaaatttagactttgatatgagacatataaactgaagttttcccactgagattatacatgttgtcttattcacttaagaatttaccaacacaaaaattatactaaattattttacaaggttagcttgaattaaaagcattaatttctgttcatattagaaactgaaaaagaaacaaaaggactgtgattataaaaccatacttgaatttatgagttaaagtatgcattaatttactcacaacaaggacagttctccataagaaaatggcaaacgaagcaattcccaagaaggcagtgataaatacaggtttccatggcagtccataaaaatcaggcccaggctgaacatcatcaggcaatgtagcaactagctgaatgttagaaataatgttagaaataatgagaaaccttaaagaagcttaccataaagcagtcacaaagactcattcacagaaattctaaaccaactctatcagatacctatcccctcaaaaatcttcagtagctctcactgctttaagaaaaacaggatactgggagtctcatacttattgtttggcctgtggtgttttgaagtactatgactctaaatgtctttaggttgggcatatatttctagtttcaataggccctgatacaatatgttatctaaaacatggctggaatctctctgcatcatacttttgtcttgaataaattggtttttattgcttaaaaaaccacataagacaaaaaaccttttatatacaagtaactaactttttatggctgcaaataaaaccaatatgatgataatgaatatcacaaataacgttttattcctctaagatttaaaatcttaaatcgacttacataaacaaagaacaaatgctgactaagttcggatagctcctgataactgatctagataaaccgctttgaatttagtgccttaattctaaatgtttccttgaaaacagtgcattaaacacctgtctgctctatgctgtttccacagccctttacaagtacactatcacactggtcccatcccacaacagagccgggggttatgcagaaaagacctgtaggttctctgtgttttgatcatgacttcacaccagaacataaagtgctgtcacttcgtaagtactcaataaaaaaaaaaaaaagagtgacgaaaccttctcaaacacactcccacctgcctccctaaacagcatagaaacgtcttgctttcctcggatctgacacactccatttctcctttgcacagacaatcagtgcacccactctgcttagaactcatccacccgcctgtgacagcttgggtccctccccgggaatcgggactgtcacctccagcagcttggctatgaaggctgcgtagagcacagacaagggtcccacaagttccgggtcccccggggtagcggcgatagaaggcacagtggcaggtactgagtccattgtgtagaacagctgaacgcaagcgacaattccctgcggaatggcactgggccccctgtttttcagagcttcctcctccggaaaggccccaattcagggggcggactctgggattgaacttcgccttccacagctgcctgcactttcgctttatgccgcctataaaacacgtcatcagccactgcccctggcgcacctcaaggcaccaaaggagccggccggcgagggcggggccagagcggacggaaccaactatcgaggggacgggagagaagagcgaatagggctagagcggaagaatcccagtaaaaagaggcggaagtgactggcgctttcgccaggaaccggcgacttaaagagccccagagtaatgaggccagggatttacctggaggaggattgtgggcggcagctggggaaaaggagaaaagcaggtctctcgtgccggcccggagctggcccttcctgtcacagcgtggaaggaccaccgctcagatggggcgccactgcagtgcgcggcctttcttccttgcccactcagtcctctgcttactgttccgcctccagacctccattgcgctcgctgtctcacattcttgccgacactctattaaaaagtcttacccaggagtcatgtcatcgtgtcacccccatgcacatgggttgagttatgggtcccacttttttttttagatggtggctgcggggaaggggagggagtctccctatgttgcccaggctggactcgaactccggggctcaagccatctaagaagctgggactacaagtgtccggccacatcttaaggttatatgacttgtggaaaaggacaaggataatgaatagtatggaaatcacgttccaaaagttgaagaaaccggggacatttaatctgtggggaaaaaatggtatctgtagataaaaaataccatttttagacctttaaaggtctctcttcgagttgaatataaagtcaactcagaggaacaatcaagcaagaacaagcaggaaaaccctgagaaagaagagcagtgaagggtgtggtacaagaggagggcaggatctgtaataacagtatggtactggcccaaggatgcagaccgaccacggggcagaataaaaaatccagaaatagacccaactgcactggaaatttgcgatacagcaaggcagctggttaacagactttttaataagtggtattacatatctagataacaatatggaaaatgataaaactggatctttttctcattgttcataaattccaagttaatcagaaacctgaatgtaaaaaatgaaaacaaacaagttgaaaaaattgagtgactgtctctatgtattatgtgagtgggcaagaccttcctaattatgtatcaaaatccaaaagcaacaaaggaaaatattcgtaaatttgattactggaaaaccaaaaaaacttgcccaaccccatccaaaaaaattgcaaaataatcaaactttggcaatggtaacctaagaaaaaatatttgtaacatattatgaaggattaatattcctaaaatataaagtgctttacaaataagaagatagccgctagcaaacctatagaaaaatgggctgaggtaatgaacagatcccaggaaaagaaatgcaaataatttaaaaacatatggaaacatgctctgcctcactcatgatacaagaaatacaaaatgaacctacaatgaaatatgatttctcacttatcttggcaagatccaaacatttgacaacacactctgtaggtgagagaatgtggaggaagcaggcactctcatgctatgctgatctttatataaaatcatacaacccctatgatttggcaacgtctcctgaaataacttgtgtatttacctactgactcaacaatcctacttctaaagatctatctcaaagatactggggatataacaacaaatgctgaaaaaatatatgcacaaaactatattattccagcattacttataacaaaagactagaaacaaccaaaatggccatgaatgaaagacatattaaatacaacaaagtatactgtgaagctataaaagaaaataattttatatactgctagggtatgctgtcagaatacattttttttaaaaggtagagaaaagtagagactactacttttatctaagaaagttaggattt

SEQ ID NO: 1279 - DNA, 4001 bp, Homo sapiens
aaccatcagtcaggagagtgtaggaggagagagttcccttattgcaagtattttatcggagaagctttaaaagccatagaaaccaaatcctatttagcgagaaagttagcaaattgcctttattcagaagaagcaagttacatggaactggacatgaggctgccctcctccttgcacctccagctgtgcctaatgacaccgaaatgccgctgtgtgtggcacgccacaggccatggagtagctccagctaacgcagatggacatcccaggtgccccagggagatcaggcccacggagtgggatgaagccctgaggcggggaggccagcatggagacacctgctgagggaaagcccacgagcgctgcggccacctccaatcctgcccatctgggtggagacctacaggcaccctgcaggctggggtgtcatcccactcaccgcccagggctgccctcggccaggagagcgccacattcagacacttgttgcatgtgaggcaacaggccagggtggaaccggacaaagggggcctcccgggaagggccaggcttgccggcgctcctgcgctgcggccgctctgccccaatcctgcaggtgcctatcagaggcctgtctggcacctctgctttcttcctccatgggttccgaactcagagaggagacgcgggattactcaccactcccctccactcgcatgcatgctcagacacaaacacagcctctctgacgtggcttccacggagccccaaagtgggagagccaagtgcaaactatcaggccgcggacgatcaagagctcacctgtccggccgtccagtcgcccgccgggccgccttgaggctcctgggctgcagccctgatgcctggaaactttgggactggcctctagcctcgctgggcttccaaccctgtggccgaggggagatgccaagatgcacagttagcacctcgacccgcggctcggtcgcctgtctgcccccggggctgcccgccggctccaggtccactcgggcccacggccgcgacactcagggccgccgcctgcccggatgggctccctggggtctgagcgcgcaggagccgccagcgccgggcccgtaattgcgtgcgcccggggtctggcggccgcggctcgcagacgtcaggaggctccgggacgcgcacgggcgccggcgcaggggaacgggcgggccaggggcgggcacggcgggcacccccacccggagcgcgccccgccccctgtcattcgtgcccgtggctcgcggaggccgcccggccctgtccgctgccagaccttgccagggccgcgcagtacctgccgaccccaacttgcccggacgtttccgtcccgcccgctccgctcgggggcgcgggaccgccggccagtccgtctgtcggtctgtcccggcgttcgaggccacccaccggccccgactgctcagcggcggccaggccaggccagagcgcctgccgcgcgccgcagcccacccggcccggacgacgaccccagcgccgaccccagcgccgctggccccgggccgcgcgaggcctgccgggagctggagtcccgcgcgggtggccggaccacaactcccaggaggccccgcggcggcgctgcgcgcgcagccccagcccatcccgtgcggaccctacgccgagtccagcccggggctgctgggccagcgggagcgggaaccggacggcgctcgcgttctgccagagcggagaacgactcggggacggtgcggaggaccaggggaggagatccgcgcccgcacgcaccatcagccgagaggacggcccgcatcgcgccagtgacctaggagcgactcggggacggcttcgggctcccaggccctcctgggccaccgggcactgaggagagcggcggctggaaactgtgggacccgaagggcgggagcccagggcccgcccccgccggagcgcccccgccatggccacgcccccgccacggggatgggcagggcaagcaccggaagtgcgtcacgcgggagcgtctgcgtcgcctaccctgcgtggcgcagctaggttccgagcggcttagcctccgggcgcctgcgcagtggcggtcctagagacgcactcggttgccatagagacgggggcttgggagcgacgtcgcgctcgctggcactggcggcacttgccgcgccgcagccacctctttccgactccaccagtgcgggccctatccggggttttgagtcacgcagacctggacacagcgagaaacggcagtccgggcccgtcctcccgccccgggttctgcaccccagagttggacgcttgcttctcgctttctcctgagagaagtctccgcgtttctgaacaatgcactgctagtttctcatttctttctttctttctttttttttttttggagacggagcctcgccctgtcgcccaggctggagtgcaatggcgcgatctcggctcattgcaacctccgcctccagggcttaaactattctcttgcttcagcctcccgagcagctgggactacaggcatgcgctaccacgcacagctaatttttgcatttttagtcaagacggggtttcaccattttggccaggctgatttcgaactcctgacctcgtgatctgccctcctagggctcccaacgtgctgggattataggcgtgagccaccgcgcccggcctctcatttcttaattgtagacattgcgtacttccggagaaggtccctgagaacctggctgatcttccccgctgcacccctcacgtggtcctgttagctcccaaactgtcaacctgaaaggaaacccagaggcaggctctccaggacaagtgagttaatctgggaatcgcagggggttgcagcctaggctgttcgtgccatgacagatcataggcctatctgagagggccgggcgaaggggaaaatacagatgagctcacaaaagttgttttgtaacaaaaaccactggctgtgggcgcttgctgcaggagtgggcgttagcttgttgttggagagagccttaccaggccgacgtccttgtgcaagctgcttatctagaatactgcagtcctgaggaatttccctgcagtaagtccggttacaggcaaacgtgcaggacgtgcaggagcgtcttgtgaggaggcctgctgcaggtattcctgcatgagagctcccccttcgtggcctcccgactccatttgtttagggattggtggaagtagttccattttggtacctgcaactttcacagctgtcgtgatgaaatcaggcttagctcttcatgattgagtacctgctgttcactgctacagtataaaaccatgccacaattcctgtacaatctttttttttcttttgagttaataattacctaatattttcacatatctagctttttactaacccatggccagcctttttttcaagtaccccaacgttttcgccacatgcctaacgataccgttttccaaaggctcaaacacatccgttgtgtctaactgattctcctgttccgacctagaccgatcacttcctgacccggctgcacagctcttatctcgagcttttctctgctctcatccttgagactcactttgtctgtctcctttcttggattccctgtgtaaacgaaaaataaaatcctaagctctctaccaactgttttttgttttgttttgtatttgagacagggtcttgctctgttgcccaggctggagtgcagtggcactatcttggttgactgcagcctctgcttcctggattcaagtgatcctcccacctcagcctcctgagtagctaggaccacagacatgcaccaccatgccggttatttttaaatttttagtagagacagggtgtcaccatgttgcccaggctggtctcaaactcctgggctatgctgtttgctcacctctgccttctgaagtgctgggattggctgggtgcgatggcttcacgcctgtaatcccagcagtttgggaggctgaggagggcagatcac

SEQ ID NO: 1280 - DNA, 4001 bp, Homo sapiens
atctacccacagttcacaggctgtgcccctggctggcatctgaaccccgctgcaggcaactgctcccgatgtttaaaatgatggaggcagtcagggtgtgaagactcgggcgacagatcgacagatgtgctttggcaaatcggaacttacctcagagcacacaccagcctcgaggcagcgtcccaggcatttaattgctacttcctgggtcacagattcgctcggctaccaggctttcctgttggaagctaaagccactggagacacaacacagcaaaccagacgggcagccagcaagccaggctggagaaaatggtttctaaaggcagtgtcacacatttagcatttaccgtcttaaccacgcaagcagacaccgggtctgttctattgctgcttagtttctctttttcacaagaaactgcaagctctcagagggcaggaggacttccgaaccatcagtcaggagagtgtaggaggagagagttcccttattgcaagtattttatcggagaagctttaaaagccatagaaaccaaatcctatttagcgagaaagttagcaaattgcctttattcagaagaagcaagttacatggaactggacatgaggctgccctcctccttgcacctccagctgtgcctaatgacaccgaaatgccgctgtgtgtggcacgccacaggccatggagtagctccagctaacgcagatggacatcccaggtgccccagggagatcaggcccacggagtgggatgaagccctgaggcggggaggccagcatggagacacctgctgagggaaagcccacgagcgctgcggccacctccaatcctgcccatctgggtggagacctacaggcaccctgcaggctggggtgtcatcccactcaccgcccagggctgccctcggccaggagagcgccacattcagacacttgttgcatgtgaggcaacaggccagggtggaaccggacaaagggggcctcccgggaagggccaggcttgccggcgctcctgcgctgcggccgctctgccccaatcctgcaggtgcctatcagaggcctgtctggcacctctgctttcttcctccatgggttccgaactcagagaggagacgcgggattactcaccactcccctccactcgcatgcatgctcagacacaaacacagcctctctgacgtggcttccacggagccccaaagtgggagagccaagtgcaaactatcaggccgcggacgatcaagagctcacctgtccggccgtccagtcgcccgccgggccgccttgaggctcctgggctgcagccctgatgcctggaaactttgggactggcctctagcctcgctgggcttccaaccctgtggccgaggggagatgccaagatgcacagttagcacctcgacccgcggctcggtcgcctgtctgcccccggggctgcccgccggctccaggtccactcgggcccacggccgcgacactcagggccgccgcctgcccggatgggctccctggggtctgagcgcgcaggagccgccagcgccgggcccgtaattgcgtgcgcccggggtctggcggccgcggctcgcagacgtcaggaggctccgggacgcgcacgggcgccggcgcaggggaacgggcgggccaggggcgggcacggcgggcacccccacccggagcgcgccccgccccctgtcattcgtgcccgtggctcgcggaggccgcccggccctgtccgctgccagaccttgccagggccgcgcagtacctgccgaccccaacttgcccggacgtttccgtcccgcccgctccgctcgggggcgcgggaccgccggccagtccgtctgtcggtctgtcccggcgttcgaggccacccaccggccccgactgctcagcggcggccaggccaggccagagcgcctgccgcgcgccgcagcccacccggcccggacgacgaccccagcgccgaccccagcgccgctggccccgggccgcgcgaggcctgccgggagctggagtcccgcgcgggtggccggaccacaactcccaggaggccccgcggcggcgctgcgcgcgcagccccagcccatcccgtgcggaccctacgccgagtccagcccggggctgctgggccagcgggagcgggaaccggacggcgctcgcgttctgccagagcggagaacgactcggggacggtgcggaggaccaggggaggagatccgcgcccgcacgcaccatcagccgagaggacggcccgcatcgcgccagtgacctaggagcgactcggggacggcttcgggctcccaggccctcctgggccaccgggcactgaggagagcggcggctggaaactgtgggacccgaagggcgggagcccagggcccgcccccgccggagcgcccccgccatggccacgcccccgccacggggatgggcagggcaagcaccggaagtgcgtcacgcgggagcgtctgcgtcgcctaccctgcgtggcgcagctaggttccgagcggcttagcctccgggcgcctgcgcagtggcggtcctagagacgcactcggttgccatagagacgggggcttgggagcgacgtcgcgctcgctggcactggcggcacttgccgcgccgcagccacctctttccgactccaccagtgcgggccctatccggggttttgagtcacgcagacctggacacagcgagaaacggcagtccgggcccgtcctcccgccccgggttctgcaccccagagttggacgcttgcttctcgctttctcctgagagaagtctccgcgtttctgaacaatgcactgctagtttctcatttctttctttctttctttttttttttttggagacggagcctcgccctgtcgcccaggctggagtgcaatggcgcgatctcggctcattgcaacctccgcctccagggcttaaactattctcttgcttcagcctcccgagcagctgggactacaggcatgcgctaccacgcacagctaatttttgcatttttagtcaagacggggtttcaccattttggccaggctgatttcgaactcctgacctcgtgatctgccctcctagggctcccaacgtgctgggattataggcgtgagccaccgcgcccggcctctcatttcttaattgtagacattgcgtacttccggagaaggtccctgagaacctggctgatcttccccgctgcacccctcacgtggtcctgttagctcccaaactgtcaacctgaaaggaaacccagaggcaggctctccaggacaagtgagttaatctgggaatcgcagggggttgcagcctaggctgttcgtgccatgacagatcataggcctatctgagagggccgggcgaaggggaaaatacagatgagctcacaaaagttgttttgtaacaaaaaccactggctgtgggcgcttgctgcaggagtgggcgttagcttgttgttggagagagccttaccaggccgacgtccttgtgcaagctgcttatctagaatactgcagtcctgaggaatttccctgcagtaagtccggttacaggcaaacgtgcaggacgtgcaggagcgtcttgtgaggaggcctgctgcaggtattcctgcatgagagctcccccttcgtggcctcccgactccatttgtttagggattggtggaagtagttccattttggtacctgcaactttcacagctgtcgtgatgaaatcaggcttagctcttcatgattgagtacctgctgttcactgctacagtataaaaccatgccacaattcctgtacaatctttttttttcttttgagttaataattacctaatattttcacatatctagctttttactaacccatggccagcctttttttcaagtaccccaacgttttcgccacatgcctaacgataccgttttccaaaggctcaaacacatccgttgtgtctaactgattctcctgttccgacctagaccgatcacttcctgacccggctgcacagc

SEQ ID NO: 1281 - DNA, 4001 bp, Homo sapiens
aaatatttaagaaaactaaaacatacattagaaaatattaggaaatgattagtgaatcaaaatatttttttcctttatcttacaataacgcaaccatctttaatttttaaaacaaaaaagttaacataatttcttttacatattagattttttagttccctcggcaataaaatttattttttaaaaacacagaaattttaaatttaagttttttaacttaaatttctctgtataagctattttccttcagtaatatcttgccttagtatatgactacacacctcaaagctcaaaccatcctgagcaacaccatgaaagaagaaaccacattacctatgtagcacattgctgcttacccgatattcactgaaaggggtccactgaagacactaactgacaaaatgtataaatccagctacacacaactccttaaacatgaaggaaacaaacacttaagaataagaacctcaccaggactaaaatccaggtaccgattctcagtctactggaacaaacgcagtcacattttggggaaacagaaagtactacgttctccaattcatgtgcctggaaatacaattctttaaccaccaagagcaaaagaaatgaaaataaatctaagatctaaatttagttgtaaattagagatattgaatgttttaaaaagaatactcgcagcaaacagtcctgtctgctacagcaaaatctcaccctccttcctaaatctgttttggggtgcctgtgaaaccatgaaaatggcaattcaaacaagagaaatgccttatcaatcaaaatttacagtggcttatttcaaaggagtcataaaaaaaatccaaatacatcatctcgaactctcaggaataaagaatactgaaattcttccacgggtaaggaaaaacggaaacaaaacaaatcccacaaaacttcagatattttaaacattttttaaacttccagttatttaaagttccagtagcgtatacttagttccgattaataaatcaacagcagttgtatgcccgccaactgcggcccaaatatgtaaaatcaaaaaaaggggctttaggaacttgtttactataaaacgagcaaaaagaaacaagaaaaagcttctccaatgaaagaaaaattagaagagaaagaagacaagaataggtagccttgatttggaaagggggtggggggaagcctggaaagtgaaggtggtggggggaggtggaaaagcagctcagaggttgtaccttggggagcgggagatggaactgtctggataaatgggcagactccccccaacctggagggctggattgcggctggccagattaatttatccactctcattttaccacgatcatgaaaattacagagttaatcaaaggccgtcagccttacgttttccccactaacacagactggatgtcagtcgcaaatggatgggggtgacgcggaagggcgcaacagcatctcggttaggaagggaaaaaacttcgcaagaggaagcagcagcttctctcctggcccctagcaccggccggcgaagttgcgccacaggcaccccttccccggcgggcgccccctccccctcgcaccgcactactacgctgcactacccttcaaactgcccccgaagtccaagtacgcctccgcttcctcctacccccggacccatcccaactaagttccaggcgaagctcccgcccagagaatggcctgttccggacaacaggtgggcagcggcgccagcagggccgggcctctcctggccaggcccactccactcctccccggcccagggccgggggcgcccggctccgggacagggagggggagctcgctcccttacctccgccatatttgccgtactgccgggtcacatctccgcggcggccgcagctgggtcacggccagaacccggatgtgagactcagcaacgggactccggccgctgccgtctctgccgctcccgccgccactgcctcggcgggaacgcgcaggagccgcccgagcgcgcccaccacaccccactccgccccctcgcggcgccccggctgggctggactggagggaaaagaccagcgagcacgcgccggagcaggggcgcgcgcgcggccccgcggccagccctccccgggaagagcggagggggcggagtcaaggtgggtgtgggaggaggtgggcaaccgcgcggggcgcttcgctggctccagctgatccgccactccaggcggagggggttgtctacggatcagagaggtcaaggaacagtgccaaaggagtcacatccagcattgacacagcagaggaaaaatacgtaatattttacatgtaggtcgtttttgaaatgcatttgctgaaaaacggatgttgctgtgatgcaacggcggcaagaactgtgctttgaaagcggttatgccttgacaaatatttctccatcagtagattcccgacaggaaatgtaaaattctatatccccaaatctctagagaggtcagagcaaaaattaatggaaggggttatgataggcagtccgccatcctcatgtcatttgcgttttctcacacacttctgtcatgccggtagcaacacagttatgtactgaattttgcacaactagacaaaatttaaaatactgaaaattgactgttttatggatatcatctatttagtagcatggagggagaacctacttatttgcaatgcctgaaatgcctgtaacttgaaagtttattttaatgtattggcctacagctgccaattggccgtgatgccaatgctgatgatggccagaaccaatgatttcaaagtaactaacatgtttcacttccattatactaaggcacatactgaataacacaaaggtgacattaaaacagtcactaacatattttactaaaccagtttgaaagtctttatttcaaaagactgggatttttttcctaatcttcaagggttcctcttaatgcagtttcaaaagtggctaccaaaatcaaccatttaaatacgagaattattcattccttccaaataatgtgaaccaatactacattgcataaatgtgtacatatacaatttttcttaaagttaatacttaacttataatgcaatataggggaggctattaaattatttatattcccttaaaattctagactctatcaagcattttcctatttccaaagattcaatgttaatttgaaactgttatgtccaataataatctgtgcatgaataaactgcatttacagatatatgaagtagctgctaagtgaaaggacattacctggtaatttgacaggaaaagagtccacagacagtctgtaaaccaattaaacataaacatctgatgcacattttctactgaaagaaaagcaagggaaagaagagaaaggaaaactttaaggttcccaaatctacaaacaatttttaccattaactgtactgtacagtattttcattttattttttagaaaacttatataaaagtgtttttcaggattccttgggggaataaatattttagcagaggtatatagtttctaatagttaccctgttgaattatgtcaatcctctggacttgaaataaaaatgactttttaaaagtgtcagttcatatccaaatagttttcaatcaatacacttaatgaaaagagctgaaggcaaagaacaatggatatacatggacctgaggtgggtacagacacaattaggggcctagaggtacaaactcaggctttataccatggagatgaaggagggttttccattaacatatgaaagctaatttatgaaatttggctaccaaaggaaaattaaaagtgttacaatacaaggtacagaaataacttgcttaagtacactgaatctttgattcttcagttaaactaccaacagaaatcccaactatgataaagagcaggggatcatagtctattaacctactgaatgaatcctaaacttgtcaggaaaatggaagtctgaaacatttctgaatgggtatcta

SEQ ID NO: 1282 - DNA, 4001 bp, Homo sapiens
ccaaaaaggtacctctcaaaatgcaccaagaaaatactgtacttataacaatttagactctggggttagctgactgaaatagattaatacaacacatccaaaactaaaaaattctatatctaacaattttcagcgtccatgagtctcttttgagattagtttataaactatttcctgaaatttttatttaaaagcaacagcctacaccatgtctttatgatgtggtggtaaaattttatggataattactaatttggttgaaaatacctacatctaaaaaacttagcctattacatttggaagccccacatctatagtgacaatcagcatcatctttcgttagtttcattttttgttattaatgccactctaaaacacttatataggcttttggttcttcaaataacagttttggattttcttttcataatttttacagttttatccagtggccccattttatcagaatattacaaactatgattatggtttttacattgatgacatgttatttttatctcacccaaattctggaaatttttggcccatcagttctcaaacactggaacatataagaagagtaatataatcttatattacttgagggagtttggattttccctcccttaatctccaagtgtacccctgcctaccagcatcacatccgtcttgtctgcattgaacctcaaccagttggttcttaaccacgtccgaaactcagccaggcactgggagaatcgagcgaccacaccatctggatcaaaggaaagagagcctcagtagcaaggagacagaaacgatgatacaagctcaccatccaccctgtttcgcatttttaaaaagatggtcgggaatcaggacaaggatcccatgacaattttagaaaaacatttaatgagccttaagtcatgcaatttgtaactaatgataaaggaataaaagcgacccaataaataggtcgcctcattccacccataagtgaagaaggttcagtcaactccgggtcatcttggtgaagcggcctcaatagccaagtcaatcttgtaattacataagttcttctgcagaaatgcagaattctagcgttggaggaagctttaaatagggaaaactgaagcccagagagggatagtgactcgctcaaggttacacagcatgcagggaccacagataggctccaggccagggacctagccactacaagctgaaagaacaagagtaaagagcggcgggcatctgtcccaagggatcctcccacgcgctaggaggacctcgtttccttacagtaataccctattcgagtctctcctccctccctgactccatccgaaaagggcaagttggcccagggcgctgctcaccataaaggctgcagtgcaagcgagagcctcccggggatgggacacaagtgagggaaatacaggagaaagaggcggagccacagcagggtggtcagcttagccccaccccgactgggatcagggaccgaagcgaacggggcgaggcgaactcactccgcagcggattcccagcgcggcgccaccaccgcgaaggcaaaaaggcggcgctgggaggcagtcgatggccagagggaggaagctgcgcatgcgcctttggcagccggcggagagcaagccaggcgcgttctgcggcagcccctccccggaagttaagggtcttccgggcggtacactgccgtgggggaggggaaggagagaaaggggactgaggacacctcaggagcccctcatcccaaactggaatagaaggggagagatggcttgtggaggctgcacttacagccgctgccgctgctgccgccgccaccttcgctgctgccgccaccgcctgaagaagccccatccatccgcctgcagccgggagactcagagcctgggaggggcctgaggcccgggccgcccgcctccttcttccagtcgtcgtccggagcttcctccagctccaccaaccctctgccctcccctccgcctccgccctcctcctcggcctcgtgccgccagccaaccgcgcggccgcttgttgagccagggctccaccgtcgccatgacgcccggcaaacattccggagcctcggcccgagccgctaacggaggagcttgggggtacagggacttcagaggcggccaaaaaaaggggtggtgcaccactccccagctggtcgccaccatgccagtctctccggcaggcagtcacaagcagcagaacttcgggttgtaagttccggcgctaaaaaccgtagtccatccccctgggacccggagggagcccttctattaatagataccatttctggatttggaaaggggccctaccctaactgggttcagtctgtagaccttgaagctcctaggccacaatgtctcctttatcgacctaccgcagtctttaaaagaatctctactgggctgggcgcggtggctcacacctgtaatcccggcactttgggaggccgagtggggtggatcacctgaggtcagaagttagcgtccaggctggccaacatggtgaaaccccgtctgtactaaaaatacaaaaagttagccggacgtggtggcacatgcctgtaatcccagctacttgggaggctgaggcaggagaatcccttgaacccggaaggcggaggttgcagtaagccgagatcgtgccgttgcactcgagcctgagcaacagagcgagactctgtctaaaaaataagataaaataaatctctattgctgtgcttgctgtgtgagaaaagacctggtttagaaccatcgttctagcacttctagtttgttaaggcctgcagtctctcaagcttgatgctttcatgctgtgcccagacgttcaagagcctcagcttctgtgagccaccaggccgaacattgctgtgctctgtagtagaggtattttattgtcgtctcgtcaataccatcttactttaaaactaattcctgcttccaacattctgttgttatgcagcagttgaacaagactgtagaaaagcacacagctgtgtggacttgtcttactttaaatggttccttagcgctgcccgtaatgctgcccactaagttcccccaaaattccctaagtaatttgttttctcttcccctctccaatctcctccacctcagctaatctttcttcagcggaacttgttgagagttcttgggagagaaccttgcattctctcttgaatatggtactcacgcttttgtccatcctaccactccatcaaaacagcttctatgaaagccagcaatagccatgcaaccaaatacaatggctgatccacagtttcattctttttgaatgaagcagtgtcggtcgggtttatcgcttctcgatctttgaaaagctttatttgggttctgagaaaccactcttcctagttcttgtcttggttcatggtttcacctttcccagatcctttgctggtatctgttcctcactaccataactaaatacagtcatgcatcgatggtgataccttctgagaaataccttgttagccaatttcagcattttgcaaatatcttctagtgtacttacacaaacgtagatgtatgggctactatacacctaggctacaattgtatagtagactgtacacctaagctatagtaggctatacatctaggtttgtgtaagtacactaaatggtgtttgcataatgatgaaaatgcatttgttgcttctaggctaccaacctgcatagcatgttactgtactgaatactgtaggcaattgtaacacaatgctaagtatttgtgtatgtaaacatagaaaaggtaatgtcttgtgcttgaatgttgtgacaactacaacgttgttagacaataggaatttttcagctctgctaccagatcaccattgtatatgtgattcattgttgatgatccaggactgtattggtattgctgggttagtccataaacctcttcactctgatgtctttaatatcacctataatgatgattcacaaatgttaatctctg

SEQ ID NO: 1283 - DNA, 4001 bp, Homo sapiens
ttttgtatttttagtagagacggggtttcaccgtgttagccaggatggtctcgatctcatgaccttgtgatccgcctgcctcggtctcccaaagtgctgggattacaggcatgagctacagtgcctggccaaaaaaaaatttaattagctggccatggtggcacttgtctgtggccccagctactcaggaggatagctttagcccaggagacccaggctgcagtgagccatggttgcatcactgtaaaaaaaacaaaaaacaggccaagtggctcacgtctgtaatcccagcactttgggaggctgaggcaggaggatcacctgaggtcaggagtttgagatgagcctagccaacgtggcgagagacctcgtcgctactaaaaatgcaaaaattagccgggcgtggtggcacgcgcctgtaatcccagctactcgggaggctgaggcaggagaatcacctgaacccgggaggcagaggttgcggtgagccgagatcgcaccattgcgctccagcctgggcgacagggtgagactccgtctcaaaaacagcaacaacaacaaacaattagccgggtgtggtggtgggcgccagtaatcccagctactcaggaggctgctgaggcaggagaatcgcttgaacctgggaggcggaggttgtagtgagtggagatcacactactgcactccagcctgggtgacagagcaagactgtcacacacacacacaaaatacaaaaaacaaagcactcagtacagtgcttacttaatacagtgcttacagtggtatacagtaagcattcaataaacgtctattattaccaaaatggctggggcaagggcatgcttcctttttttcttggctcactgcaacctccgcctcctgggcagtggtttggacaagcttgctttataactggtgagtccaacacaaatcaggcttcaaaagggattcttcctcctttcctgccctcccttcctccttcactttctttttacatatgaagaaaccaaagctcagggaagttaagcaacttgccccaagtcacacagctagcaagaggctagatctgaaccaaaatttgactccagggtccatgagttcagggttcttggaaagcctttccctggaagtgtgggggagcctgggaaaactccgcctcctcctcccagcccttgccccccacctccaaggatcctcaggatcgggtgcaaggtctggagcacagagtagccgactaccccggaacctcccccacacacgtatattaccccgcagggccggggggcacggagatgcagtccagaggggccaactgtttgatccgcaggacaaagatcccggcccccacccctaactggccaagtggctctgggccacacccctatagtcagagggtcgccgttttcgcacggggtcaaagggcacagcaggccttgccctcccctggccccggccgcgctttggaaagggaaaagctgagcggagacaccgggaaagcgacgctccagaaacaccggggccgcagaagtaacagagggcgagcgggcggacgccgaggcgggacccccgcagaggcagatgcagcctacccttcttttccactgcggcccccgagcccctcgcgggaatgcacgtggggcctcctgccgagcccttccgccccaccccagtcctgccgcccagcactcacccggcagaatcccctagcatgcgccgccgtagcagccgcagccgcctgagccgttccaggggcctcggccggccgtcttgattggtcaggtgaggggcagggccgggacgtctggtgagcgttactcggcgatccgaagtgtcagtttcagcgtgggggcgggactaagagcggagctacacaaccgattggtcaattttcgaggccggtgcggaggtcgattcctggaatggggcgggccccggaagggcgagctccgattggtcagctgcgggactggatacgctgagttcagcagcggcagtttcagtcaggctgggcggcctaggctcggcgcaggcggcagtccggagcggcggggtaggtggggcaggcggctggctactcattgtactcatcgtttcatacttttctttttttttttttttttggagacggagtctcactctgttgcccaggctggagtgcagtggcgcgatctcggctcaccacaatctctgcctcccgagttcaagcgattgattctcctgcctcagcctcccgagtagctgggactacaggcgagcgccaccatgcccggctttttttttttttttttttttttttttttttttttttgtatttttagtagagacagggtttcactatgttggccaggctggtctcgaactcctgacctcgtgatccgcccgccccggcctcccaaaatgctgggattacaggcatgagccactgcgcccggcctgctttatactttcattcaggtttttagcgagtgcccgctttgcgccagaagataaggactacacagtaaacaagaaagtgtagtattggggccggccgcggttgctcacgccagtaaacctaaaaatacaaaaattagccgggcgaggtggccggcgcctgtaatcccagctactagggaggctgaggcaggagaatcgcttgaacccagctactagggaggcagagattgcagtgaaccgagatcgcgccactgcactccagcctggatgacagagcaagacgcaagactccatctcaaaaaagaaaaaaaaaaaaaagatacccagcctgggcaacatggcaaaaccccgtctctacaaaaaatgagccaggcacgtacctgtagtccagctactcgggaggctgagatgggaggatcacctgagtccaagaggctgaggctgtggtgagctttgattgcaccactgcactccaccctgactgagagaccctgtctcaataaataaattaatttaaaaaagaaagaaagtgtggtattggcgtccaggtagacaaatggatcaatgcaacagaatagagttccgatatgtgagcaattaatttttgacaaaaatgaaagtgcaattcagtggagaaaggataatgccttcggcccggggcggtggctcacgcctgtaatcccagcgctttgggatgccgaggtgggcagatggcttgaggtaaggagttacagcccagcgacacccagcaccccccccaaaaaaatttattttatcaataatgtgtgtggaaacttgggaaaacaagaagagatggtgtcttcaacaaatgttgtaggtataattggatatccacacactcatcctaaaaaaaaaaaaaagaaacccatatgcaaaaattaacctagaatggatcatagatctagttgtgaaacctaaactatataacttagaaaaactggggccgggcgcagtggcccacgcctgtaatcccagcactttgggaggccgaggcgggtggatcacctgaggtcaggagttcaagatcagcttgggcaacatggcgaaaccccgtctctactaaaaatacaaaaattggctgggcgcggtggcttacgtctgtaatcccagcactttgggaggtccaggcaggcggatcacctgaggtcgggagttccagaccagcctgaccaacatggagaaaccccgtctctactaaaaatacaaaattagccgggcatggtggcgcatacctgtaatcccagctgctcgggaggctgaggcaggagaatcgcttgaacccgggaggcggaggtcgtggtgagccaaaatcgcaccattgcactccagcctgggcaacaagagtgaaactctgtctcaaattaaaaaaaaaaaaaaaaaagaatgaaaagaagataggtagcccctctacctccagaagagccgagggtgataacaccaggcaccgagctagcaggaagccctccgactcaagaagatggctgatccttggcaggaatgcatggattatgcagtaactctagcaagatgagctggagaggtag

SEQ ID NO: 1284 - DNA, 4001 bp, Homo sapiens
aggagttaaaagaccaacctgggcaacatagggagaccctgcctgtataaaaaaaataagttaattaaaaataaatataaataaaatacattaaaaaattttaaaagccagttattatgactaccattactgtatacataaagcaccaggcactgtgctaagtagcttatgtatttttctgtcctttactttttttaatactttcaggtaaatctcttttgatcaccatttcgtagttgagaaagagactttacccaaagctacaaaattagtaaggatgggcgagaagagtgagagtggatgattcgaactcagctctgtctacctccaaagccccttcttcttcttctccttttttttttttttaagggaagggtctcactttgtttcccaggctggtctccaactcctgatctcaggcgatcctcccgcctcggcctcccaaagtgctgggattacaggcctgagccacttcgcccagctcaaagccctttcttaactatatgacattgcctagtaactactttggtcatttcatagctaggtgttaagtcttctctctgaactgcaagctgttaacagtaacaaaacaaaagtgactgtttagtcgcttccaaaataacccattcctaagtgatccatattcaagcctttaaacaaactaactcatttaatcctcccaacgactccatgagatagtaataattattactgccgatttccaaataggaatcaggcacagaaaagttaaataacttgccccaaatcacttgactgtaagtgctgaattcagaggtgaaatggtaacttataaactgtttcatttattgactcactctcaacaatttttattaagcactcttttaggggctggggatggggcagtgactaaaccagaaaacatccctgctctcatggagcttacaatcttattcctcaatgttttcattcaaagacacaatcctaaatcctcttaaataccctaagattaccacacaaaaatatcacatttgggtaacaaaaattagcatcgaagaaggaacatgggacttgaccccagaaaagctgggtaaaatccctaattttgccatttgttagctgtgaccgtgggcaaattccttcacctgactctccatttcacggcctgtaaaaagattatttcgcacaatgaagacaatatacgctcaataaacgagtttcctttctcctccccaccatacagtgacttcataatttgtgccgtcactgagcacgtgttaaaggactacgcagaaaaacttaacgtgaacaacttcttactttccagcgcaattctcattccagatcatcacccctctaagttcaggccccagactactctgattcaaataaatcaggtggcaagtcgggaatgacagcaactcgcatcagggcctggcggtgtctatgaaatgctccaggtgaccttctccagaaggcactttggtttccgccggggagcagcgtggcctcctgagccggttccccgccgcgtgccggggaatgcaccacccgggaggagaaccccgcggctccggcacgagggtgtgccccgacactgtcttccactcaagagctctgcgactctcctgccacctgccaaccccgaccacctcctccgggctgcaactccaccccgcacccgggctgctgctccggctcctcgggtctgtgcccgccgcccgagtgacctcccgccggggcccgggcggctcgccctggccggaggggccggaaaaggccgagaggcctgacctcccgtggggcttcccttccttcctcctgggcagcgcagcctggagccagcagctctgcaccggccgggcctgctggggcgaaaagccccttacctatcttcacgaccgcatccgccagacaccggtcccacttcctgccgagctccgactcagacatgttccccacccgcgcctccagctttcctctcggccggcccccgcgctccgacccctgaaagtctcgcgagagctggaaacaagtcccaggtcaggaaggcaggcgcagacgctccagatatcgcgagatgatccgctgcttccatcccttccggttttttcagttggtcgtcaaggtgacgagttgtctggaggctcgaggtgaccctgaccttggggctgcgcctatgggtttgcgaggctgacagtttcctaggcgtcaccccaagccgtgaccaggcctttcctcctcaccaaagtgcgacattggccctggaaatcccccgggcaagagagggtacagacttgatttattcattcattaacgtactcaccttcactttccctactcactctctcattcgttcactggtttcttgcattggaattcccgcctgaaccactaacaccgaaactgctctgggaaagattacctaccgccaaatcaaatggactcttttctgacctctgtaccgcattccacacaattttccctccctctgatcctccctggctcctctattcgtttcactcccggtaacgccactctttcctcttctccccatctgctgttgtctgttggtttcctccagggctgccttttctctgccagctgtttaaggactgttggttcgcaagcttccatcaattctcttttcactgtacagactctccctgagtaattgcaaacactgccaaattatatctccaggtaaaacgtctacctcaggcctcctatccatgtatatatttacacacccacccacacacacacacacatacacatacatacacagggtgccctctgtatctgtgggttttgcatccatggatttaaccaaccatggaccagaaacatttttgaatcaaataaaaaataatgcaaaatttaaaatacagtacaactatttacctaggatttacattgtattaggtattataagtaacctagagatgatttaaagtatatgggagccagcgcagtggcatgcgaccgtagtcccagctacttgggaggctgagatgggaggattgcttgagactaggagttcgacttcatctctttaaaaaaaaataagtaattttaaaaaaggatatgtaagcatgtgtgtaggttgtatgcaaataccacgccattttatatatgggacttgagcatcctgcattttggtaactgcgagatcctgaaaccaaatgcccacagctatcaagagagattgtatatccagcctactggctagtgtcattgattttagtcttccatcctaccaacaaatagaaatctgaccacgttatgcctctgattagaagctgtcaatgaaggccgagagcagtggctcacacctgtaatcccaacactctgggaggctgaggcgggaggattgtttgaggccagtagttcaagaccagcctaggcagcatagtgagactcctgtctctacaaaaaatttaaaaaattagccaggctaatgtgatgtgtgcctttagtcccagctacttaggaggctgaggtaggaggatcacttgagcctgggaagtggaggctacactgagccatgttcatgccactgcactccagcctgggcatcagagtgataccctatcacaaaagaaaaaaaaaaaaagctgtcaatgactcccattcatacactggatctatccaagcttcaacactgcactgattctaggaagcctagtcagatagagcttagagctgccttccccttctcattgtcccactaccctgcctacccgcattgatttctctatctagtactgaaacatctggttgtagatattatctgctagtagaactagaagttgccccttcgtcttcatacttccagtcagagcacaatgccttggatagtagggtcttctatgaaatatttgttgaactgaattgaatttattcacctatttatttgtttatttatttattgagagagagtcgcgctctgttgcccaggctggagtgcagtggcacgatctcggctcactgcaacctctgcctactgggtttgagcaatt

SEQ ID NO: 1285 - DNA, 4001 bp, Homo sapiens
taaacactcacagttctcaataatgagaggaaaatgcaccctgcttgtgaattatctggaccagatcctcctcctgcaccgcctttgacccattcccagtcaaagggaagaaagaggccagtctgttggctgtaataaataaatgatggcctgggatggtaggaggaaatgatgccaggaaggcaagattctttgccttctctttagatttctgcttaactccaagagcaaaaggggcagtcaattcttctccctccagaccctcggcaccccgctcttcccctcccaacatgtacagtccactagattattaaagtcctcactctggagtgtgcagagagcctcaccctcatgtggggtccgtaccctccaagatgggtacttgagagatgacagtgtctgcaaaaagcaaatgggaggtggcattaatgtcagagagccccagaaaggtgagttctttccttatcactctccccttgctttacagacctgtagctgctacaggcagagacaaaaaaccatgagtcacaacctgtatcaggagacttgacctgctctggactccttgttcaagattcttctgcccactatgcctttgccaactgaatcccccagtggccttcaccatggttacatgggtctagagccaagcacatgcacgatcagagaacaaaccatgcatgggctcgctacagggtaagtccatccagtgaccactttcttccccccagctgccctcaggattacgtcccaagtgtcttcataacattaaaaccaacttgaacatgagactcaaagaatgaaaccacgtcctaaattttccagtacaggtgcaccctgcaccccaggactgaaaaaccagccaaatctctgttcttctagttgagtaaatctccacaaaaccagacagagctacaatcttggtgcttaaactgctcagcacccaccttatcacaccaattcctattatcagcagaatttactgcctgggatccctggaaatccttgagaaaacaccaaagtggctgaggattggtttaaaatgcagcaggttcagctattttagccttggaggaagttgataattgacttgcagtgaatatggcattttccagtctcctcttcctgcccaatgagccccctgatctagccactcatctttgtttttccaaagttccccaaatccacagatttcagactcacctttaagtacgagtacctgtgccttgagacatcaggacctagctttgagtttgcttcaaaataagaattttttttttttgtcataagataatgcagaacagagagatggctacagccatgcagatgagaagaagaaaagaaatttcaaatcttggatgtttcttttgcccctaaggcttgaggacagggaacaaaaaatgagaaacacttaccctatataaagcacccagttcagcaggcctgtgcggaacagaaatgactcctgaggaaaggtgggggccggtcctgaatagttgatttctctctttaatgaaaaagaacatgaggccggatgcggtggctcacgcctgtgatcccaacactttgggaggccgaggcaggtggattgcttaagctcaggagttcaagaccagtctgggcaacatggtgaaaccccgcctctacaaaaaaatacaaaaaattagtcaggcgtggtggtgtgcgcttgtagtcccagctacttgaggggctgaggcaggagaatcgcttgaacctgggaggttgaggctgcagtgagcccaagattgagccactgcactcctgcccgggcgacaaagtgagaccctgtcagaaaaaaaaaaaaagtaagcagaggaaagtggaattgaaggagagggagtaaaggtagctggaaaagagagagtttggagtatggttgagaattgagctgaatttttagaatagagattagtaacagacaataaaagagaaactggtttttccaagtcaagggtgagcaagagggactcagcccatttcaaggaggtggtactagtttcactctttatttatgcacctctcagcaaagcttcaggttacctgctgaactcaaccaatggagaaagggcctggcagctggtcccacctctcagaacccacacccctgggggaccatgaatggagaggtctttctgcaggctacccgtactttctcattgttgtgtgaacaccagaaaagggaagtgaggtctttgtcatcccagagttggagagacactgcaggttatctgagccttgcacctgaagccttagtcctcccagagacctacctaatcggggagaggggaatgctaagattttatcttgtcctaaggaagctgagtgtttgtgtgtgtgtgtgtgtgtgtgcgcgcgtgtgtgtgcgcgcttgcttgcttgagcttttagcctgacctgagttgctgtctctacacaatgcacttcgggaatccagcagagataggccagtccatccaggcagagctgtagaaagaggccggagggtcacagtcgaggcccagccagaggcttatcctggcatttagtacagagtaagtctgctgctccccttgtgagaagcaagtgtttcttttataatccgaaaggctttgtgacctgcttccctttcatgtctgggggtggggaaaagaccacactgcgaggggaaattaaggaaagagaaggcaagctcattagtaactttaaagagggcggtctataaacttgattattttaccccacccccgcttccatgcgcaacttgggctccgcctcctgcccctcccctatctctcggcccatcttgccagcttccccctccctcgttcccccttccaagtgcacacctggagggcaagggaagttgaagtctcctcaaatgtgccacatttcacccaggatcctggcctgctttccatttgttctccaggtaaatctagtgtgcagcgaaggcagattcctctattctccagcggaagggagggaactgaagaatccaatctataggacctcttagtgcagtcctgtcccacagcccttcatggaactgaatcatgcctgcccaaaatctccctagaaatcagctaatctaaacttcttaccgcatagactggggaacagaagttttgaaaggtgaatttctgtcttgcacagccagtgcagagtcaagattctaatctacctggatctcccaaaccccatttaaaagccctttaaaacaaaccctacacgttgttttccccggttctggcggacctgaagcttgtctgaactattctggattcttcctgggagaagaaaagcctccactggtgaagaagaaaaaccaatacagaccaataggaggagggcagggagatcttccacgtgatagcttccttaagcaccggactcctcccctaaaccgtggagctcatggcttccctgctgactggacccagtttgcctacactgagcctcagctctcccatttcccaaaaagtaatgcaggcagagaagcgaattgttcctggccacagtgatacacccacattgtgtgctgaagactctgggcccccttctgacctttccctgctccctctctccctcttccttccagaatagcattcattcattcattcacttactcactctccccatcacgtatcattccatgagcatcgactctgtgccaggtgagtgagaggctgcgtttaccccctaggagctcccagcctagatggacatctacaagaagaggcaaaaacataggccaatgaggaaaaacatgatgaatatcccccacaaagggaactgccgcatttgtctgtgagattcagggaaggctctacagacagagtgacatattggaactgaatctgaaaaaatgatggcgggctgagtgtgatgaagacctgcgaaaattcaggccttgagggaggagctctcacatgttcagagcagcctggggtgccggggactggagagcgcagccatcttgtgatgggcctgtggatttcatt

SEQ ID NO: 1286 - DNA, 4001 bp, Homo sapiens
tcgtttcagttccaggagcacagtggttgaggataatctccggcctagccaaaggttggaaggatttcccactctgacgccgagacttggcacgcctgttctggaaccatacctggaagaggggagaaaataaaagctgcttttggttggagttttttatgctaacattatgttcacagttcatactggtaagttccagtttaacatcccctggcttcctctccagagccttgtcttcagaaagcacttgggttgacgattagaagttcagaacacctggctttccttgcctccccattcccagatggaaacattggaataatgcctagttctatctactctttagttagagaaattttcatgaaaaatggggtcacaaaaatggaagcacttagaattcttagaaaaaaactgcattaaattatgaagaaaacctgttttttaaggtctgcactcccttgtcaaactaatcaaggaggtattttgctcatgccagctgttgagactgacagctgtatgaccgccaggggtgcagagaaaacaagtccactctcccagtgtttaaatgagggctgctacttaaaactgcgcttggacaccgaccacggggctacagacagacaaaaaggcaggcttctccttaccaactctaagattctgatctaaattactttagataataaacacggccgggcgcggtggctcacgcctgtaatcccagcactttgaggcgggtggatcacctgaggtcaggagttcgaaaccagcctgaccaacatggtaaaaccccgtctctactaaaaatacaaaaattagctgggcgtggtggctggcgcctgtaatctcagctactcgggaggctgaggcaggagaatcacttgaacctgggaggcggaggttgcagtgagcccagatcgcgccattgcactccagcctgggcaacaagagttaaaactccatctcaaataaaaactaaataaataaaaataaacacaccttgcactagatttttcaaactgaaaacaagctccaggtgcttctcgctttatctcaattcgctacatcctttcaaatctaatcccaaaacgtaacacttgccaagaaagtagcatgggggtaacttggcgagccagccttccccgttttcagctaccattctcacgctcaaagccagaggaaaaccccaactgcccctcatctgtgtcttcttcccggataaagaaaaagtgtaaaacttcttatcttcctgctgggaattactttctggccatttcaggggaccggctagcctcctaggagcccttattatatttaataatgagagaaatcgttcagtgcaggcctaaattatttcacacaggcctcgcaaccaccctatgcagcaggtgccgatatcaccccctatttcagtctagtacgcagagcctcaggggaagcaccgtgcctgcaacgtcccgggtgtggcctcaggagcccgcagtccagacctagagtccgcagcgcctccgctccagcgcgcacttgcgaacgcagcgggccctcacctggatcctggactcggggagcagggtgagcgcggccaggcgctcgcgcaagtggatgtcggggtaccgggtccggcggaagacgagctccagcagctgcagctgttcggcgctgaaagacgtgcgcttgcggcgctgcgacgccgacggggcggccgcgcctttggggggcgcaggcgagcccaggctggcggggggcggcggggccggcccggggtcccggccgaggaagcccgcaaaggtcgctgggccggggcccgcgggcggcgcagggagcagggctgccgcagggctcgggggcggcaggagcgccccgccggcgtggggggcccggtacgctggaaacgcggcgccctcggcaaactggagcgcacgggactcggctgtggccatcgctccggaacccagcgcgccgctcggaggggcgcgggccgcacttataccctcccgggccaggggctgggaaggcggggcggtgcgatcaaaggtgggctcggggagacccgtgtctcctccgggtgcgagcccgcccccggccccgccagacgccggggaataatcgcttccgccggctgcgggatgcaggagggaggcgtgaacttgggtcccggccccctccgtgttcttccccgcccacccgcccggacggcgcaatccacatccccgaaggactatttgcctgggaggggcagcccggaggggcccgggtgcgcgggccgcaggcgacagaactctcttctccgggtcaaatccccgttaagagcggcggaagcaccttgcctggcctgtgccttacatggcctgggccttgagccttgccctagtcccgtctgtcctcatcaaagctatttatttaccacccctgctatgtgctagaccctgtaccaggttggtcaaacagcccggcccctgtcttctgcaagcctccctaacacatcctgaatccaagcggggaggggggtgaagataaaggatccagggggcagcacattcctcctgattaaatgggtggggggagtgggggggtctggctggaatgtccatgggcccaccaataaagataccctaggtagggcggggttggcaacgtgccccattagcagaggatacggcgcagtttggcctttctggagatactcaacaatgcttaagacccgtctattggatgggaggagatgaaagccacctcatgaagtttccacgcgccctgaatcatcattctttcctctgccccttggggctctgaaagctcccattttctctactttgtgctatggttatggtttctctatctgctagatataaagtcttagcaagcaggaacccacctctccctttctgagtttattgagtgtctgctttgtacacctattctgcgtgaggcgcggtgctaggccccttagtgaatgtctgtcgaattggatgtcactgagctctccttattgaaagagaaacccatggtccactatgggaactgccccaccacagtgcaagaactcaagagaggaacacagaggcccaggtctttttgcccccagcacctgagcgctgatttcaccgggatcactcactgtggtcgactcaaagggagatctttattgggaggatctttcagggcacaatccccgtcctgtctctgcattctagaaggtcaaaagacagtctcagaagagcttggatctttttatcctgggtggacattccaggtggcaaagcggaaagttttcttggagctgctgcagagaagaattttgggcttgattctctcctggctgtggtaaggggtggggttggcagggactgtgtcctgtgtagcccctgaggcccttctgggcagctgatatacttacctcctgctcttccatcttccttccaccccttctcctttctttccccctcttctcttggttgcagtgagccaagattgtgccattgcactccagcctgggcaacaagagtgaaactctgactcagaaaaaaaaaaaaaagttaattccccagcatctccaaaacagccaacatccattggccaggtgcagtggctcatgcctgtaatcccagcactttgggaggctgaggcgggcggatcaccaggtcaggagatcgagactatcctggctaacacggtgaaaccccgtctctactaaaaatacaaaaaaaaaaattagccgagcatggtggtgggcacctgtagtcccagctactcaggaggctgaggcaggagaatggcgtgaacctgggaggtggagcttgcagtgagctgagatcatgccactgcactccagcctgggtgacagagcgagacttcgtctcaaaataaataaataaataaataaataaataaataaataaataaacaattattagccgggcgtggtggcacaagcctgtaatcccagctactcaggaggctgaggcaggagaattgcttgaacccgggaggcagaggttgcagtg

SEQ ID NO: 1287 - DNA, 4001 bp, Homo sapiens
ccagctactcaggaggctgaggcaggagaatcacttgaacctgggaagtggaggttgcagtgagccgagattgtgccactgcactccagcctgggtgacaaagtgagactccatctcaaaaaaaaaggagaaacagagacaactagtttattttgactgaagcacaggttgcaggtttgggaaaaccaagggaaacagggaggggagaggtgtgggaacaaattgtgcaggaacttgtctgaggctggagtccaaactctacatccagcttgtccaacccgcggccctggatggctctgaatgtggtccaacacaaattcataaacgttcttaaaacactgagatttttttgcaatttttttaaagctcatcagctattgttaatgttagtgtattttatgtgtggcccaagatggttcttcttcttccaatgtggcccagggaagccaaaagattggacaccactgctctatatagtaggcaatgatgcccaccaaggtttccgagtagtgtctcaggaagagcacaagggcacccatgaagaggatgcaaaaggaactaagtaattcaattactctgggaccacattacaggagaccacatgcactttctaagcacgtgctgggctctgacagctcctgttcacagagcttccctctcccatggcttcgcttcatgcaatctgagttgccatcccccacaactgtcaacatctgcaaaataccagagtaacaggactcctaaccaactctctggattacagagagagaagtgttgaggtgggagcagatgggcagagggggcaccaaagcctctagctggctcagttccatataaaacccaaccctggatttcctcttcacatcacttccagcccagccctctaatgaagggctgaagctaaggagagtgggctgaaagcacctggctgatgggtggtgatccagtgagacattacacctactgtccagcatgtgcctggcgcatgggcagtggtgcccttcccattctgcagggtcagttccatctgtaaatcccactgaggcttcaaggcccaggtcacaacaactcttctctcagagcctttctaaagtaccccaatccaaaatgaccaagctcctagaaatcacagctaccatgtattcagcacccattacatgacaggcgccatactaggtgacttccatataatcctattcacccttcacaatgaccctattatggccatttcctagggaagaaagtgaagctctgggaggggaagcagacttgccccaggacacacagctaagaggtggaagagatgagatctaaacccaggactccctgaccctgaagttgagcacttctaacaacacttcattcctgtgagcctgcctgcctctgatctgccactgtcagggagcttggagctctctagaagacagggtgcacctgacactcttattacctttccctgtggacagccatccacacaggcaggagcctttaaatactgaaaataaatgaaaacaattaacttaaaaataacgcagtacacagatttcacaaattcctcacgtgaaaaactattcatgatactggactgcctgagccctgcgcccagccatagcctcggtcctgatccctgggagagactgagtctcaaacgggccacagagtaagcgccatctcggacaccggccacgccccgaccccaggcacagaggtcgcagacagctcgggacagtcctgaaaagcgtccccttaggctgtccctccgcagctgaatcgcgtcgtgacctcgggcagccgtgaaggccctgactgcccccttccgggcacacgagctcactcacagaccccggccccatttagctcggaggaatacctcgcaggtctcgcttttaccttcgctggctcccgccggggagcggtcgcgcgcacccctacctgcagatcgctcctccgagaacgcggaagaggcggtgctagatccagggggtgggcccgatcagagaggagggtgagggggcggagctgcgcctgcgccctgatggctacccagggccgcctgagggcagggggctcgagctgagcgaactgcgcaggcgtgacagggaagaggcggggagaggggagattgctggcaagcgggtggggcttagctcctccggcgctttcttttccgaatggagggtggagaagcccgggaaggtaggaggccgggcgcgacaggtgtaattaacatgtactgagagcttctgcaggccaggaaggaattttaaaatgccttttatatgtggggaaatgctgctagtcttttctaaaacgggggccaattctgtacaatttctttaaaagtctgagtgcctagaatttcaccataagagtttctccttgagtacaacattatccccagtatttcaaaatttttaaaacttttaaaagttcatttcttggggaaaaacaactgtaaataggttaatgcctcaaccagtctccccacatccccttcccaagtctgcagctgcgatgagaaaggatgagagtgtggactgggatttaattcaggcgctgactccgagtgatggaggtgaacatcccttccctgcctgtctcaggattatcgtgaggatttggtaagccaagctagttaaagagccccagggacttgcttcccatcatccacctgacaaacatttgttccctgtcttgtcggggctgtcttttcatctgtatgatggaaggagattgggaatattagtgaacattcaggactttgctagatttcccaatctgggtgaaggccggagaggcggaagatcaagcttctgtgttcattcccttctggaatcctgcggtccaacctgagggccccgatgtatcctgacttctcccactcattaccttccgtggaggccgatccaagcttcaagtcttcagaggccctgctggcctgttcccttccctgttgcctgtggcaatagcccaagagattcaggacctatgttccaggttctcaaagttgctatgtccctcacatggcaatcaaattcagttaacatctttgagggctctgggggtgctcagaggaaggagggctcccccaaagcaggtggagctctagtcatgactgtggcttatttcaccacatattccacagcttgctgtggggtagggaggagaggcaacaggaaacctcagaggctgcagtgtttatgggagccgagggtgatgcggcatcctttactcaataggtggatgctctgccccaggctggagaggatggcttactacctaggtccctgctccaaatattgttttggaattttttttctttttttttttctgagacaaggtctcactgtgttccccaggctggagtgcagtggcaccagctttgctcactgcaacctctgcttgggctcaagtgatcctcctgcttcagcctcctgagtagctgggattacaggcatgcactaccatgactggctaatttttgaatttttttagaggcagggttttgccatgttgcccaggctggtctcgaactcctgagctcaatgatcctcccaccttggcctcccaaagtgctgggattacagggaagagccactatgcccagctttgttatggaccttgagccaacaggaaaataaagcccagcctgacttctcaaccaagctgccactctacctcccaggaccctttgttactaggttttgccccatgggagtgtgctcttttatctgcatcattgaggccctatctctttcttttccccttctcttcctttctgtctattcttctttaagcatccctctgtgaatctctcaaagcaattttgtgtcagcttcctaatgtatttacagatattctcatgtaaggtgcaggtcttgggtcacacagttctaagataaatctactctcactgccatggtcatatttcaaaatgaccatgaacccaaagcatgggacttgtaacagtctgagctgtccaatgacagaggaggtagtga

SEQ ID NO: 1288 - DNA, 4001 bp, Homo sapiens
ttttggctagcttccccttcccctccacaaatgctctccagccctacttcatctatctttacatctttcattatcttaaatggtatcatttacttaaagggttttgacagtgccttgtaccacaatatatgttcaataaatgcttcccactatccttcactttaaattatccgggtattttaggcaaaggcaatatctaattatcactctgttcttagagatacatgattagcaaatgtatagattagaaagatacactctcggagccacacagacacgcccaaatatcctttgtccagaccctttgtgggcatccaaggcctactcaacagggccttgctgtgtcatgctgccaccatggggaagggggaaggacaaggtggtggtggtggtagaggggagcagaacctctctgacatctcataatgtgtgcctcagtcagagcttggattttcctactagcattcctccaccaattccactgagctgcaaatcattcttttccagaatctgtccccatacctagctcctgtgggctatactgatttcactatggaatcaggcagttctccaacacagaggcccccacctttcctaccctaggctgcctctttctttggagcaaagattcgaggtggaatgaaagagattatccaaagaaaggtcaggattacacccaacattatcccatataaccccctcccaaactccctcctacagagaaacatagaacactacagaaaaaaattgcaagtatagggaagtagaggacagagagatacagtaggactaaaaattaaacagctggtaaaacaaattatggtttgaaaaggaagataagtagactgaagatattaaatacacaggacaataaattacagaaaaggatacttgaaatgaggtaggtgctgagaaataactacaagtaaattgttagagattaatggtctgtataaggtaacaaggcatggatgctgtgaagaaataactacccattgttcatagcgcccccttctctcctcttcagctgtcccccacctcatgtggggtctttcaatctaaccataagcagccgctcttctatctttgcagccccctgccccctccctcagtttggtttacctgttatcaatcaattactggcgtgttccaaagatggagggagtgcctcgggagctccggggtctgcgccgggctggagaaatacaaagctgttggggctttgacggctttgtcttctcactccttttccctcttcagtgactgagtctgtcagttcactctccccctgcaatgcagcccctcctaagaagggcggaaggattccccgccccctcctgcctgactcggctaattcaaatgataggttccagaacacttgagggaaggagagacgatgaaagcatctccctaggctcattggtctgcgctattattcccgatctcttccagcacccccgtgctgactgggggcccaatgaatgagcagttaattgccctctaattttaggtcctctaatttatggatttgaaatcttaactctagactacaatggaaaggaggagtattcctttcttccacaatttaaggactttaggttacaaagtatttttaagaatcagagtatttttccaccccttctcccaatccctgctcctccagactcgcctctctaccctcacaatgggtaaataaacctagtcctattccattttgggtagagcacaataaatttggggtggggggcgtgcttctgcgaatctctgaacttggttaggtctgggggtttggggggctccgcttcgttttgccccgaaatgcctggcgagtaaagggaacgtgagattccgggggccccagcttgggtgccagggcctcatctaggtgtccgcattctccagttctccccgcaggggcggcggccttgaggggctgcagaggcaccctcccacgtcccgcgcagtgcagtgcctccgcagtccagaggggagcagtgcgccgggctccgagccggacgggtttcgtaatcgcgtcgccgccgcttccgccctcagccggccccacctctgccggctcgtactcggctcccccacctcgccgcagagctagcccgggaagcccacactggcggccacggagcagagtccctcacccccaccagctgtagctgaacgtctggatggtggagaagagcaggtgaggccgtgcagttggtcccctggcccgcctgccgcgccggccgggccaggcggagacacaccggatgcggggtgtgggggaggcgggtgtcctgggctgcagagatgctggggtggtgggaaaggggtgcgcgcccggggtggccgtagtcatccacgctcctggggtgcgcaggctgaggccgctgaagagtagaaggaaaagaaggaactggaatgttgggggaggtgggagggagagggtccgaaagattcccagagaggtcccagtccggttaagggttgagaacagcagagaacttctaggtagagttgtgtagtggggggagacagatacggaatctgtgtgattgaatatatttggggaggggaggcttagggcctagccctctttcctcttaagcccccagaagacctttcctggggaagggaaggttggtgttgggcctgtcacttggctgaaatatggagtccacaccgcttctccagagtccctcagcagccctccatgtctcggggtctccacacagggaccagctgctgccccgggcttctagccagaattgcccatgccattctctcgattctttctttctctccagctgcttcatgtgagggcttgtcaggccgcgggttggaggccttagggccagaggcggtgggaccgggagaaccggtttggggcccgaacaggaccagagaactagcctgtacatccttcctccctggcacctctttcccatcccttctgctcacctcccaacagctctgagaccctcaagtcctagtatgatcttggtgggggcggggggtggctttcccggttccatatttcactcttgccatttggaactcagagaggtcgagttctgagcaccacttggctctcaggacgtggccttatgaggtctaatcctcatccctcctgttgttttctcagccccttccctattcactgtggggttggattcgggtggctcttccgcctgggctgaccagctcaggacttcatttttcctcaacccactctcttctggctgctttaaagaagagtggccgccagtggctcttacttccttttctggctttgttcccatcccccactgccctgcgctaccatcacattcaccctgacctgtcttcttcacactctgaccccaccctcaagtttcagagaccctaatgtcctagggaatggaatttcctggtcacttctcgtcatcattggtcatttcatgccaagtcccacacacacgctttccctccacccagctctggtcaggtccctggaaaagaaacagaaatggccttgttctctccactgcccctttccctctctccttctcctccccctctcttctcttccctcccagcactatccacctctgtccctcagctttgagcagagtgggggatgttgagggagagtccagtcacagtacagcctgcctgctggtgttgggggtttcctctaattcttcatttttccccaacccttaccacctgccaccaccaccatcaggacaaaccctatgactgactcactgacgtcccactgaccacagctcccctctctggacagcgtgttttagcttccgctccttctggttactcctcccttccagtggtgagaagagaagagaaagcccagcctcctgggttctcccctcccctagaagctacatttgagtgtttgtgtgatctcatctcaaggctgttaaaaaaaaaaaaaacctctgtgtgtgtgtgtgtgtgtgtgtgtgtgtgtgtgtgtgtgtgttttgtatttgagacagggtctt

SEQ ID NO: 1289 - DNA, 4001 bp, Homo sapiens
ggtctgtagagggaatcagagggagagaaggctggagagatcaataggagtgagattttgattggctttgaataccaatttaaggaatatggatttaatttggtgacagtgaagagccactgaagatttaaggagtaaactagcatgatcatttttagatcacactggctgcagtgtggaggagggactggaggtaaaattacagcaaggaggttattacagtaatccaagtgagaaatggtggcctggaccacagcatagatgggtggaatacaagggaatggatttgggagattcagtagacagtcttataggtcttggtggctgattggatgtgggggtagggaggtgagaggtaggagcctagggtgactggcagggctgcagttggctttgttcagtacaaaagctcctaatacccaggtctactcaacttgccagataggcattctcactctcccacacacctgccatccactgaaacggtgtctcaaagagttaaaggtcgatctgcaacaaatagcttttgttttctcaaaaacccagtgtcataatattagcttccagcacatcaggcatcaagcccttttacttggtaacaccacaccactatctccacacctttactcaagctttttctgatatttgggatgtacataaccctccttccttccaatctatcttttcatatatagctcaattccattttttctggcaagaccagtctcaagctagacccaacctacttctccctctatatcctctcccaggactgctgtgagccactcagcagaaggaatgggaagtgggtagtctcttaagcatcaggcaaagggctcaagctgagctgatttagctttgtaacttaactgctcagtgcacagggcactgatgtggggaaatgtaaccgtgtaaatgggggtcggggtgcggtgctgagactgctgtgccaggcaagtgtacaaagtttcattacccagcccagcactgatgactggaaatatcatgaattatccttctgttggtagagggaacaaaccagccaattgtttgcctgttcatcaccaggaatgcccttccttcctcagctgacctaaatgatagctatgcaaaccttctaggctttgccctctcctaaatcctttaggaagttccaaggtgactttgcctcacaggtccctttcttcttgtaaattatataggtgacaatctgagccacacacgctacaggtcatatggtgtctcccgttaacgaatccggcattatatggtggcaaaaggttaaacatgcgacaacttttttttttttttttttttttgacacggagtttcgctctttgttgctcaggctggactgcaatggcgcaatctcggctcactgcaacctccgtctcatgggttcaagcaattgtcctgcctcagcctcccgagtagctgggattacaggcatgcaccaccacgcccggctaattttatatttttagtagagatggggtttcaccatgttggccaggctggtctcgaactcctcacctcaggtgatccgcccgcctcggcctcccaaagtgctgggattacaggcgtgagccaccatgcccggcctcgaccactacctttttaacccaagcccccactgaaactctgtccctgttgtcacatggacactgggctgcaggaacccaggaggatcagaggctcccgaggcctcacgccagttgcaacgaagccaatcatatatttcgccctagaacagcaggagggataaactaacctggaaggggtaaacctcgaagccaaaaggacatagcgtgtcctcgatcttctgcttcagctctgcgactttcggctccatagcgcacgttacacgctgagcttgctggggaatgaagtctcaaggacaattgggccgttacgttttgagtcagcttcgactccatttcccaggtaggaaatgggtccagtagcgggaccatattgcctatgcgcgatgcatcttgggatgcgtagttcgtttcctccttggagacagccacacgaaatcaggaagactcagtttcccggcaagctacacggtgggggtgtgcatgtacgtgtctcttctagagaaaggtagttccaccgcctccatcgccggttgtgttcgcaagaggcgacctcagtttcccaggtggcgctgcggcagccagtccaaagtcggactttcaaaaccaacccgaagttttgaacccggcggcggcagttgtcactggcacaggtttggcgtggtggcgccagtgtactacttctggggaggtctcaaccaggttctggcaccttcaatccccacctgatatctgcgtatcatcacggtatcccgcttttcccccagttccccaagagcgtccttcctttccctagtcacaggatcgcagttttggtctgatagtgcatccacctaccccagtgttgcatccccacttccctctttccatctaacgtggtggcctttcctggggataccttgggtatcccccgctaggagagcaagcacaagacaccagggagccagacccctgccgctcccctgccacaggatatgaatacgagcctcagctggtttgagcagctggatgtgcttctcaacgctactgatggaaatgtggtccggaataaggtgaggggttggtggaggtccccagtttgcgtggggaggctaagggactctcagagttcattggcctgtgcatctgtttcttttgtagcagtggctgtatcctcttggggtctccacagagctcattggcctgtgcatctgtttcttctgtagcagtggctgtatcttcttggggtctccaccgcaggtaagtaatgtctctttctacttccaagccctttctctttctgtgccttcctccagtgcccgtatcatccattattccttccaaattccaactctgtcctttcctgaactctgtttccccacacagaccctgcacttaacccttccttatttcctcagccggggacctggctgggacctggatttcctctcatcacttgcctctgcagtcaggagtccaagctcaacagccttgggctttagagactcccatagttccacaaaggctgagctgccctgagtcctagagcccatcctctctctggggtgaggttgctattctctgatcctaatttcaatgtcaggctcaggtgaggcttggaatccttggtgtgtatatgtgatgtttgtgtaagatgaggatactaggggtcgggaaaagctgttatacagtagttcatgtgcttttttctgcctggggaggtgacaggcactaaggcaggcagtgcagggcctgctagaagagcgagagcagcagaagtaccagatcagtgtcctggaaggtatctggccagttattttcttcatatacacagcttcatatgtatgcacacaattttgccacacacctgttgtgtgtgcacatgtgtcttgttttgcaagtagagtatctagggtcttgtgaaactcttagagaggatgatccctaacttgtcccactacagcatcactaaggttgctgcagggggccccaaaggggagtgcttttctcctggagcaatgcctggaggagctgagaaaggaactgcagggccttcagagccaggtgtgggagcaaacccaagcccaagcccaagcccagatgcaaacaggaccaggagaatgcagtactaccaatggccttcctcaggagctgcagactgagtaagggatagtcaagaccttgccttctttttttttttttttttttttgggtttgtttttcttttattgatcattcttgggtgtttctcacagagggggatttggcagggtcataggacaatagtggagggaaggtcagcagataaacaagtgaacaaaggtctctggttttcctaggcagaggaccctgcggccttcggcagtgtttgtgtccctgggtacttgagattagggagtggtgatgactcttaatgagcat

SEQ ID NO: 1290 - DNA, 4001 bp, Homo sapiens
gtgcacgtgtgtgcgtgtgctctggtgtgtggctgtgcatgtctgtgtgtgtgtgcacatatgtgagcacatgcatggatgtgcacatccctcgctggcactcggagccctgctgggaagttgcccggtcctagggaagcggctgggtgctttggccttccagcactttcagtcgtcacacgcaatcacacacctgctgtgctgagccccagcttagccctgtaccaggcagggcggataatgtgggagcagcgaaaggaagccaggcccagtcctgcctgtgggtgggtcagggactggctgctgagactgccagcacctgggctaaatgtgcttccgcccccctgtaccccaccgcccccctgctgtggactttgcctgagttctgtccctgactccctgggagatcctagatgtcccttagcctgtctgggcaacaccctgcaaaggtggctgggccagctcatttcagcgactcctccagagatccctgacctctggctgtgtgaggagcggggacggggacctggacctcactcctctcctccaggtccctcgctcctcccttcctgtcccctcagccacctctctcagtccctggctctgtgaaccgcagcgttcatgcatccacacaccctcagatgcttcctttgacgccctctgctgtgcccctagacacccctatcccgccactggctgaagctggactttggagccatctgcctcccttgcctgcgtccacaccccgcgccagtcctcagcctccaagcccatctcagtcggaccctttctcattcctgccactcgctgcctgttccaggccccaccaatcacctccccctgaggggtctgtctcacccactgatccccaccacaggggcccaggggcctgtaactagaatcagaggccgtcactccctggcccctggtagccaaacccttggaggaagagccgggccttgccctgatgtcaggaccctctttggccctcctcccctctcactatgccctccccttaccctcaggcaggcccaccaggtttctccccccaccctccccacccacccaggcaggcctcccagattcctgccaagctccccttcccagtggggccttccttggctcggcctcgggttcaactcggggagccccagcccctcccctgctctgtgtctctccagggactcccagctccacctccacatctcctcgatacttctgcagccccctgggaacgtcagctccacgggcaggggcaccctctgtgggggccgcttcacctagactggcacccccaccccagagacctcggtcattatctgttgggtgaatgaatgaatgaatgatgaatgaatggatcaatcatttggacaagtctgagctcagcttccacgaacttctttctttggtcagaattaatgaatctgctcctgcgtcctgaattcattctgtcctgcaggtatccacagacggctccatgtgccccacggcacacacaaaataaacaccttcaaattgagccaagtacccggggcaggtgtggagtgtctgctgaggcgaaggcactgcggctccctggggacactcgtggcctctccaggttactacagatgggggacagcgggtcctttgggtaagataaaccgtatgccagagggggctgcctgccctggcacaggcgagactgcacacaggacgccctgcccagcctcctgagaaaggggctgagcgcctggagagggtttcaaggcccaggagagggcctggagagggtttcaaggcccaggaaagcaggccgggtaccttccttcagcacaactcacctttgctcactcaggagtggctgccgcccacagtcaggcccctggagactgggtcccagtgggttggagttggggtgagctgggccaagtgggtggatttccagggactgggatgggagagcagtggcttggggctgagttgaggctgcctgaaggcttctgggcctcctttgtgatgcaggcatgggctccctggaggcggtgactcctgctcacagtcaggaggttccactgggggtgtggcatggggggaggggctgagggcagcttcttggcacccgggctgccctgcctcatgggtgcccttctcagggcctctggccccgcctcccaagccgccctccttccttgcttctgtctcctgacctttcagtccaaaggggccccaggggctgctgggaggaaggtcaggcccttgtcctactccacaccctctgctctgcccctaaccacccggtggggggttacaaaggccccaccctgggtgttctttctcttcaatctccaaggaggatggtgggttctggggatcttgccaaggtgcaaggggaaggggtggtcctgaagggggtgggcgctggctgccaggagggtcccacccagagatactagcctgggtttggctgcttccctctgcccacagaaaactcatgaggttcagacctcaagctacagagggtgggcagccctggccggggagctggcagaagggctctgtggcttctgaagggttcgcagtgatcagagtgtgagccctgcacccagccctgcttgcggacgggggttctgggcagagcagtctctgtctgattctccaggcctgatgaggtttctagcttctgtttcagaatccccagaacgagtcctcctgcccaggccttgggcatgtgtcagggcatctgggcagggctgggccacagagctaggggtcccacggcaaactgctcctcacggccgccccggccaggtctcccacgctgagtgctgttggaagctttgtctatggccctttaggttggccaggccctgggaggagaaaggcttcgagctgcagccaggctgggatcagatcccagacaccaccctgagcccgggaagtctctccctggggcccgctggctgtcctagcagccccctgccatcacgcccagcaaccagcccaggagctgcagtctggcctcaggctgcctgggttgctggcccaaatggaaacaatgtcaaggccagccaagcaggaagctgggaccgccctttctggggagctgggagtgggccagggtccagcctggctggaggctcctgctatggggagaggccagagcctttccgagcccacctgcccgacagccctggtgccagcaggccctttctggatgtcacagtgttcttgtctctaaggtacaaatccacagagggagaaacagatgcaggggcctggcctactctcagcaggggctccctggactctgaaccgactccccaaggctggccctgtgcatgctcctccttcccgaaccccaggcctgtccagcccagcagcccccagcctggcccaaggccacctggtgacctgggctgccaaacttgggaccccttattcccaggttctccctacttctaggtgacagcaggaggcttgggtcctagcctggcacctgccagacaagagaaactgggaaaggaggctaaaggccaaggaggctgcagaccccgagacctaccccggtcactggacactcacagatttgcaggtgcccagggcagtgcaacccagccgccccaaacacctgcacagatgactctctccccagacacccgcacagaccgtccccccagacacccacacagaccatccccccagacacccacacagaccatccccccagacacccacacagaccatccccccagacacccgcacagaccatccccccagacaacctacacagaataaactgtccccccagatacctacacagaccatccccccaacacccacacagaccatgcccccaaacacccacacagactgtccccccaaacacccacacagaccatcccaacacccacatagaccatgcccccaaacactcacacagactggccccccaaacacccacacagaccatccccccaacacccacatagaccatgcccccaaacacccacacagactgt

SEQ ID NO: 1291 - DNA, 4001 bp, Homo sapiens
agccccgtcagtgccccctcagccccgaccatggccaaggcccagctcccacgcagccctgtcccggccccgtgggcatcaccgtagcagaagtcgcagctgctggggcagagcctcttcatgagccgccggcgagcgtcgcagaagcccctccgcgcccaggacgcgcacacgaacagcctgtcgaggcatcctatcgggagcgtggggagcacggcctggctcaggaccgcccggtccccgccctcccgcccgacaaagggactcaccgtagagccggtgcagcccccacagctcgtcctgggacaacgccttccagccgcgcagcgtggcgttcaggtgcatgagcgcccggccgtgttgtgagtgcatcaggcccagcgcgtggccgatctcgtgggccgccacgtgcaccaggtccgtgagccacacgcctgcgggccccgggggtcagcgcctgggagccccgggcccagccccgccgcccgtgggccagctccccgaggcccggtgtatctgctggagcgcagccgcggagccgccctcggccgcagccacggaaagataagaatgttctgggcccaggcggtgagctcggcccccaggaatgcagctccagctcccgctccagaggcgcagggggatgggaaagggagttcagggctgccgggatgggggctcccacgggctcccctccttgcctgctagactccagtggcagccaccaccccggaaggtccctcctgccgtctgccccaaagcccgaccgcggcagcccactgtgctgcagaggagaggcctccaggaggccagcctggacggtcacctttcttccagctgtagcgcgtggggcccaggacccagtactcgctgtcgtcgaagtggatgccgccgtgcggggggaagaaggcgtgggccagctcccccgtggggccgtcgaagcagtggtgcagcgcggagaccaggcagtccgtgtggttgatcgggtagaagcctggggggagcacggggctgagaggccgggcgcgcagggccgggccggggcgggggcgggcgcccacctatccggaggtcgctgggctgctcgggggccacctcgcggaagctgaagggggacacgtcgctccacatgcggaaggcggcagctagggcccgccgcgtctcccgcgggctcagcaggttccgcgggaaggagaggatcctgcagggagagtgagctcagcgggcgccggccgcgccccctcccccggggcccagccagggcgcacctgtaggtgaggttgaagtggtcccagcgcagcctggctggagtcagcgtgtagcggcgtctgcggggggccagtgggcccgggacccgggtgggggggaccgccgagaggcccagcgcagcgacgtctcccttcagggaagaaagcgtgcgtgggaggcatcggtgacggtccccaggaccaaaaactgccgcggaaaatggactggaaggaaacgggggtgggggtgcccagggctgggagcgggcgtggcgggtcctgtctgcctgtggtttcgggtctcctaacctgagcgccctgttgcacgtccctgggaacgcggcccagtggaggggaaggggctgaacagcagggcgaggcctcccacccctcccaacaactggacacaggggcgtccaaccctccgacctcgggacgcacatccggaccctcaaacaccccgcacaccccgcacacgtcctgcgggccccccgatagaccagacccacagacgtgaggacccccccaacccggcacctggcctcccccccgccgctcacctgcgctgcgctccaggccggcaccgccggggcccccagccgggccagcagcaccagcgcggggaggaggcacagggcgaccagcgcggctccaagccagcggcgctcgacgcctgcccccggggcctccgaggggacacgggccccgcggcccatggcagacttgctgtggggctcagggctgcatggggcagcaaggcgcgggggcccgggccgcagagcctccggggaggatccggaggggaggcagtggctcggcggctcgggttacagcccggtgtggtgggggggagggagacggggcgggagagggggcaaggctgcccctgaagggaaccagctggcccgtccgttggccgagctgcctgctgtctccagccgggggcatggggacccgcgtcccgtgggccaggggcagaggcctgggcatggcctgctgggcggggtcctcggaggggggagcgaagagggccccaggcagcccgggaagggcagcgccagggctcccgcttaggaaagggtagcagtgggggtccccaagcccccactgctgggcagtgagtgatctggtggcttttttcccaaatggaatcctcaaaaaacccctgagccccacatgagcggagtctccatcctggcccaggcagctgagctgggccgcaggagacgcgtcgctcgcctgacagtgtccccgagagctgggaggggatggccggatggggacgtggcagtgagtatggggcggtggagggggaggcggggagggggtgcgtgggtaggcaagggccgcggagggtgccaggttgcggggcggagggagggaacttgccagggtctcccggggagccgggaaggggcgggccctggctgcgggaagccccgtggagggtagcgcgtgaggtggagggtgtgtggctcctaaatccccggctaggccccagcaaaggggagagggagacgggagggacgggaaacggagctaagcgccgggcctggaggtctggaccggtcctgattgggggcgggggcggggagctcggagacccaaaggttcgacggggcggccggcgtccaggcgcgagcggctctgggctgggaccgagaccgggcaccggcgtcccgcggggcgggggtgggggattgggcagaggagcaggagattccgagccagaccggcctgtgtctgtctcgtccctccccgttttccgcgccggcgtcgggcccagggtgacggcagcccggccaacggggtcagcgccaagcagctggcggcggccgcgggcggttcttggaaagcgcgagaggctgggcctggccgccgtatttgctccgacaccgccccccgcccccccagctcgtcaccccgcctgcgtgcgcccggcccccagaccctgcctgggacgccccccaactaactccctgctgggacgggaccccacagccctggggagtgtcgggccccttggatcagagcgcgagtccccgcggccgcccccaggacggaagagcgaggggggcccgggggcagacacaggagtccccgccccgtcggacccgggcctggggggcgggaggcggccgtgcccgcgcctggagggtgtcctggcccgaaggccgcagtccgggcgggagtctggacccgagagcctggggcgggcggggcggacccagggaagggccccccccccctcgcccccaggctcgcccgcgtgtcccgaggggaggaccccagaggcgcccggtcccccaggcagacagcagaggcaacgtccgagaatctttctttttataaaacacagggcgggggcacgcgaaggcagctcgggcgcggcggacggcgcggctcacacgaagatctggatgcggtcgcggatgggctggcggcagatggggcaggcgctgagcgcggagccgcagggggcgcatgcgccgtggccgcactggaacacgaggcggatgtggctgtcgatgcagatggggcaggtgatgcgttcctccatctgccggtagcggctctgcagctcctccaccagctggcgcggcgggccgggggcgggggcggcgctcgccacctcagagccgtctgcggggtgggggacgggtgtgagctgggaggccgggtgggggaatgcggggagcagggagctgcgggggggcgaggctgggggcggggtgtcacctgggacgggttgtg

SEQ ID NO: 1292 - DNA, 4001 bp, Homo sapiens
gtacacttgaagctgattaagatgacacattttatgttacatgtttcttaacacaattaaaagaaaacaattattatattcaaagctttcagaagcttggcagtgaaaatatccatacccacagctctttgtgaagaactactcattatgaaaagaaataaatctaagaaatgttggaggccaaaagggaagaaagatcaagcaaatactttaattagtgtttttactatcttaaaaataagtaaagccagagtcaaataaaagaaaacaggaactatatgaacatactcttaacaggtgaagttgtatgtttgggggaccagaagatgtgagagtttgctaaggggcttgtctttaaggagaatatagattttttaaaaataagaaacttgacaagaaaggagaagaagaaagcacagaataagtgctataaattgaaacaaagtaagatggcaaaaccaagttaaaatatatacctttatagaatttgcatatctggactaaactcatcaactaggaggaaaaattttcaatttggattaaaaataaatccagtcatatgttgttgacaaagtacaaataaagcataagttcacttaagtttgagaaagagctggaaaagttatattcttcaaactctaacttaaagaaagactttttaggaaaaatagtgtagcttaaaataggcttaagtcaataagtatcagtacatagtttcactacataatggtaaagtatgcaacttggaaaaagatataataatttaaattatattataaatataatctgttattactttataaagtagcatatagaagttttttcttctctctaaacacacacataacatatatacttagatatacatattctatgtaaaaatatatggtagaaatcaaaagaactacaatgagaaattaacaaaatcactattagagttggagatttcaccacatctctcagttactgaaagaacaaggtaaaaaatagcttagatttagatttagatttttcaaacataattaacaagcttacttaagaaactttatcttacttaaatagaatttggaatccaacgtttataaactcttctcaagtactcatggagtaattagaaaacattcatatgtacaaagccataaaaaagtcaaaatgtatcccaaagtaggaaatatataattgattctccctgtcttttcattataccttgccacaaaaaatgttatctatgactgagtaaagcatagaccatttgaaaaagagaattatttcttcttacacttgttgtaaaatgaagcataaaatgaaactgattcatgaaaatgtaaagattatttttgagtaaatgcttgtaaaattgagaaattaatgtgtgcacatgtctatgctttttaaaatagagataaaatcatataatagagatttatatcctggtttattttttactaaatattacttcataataattttcttatctgactgtcttgtcttttaacttaggcccaaacccagtcaccaagtcatcctccagccaagaaaaccaagtatctcctctaaatatcaatttatgccaaaagacacccaagaattaatttttaaaacctgctgtagacaaaatacatttttttggttcataccccaattgtggtagaataaaagatatccatttgctacctagacagttaaagcattcagttctcagttttctgaatatgattgataacaacacttctggtctcaggcaattattctctactgagatggtgtggttaccaactagatacctagatctttctctaaagaacttcccagaaatctcaccttaatggatgcttcttccacaatagtcttcagaaatcctggagtcactgtcttgtttaggacagaatcactgtccgtaaagctttggagagattaaactgcagactattttaatcttgtaaagggctgagaaatgaaagctaacaaggaaaaatggcacttgttagagccactctcaatcttgattgtagatggccttcttacactgtcctaattcctaactagaaagaagttatgtaatcatgaaacaattttgaagccacgcctatcagcctttgtagctttctatttcagatgtcagagaaagtggtcagttcctctttgtagtaagtaatctcagtcacaaggagaaatgacagtaaatggtgcctcttcttcgcttttttgacttacaaatacttgctgaaaggagtttcaaactcagaactttcttataaagctaacttacatataggtcattagaaaccggtagccgcttgaataaggatcttaatataaattgggaaaggcaaaacaccaaagtttctccctcctttcctgttcacagagtggcaggagcaggagatcttggtagagatgtctattgctaccagaacttgacttcatctcttggataggggtgggtctactgtgaaattgtttttgtttaaatagtacctacatattcacccagttattaataactgatacacctggagcttgacagaggcagaaagtcattatgaatatgtaaatccttattcaaataatttgaaagagtttcatactagttgctctcttgagtataataactgagctgccttaccttgattattaaattcatgattactcatgctttttgcattatttatggatagttggttcatatcatgactgaaaccttgaacattctggaacagcactgaaactctggaatgatagggggcctgataaaccctttgtactgcaatttttttttcctgtgaagaacagtgggtgcactacaaagtatcataactctgaattgtcaaatgaatggtatcagttagcagacagtgctgtggttaccaactagctgatctgtaagcaaaatgtggtcatgactggaaaaggatcccaaaacagctaataggggaaaatgatccaaggccatctacagagaagaataaagctgattgtcttaatccaaaccagcagcatagagagagttaaagtttggatttggaaactgtctaaaccccactaaagcagggtaaatcagaaaaaaccaagaggatctagaatgacagccactaacacatgtgggtgttcattgtttcagtttctctcttatgctgatgcttcgagcaggtcttaaggtaaagggtaaagaggaacacaaggaaaccttatcaggtgccccacttcagtgtttgggaaccaaaagagctcacgacaggagttaccatgtttcaggacagctttctgccctgatatggtttggctctgtgttcccacccaaatcccatcttgtagctcccataattcccacgtgttgtggaagggacctggtggaagatgaatgaattatgggggcagatctttcccatgctgttctcatgatagtaaatgggtctcatgagatctgatcgttttaaaatagtttttaaaaaatgggagttgccctgagcaagctctctctttgcctgctgccatctacgtaagatgtgacttgctcctccttgccttccaccatgattgtgaggcttccccagccatgtggaacattaagtccaataagattctttcttttgtaaaatgcccagtcttgggtatgtctttatcaacagcatgaaaacagactaataaagtaaattggtaccaggagtagggcattgctgaaaagataccagaaaatgtggaagcaactttaaaactgggtaacaggtagcaggtaacagtttggaaggctcagaagaagacaagaaaatgtgggaatgtttggaacttcctagagacttgttgaatggctttgacaaaaatgctgatagtgacagaaacaataagatccaggctgtggtggtctcagatggagatgagggacttgttgggaactggagcaaaggtgactcttgttatgttttggcaaggagactggcagcattttgcccctgacctagagatgtgtgtcttagagtttgagagagatgatttagggtatc

SEQ ID NO: 1293 - DNA, 4001 bp, Homo sapiens
cagtctggtaaaatgagagcagcttggagagtagaaacaggccattcagcaggaacttgttctcttgaaaaaaactcacagatgtgaaaggtcatctcatccatcccgactcttcgacttctcacccaaagaagtccccagggtgggaccccagtttccagagcaaagagatttctgcgcttcatttgccatctccattttaaactctgcttggggcaagtgcttccaaaatccctcacactgcaattaggcggggctcctgggctccccacattgcatggccccctttatgacagttagaaataggcccccaccctggcattcagcaccttgtcctacctttcctgccccacttcccacctccccacaccaaccaccctgggcttcttcctgattcctgaacacgcccccactcttttgcctctgcatgttttcttatccctccacctgcctgaccacacatcctcagattggctgctacctcctcccacagcctcctctcctgaactcagatctccttctccttgggtagaggctgcttttggtcattgcagtctccactccatccccaacccacccccagcttaggacaaggcctggcacaaagtcagtgttcaggctttaaggaaagcttagactagaatcttagagttaaaatagccctgatagatcagctggcccaactcacttgtacagatggggaaactgaggcccagatgaggaaactgaggcctaaaaagaggacttgaggagcctgtgtccacatagcaagttacaagcagaactgggaactgggataaggtggggctcagctcatgaccaagagtaaaagaccattttcctgcactggctcatcaatggtctggtggagacagagaagaggaggggagtggagggacagtggaagcatcttctccaccaaacagcccaacctgcttcctgtccccaacacactgactccgcacagcaactggggtgtcctgaccagtgagctagagttccaccttactcctgtggaacttcaaggcctgggtctctttccaggaaaatgtaagctcagggggtgggtgcagggcaggtgctcttctagccacagggttaactcccttcactccccacccccatgccctcactgagtttctatctgtcacagaacctctgtctctccctgaaccactgccgttccccgtcctagcccccatttcccagtgatggctatcctttcactcctggagtggcagtgccttgctcgttccctgggtgcggatctgggcttctcaaatgaagacagcaggctgaccctacctgtttctgatatttagccccctgctaggctacatctaccactccttgggcctggcccaggatctgggccagaggatggccccagtttgaacccagaatccatcctgggactctctctaggacagaggtcgaagagaaaaagtagaggcgaagactccacgctctcctcgcggcgcgcagccacccacgcccacccccggcttccctgcaacctcaaaccagctcccagggccaggaaggtcgtaggacccagaggagcccgcctgacatttccgctccccgaaaacacgccccccaacccctcccctctgccccgtactcccccaccccgacaatcccccccgcaactttcgaagctctgagcctcggacgccagcctcaggacagcggccagcctgccttcgggcgggactctcctccggactgtgccacgccaggacggccgaagaaatgaaagtggaagccaggcgggcggggtgcgcggcgaggccgcaggggcacggcgcacactcacgggtcctcttctggccgtggggtcacattcccagccacaggatcgcctttctcctgcaggtcccgcagtgcctgttctctctcctgtcagcctgtccgtctgcctgtcctgccggccgcggctgccctcctgccccgggcgacgccagctccgccccggccccgccacgccgcggccacggggcggggaggggcggagaaaggggactcccctccactccagtacacagacgcactcgcccccaccttcccggaaagtccatatggggctcccagcttccccttggacaaaggactaactgagctgcccgccctctcggtgcttccttggacctccaccaaggaggcagcctcaagttcccagacagtaaaatgggaaaacgctcggcttcttctggagcagaaacaagagctgctagataagggtggtttctttgccctcctagaatcgtctgcgtcacacttgtcccgggacccaataagggatcgggaccgtcctatccactcccatatcctcagctcctggcacatagcaggaactcaaaacccacttgatgaatgaatgaatgggtgagtgaaggaataaatgaacgccttgggaatcatgagctgagtccttcacccctgagggacaagccccagaagagcgctcaaatcacaaacttcatctcctcaccagggagggggcctggctcaggttgggctgattctccttgctccttacccagagtcaccccatttcttatctccagacccttatcccagctgttccattttagaataccttctctccctccttccttctgacaaatccaaaccactcaagatctgatctgctctccctaccacctgggttccttcgaggacagacagatatcccaccagcattcaatgcacaccgtggcccccaggcccagggaccagttggctgctctgtctgggatgggagggaagattggaggctttctagggtaggaagcccaaagcagagagcttagccatagaagccactctggaggggtgggaggtgagtagatgcgggtaggggagagctggaggccagaggtgggcatttaccatggcacactggacctcccttgtgtctggaccttctgttgctggatgacatgagaacacgctagatccttaacccagatcatatcctttgcagcaacatgggctggagctggaggccattatcctaagcagactaacacaggaatagaaaaccaaatactgcatattctcacttacaagtaggagctaaacaatgagaatacatagatactaggaggggaacagcagacactggggcctgcttgggagtggagggcgggaggagggaggatgagacaaaaatacccatcaggtactatgctgcttacctcggtgatgaaattatctgtacaccaaatccccatgacacagagtttacttatataacaaacctacacatgtacccttgaacctaaaataaaagtaaagaaagaatcccagctcatagaactgtgggtatgttcttttgttgagcaccaatttttgccccagtctaaagttctctgtatttttatgtctgactcttaactctctgccctgaatcccctataaacaaacacttgcttatggagcaaattaaactatgcttctttatttatttgatatcctaatcaatatcttttattgagtataactctccactcatatcagatcaggggactgggtgataaagctgacctggttgccgacctcaggtgctgacaggtcagtaaaggggacaacacacagagatacacaaggtcacagctcagtcacccagaagtgagaatgtggttgtggactgacggactttgtaagagtcggggtatttgcaggaagcacatggaacacccagaatgggtatgtttaatgaagacattatttacaggtatggtcaaggtgtagggaaaccacacagtgtatcaccaaagggctcacaagagcagaggctgtcaaccccaggctgcaggagtgtggggaaggaatggtgaaagtgggagctatgaggagggcgctgctgtggcctaaggtggaggggcatacccagctcacagcaatcatacagggaaggacagggggcaagtaagaggcctcactctcctccctctctccctccgtctgatctctggccaggtttcccccactag

SEQ ID NO: 1294 - DNA, 4001 bp, Homo sapiens
tgcacggcgatccagtcgtcgatgttctccccgggtggtagcctcaccacactgcgcaggtccaggcccgacttgagagaggcctgtgccttcttgtacagctcaaagcgctgtgtgcccggctcaaagcgcttccgcggccggaacgtcttgtccttggcgaacacctgcttcaggcacagggccatggccagctgggcctggggctgctgtccaggggctcggacctgaggataccctgccagggacaagggcataggggagctggcggtcaaggccttatcatctgggctctgacttcccaattcatcatttccctgtcacctctcagcctttgctcaacctctgcatcctctgcctggaatctaagtcctcagcccctaggtccagtgccccgccctctttccaggctatgttagtcccccttgctaagcccccacagtcctcccatcttgctttgtctcttttctgctttcattgcagagctgggcctgggctctaaacaggtgcccctcagacttgctgttggtcacgagagaggtcgcagaggctccctgcaggcccaccagcagacaggggcttggacgagatgacctctgggagcccccttggccagctggtgcaacgtgggagagcctcgcagcattgtgctgggggcagggtggaggggggtcgggggtggctttcggcttcctctgggatatcccgtagtccatccggccaccggggattcccagggagcagcagggaacttttctaccaaaaatgtcctttccttttttttcaccctgaaagaggaaagggccctcccgctgccagctgggcggcttctgagtgtggctgcaagcactggaggagggggagggcggcaggccaatgagggcgtcgcttcctctgacaacagctggagatccttcccctcaagccagcctcctccagccccaaatctgaacaagccactggctcctcccgttgcacctgacactcagtagacattcctctagcaactactatgtgcctggcactgggaggtagaagagtatagtcagatgcacccaggagggcccatctagagctcaggcaaatttactttgcctcctagaatttaaggatcccagattcagaacaaattttgggagacagtgatcagggccctaggctcagaggcaggagtcctgggttctagtcccagctctaccactggcttactgggtgacccctgtatcaccatggatttagcccatccaggtcctgggtcactctgctatagctaggtttctaagacctgagtcatctcatctcaactgtgagtgtgtgagctactgggaaatgcagacccatgtacctaccaaaactagaatttagccacccactaagcacactgcccctgcccctagactgagcactaaggctgagtataagctaagaattgcattctggttcctggctgacctctgacctgggctctggcaagtgtgagccctgactctagcctttagccctaccctgaggcttgcttatggccaaagcctgggcttgacctctgacgctggagcactgtcctttctcacatctctggtaaccctgggacaggattggggaagggagggtgggaaccaggtgacacctgggtaaaagcaaagggatggcacatatttcggggaggggtattacttctggcaagaagtcaaactagctggggagctgtttgagacaaaggtccttccttgaacccacaaaggcaggccaggatgggggcagtctggtaaaatgagagcagcttggagagtagaaacaggccattcagcaggaacttgttctcttgaaaaaaactcacagatgtgaaaggtcatctcatccatcccgactcttcgacttctcacccaaagaagtccccagggtgggaccccagtttccagagcaaagagatttctgcgcttcatttgccatctccattttaaactctgcttggggcaagtgcttccaaaatccctcacactgcaattaggcggggctcctgggctccccacattgcatggccccctttatgacagttagaaataggcccccaccctggcattcagcaccttgtcctacctttcctgccccacttcccacctccccacaccaaccaccctgggcttcttcctgattcctgaacacgcccccactcttttgcctctgcatgttttcttatccctccacctgcctgaccacacatcctcagattggctgctacctcctcccacagcctcctctcctgaactcagatctccttctccttgggtagaggctgcttttggtcattgcagtctccactccatccccaacccacccccagcttaggacaaggcctggcacaaagtcagtgttcaggctttaaggaaagcttagactagaatcttagagttaaaatagccctgatagatcagctggcccaactcacttgtacagatggggaaactgaggcccagatgaggaaactgaggcctaaaaagaggacttgaggagcctgtgtccacatagcaagttacaagcagaactgggaactgggataaggtggggctcagctcatgaccaagagtaaaagaccattttcctgcactggctcatcaatggtctggtggagacagagaagaggaggggagtggagggacagtggaagcatcttctccaccaaacagcccaacctgcttcctgtccccaacacactgactccgcacagcaactggggtgtcctgaccagtgagctagagttccaccttactcctgtggaacttcaaggcctgggtctctttccaggaaaatgtaagctcagggggtgggtgcagggcaggtgctcttctagccacagggttaactcccttcactccccacccccatgccctcactgagtttctatctgtcacagaacctctgtctctccctgaaccactgccgttccccgtcctagcccccatttcccagtgatggctatcctttcactcctggagtggcagtgccttgctcgttccctgggtgcggatctgggcttctcaaatgaagacagcaggctgaccctacctgtttctgatatttagccccctgctaggctacatctaccactccttgggcctggcccaggatctgggccagaggatggccccagtttgaacccagaatccatcctgggactctctctaggacagaggtcgaagagaaaaagtagaggcgaagactccacgctctcctcgcggcgcgcagccacccacgcccacccccggcttccctgcaacctcaaaccagctcccagggccaggaaggtcgtaggacccagaggagcccgcctgacatttccgctccccgaaaacacgccccccaacccctcccctctgccccgtactcccccaccccgacaatcccccccgcaactttcgaagctctgagcctcggacgccagcctcaggacagcggccagcctgccttcgggcgggactctcctccggactgtgccacgccaggacggccgaagaaatgaaagtggaagccaggcgggcggggtgcgcggcgaggccgcaggggcacggcgcacactcacgggtcctcttctggccgtggggtcacattcccagccacaggatcgcctttctcctgcaggtcccgcagtgcctgttctctctcctgtcagcctgtccgtctgcctgtcctgccggccgcggctgccctcctgccccgggcgacgccagctccgccccggccccgccacgccgcggccacggggcggggaggggcggagaaaggggactcccctccactccagtacacagacgcactcgcccccaccttcccggaaagtccatatggggctcccagcttccccttggacaaaggactaactgagctgcccgccctctcggtgcttccttggacctccaccaaggaggcagcctcaagttcccagacagtaaaatgggaaaacgctcggcttcttctggagcagaaacaagagctgctagataagg

SEQ ID NO: 1295 - DNA, 4001 bp, Homo sapiens
cctctgtttcccctgcccatccagccttaccctgagcagccagggaagcaccagggtacaatgggctcgaaagctacaggaaatgccacttgcccacccaacctcccggggagaaactggtttcgtcagctgtggggcagcagctgcaagaagagaccacagatgcttctcaccgtgcttcctccctgctttccattctccttcatatcgaaagaaggaatttgggtatacgtagacaccataacctgagtattgagaagacacacacaggtaagcacagacacagagatgagggatgctctccagtgctgaaggagggagtgcagctcccttgagggccttcaaggggttggtacacgtcaccttcagcagaccagaggcgacctgtggggctcatgagctctcctgtcgactgttgggccattcatttgctcatttgtttatgtgacaaggatgaggacctacttggtgcagagaagacaggcccagtaagaggagggctggcttgaaacaactgcaggtccttgagagaccagaggtgctcgggaggtggtgaggagcaggttgggagccttgttgcaggagatgagtgagccaggggaaggcagagcggcagtgtcagtgaggcacacaggggaggagcagactctcccatcccctgccgtggcccttcagtggcctcctatcgctggggagaaaatccacactcatacccaaggatggcctggccggcttcatctcctcctagttgctgggtgtgccacccgccaactcctgcagttccaggaatgggcagggctccctccctaccagctcctcaggcacattttgtgggcagggtttatgggaaaatgtcggggaggagggcagggggttactacaggctactgtatctgtcccaaatcagggtcaggttctacctgaagatagtagtgttagctctgagttcattccagacccgtttatttgattctagaaacagttcctatcaaaacctgctcttttttttttttttgagactgagtcttgctctgtcgcccaggctggggtgcagcggcgcgatctcggctctctgcaacctccgcttcctgggttcaagcgattctcctgcctcagcctcccgagtagctggaactacaggaggcaccaccccgggccaatttttgtattttttagtagagaccgggtttcgccatgttggccacactggtctcgaactcctgacctcaggtgatccacccgcctcggcctcccaaagtgctggaagtacaggcaaaaactgcttttgaaacgcgtcctagcgtttctggacagcaccggccaggaagtcaggaggcttggtgctgctcctgcgcctgccctcgccccaagtcctgggcttcgggatccccatggcaaccccaggtcccgctggctgtgaggctgcggccggaacccggtcttcccggctaggagcccgcggggggcgaccccctgcagggcttggcctgctgcgggaggagggctcggggaagggtgcgagccgagcccgaggcgcacggcgagtcctgtgggagtgggggacgcgggggcggccctggctccgccgcggcacctggacctctactttccgaggtgagcatttgggggtcgagggcgtagagcgatcgcaccctgaatggagcccagggcagccagcgacctgtcccgtggcccgcagtcgttaccgttccggggcggccgcctaggcgggtcccgacgcggcccgcgggagctcggggtgccctcgcccgccgctgccatcttgccgccgagggttctcttagcgaccagcaacgcccgcttccattggtctttgtcgcaagggggggtgtggccacgggcctagtccctgagcccgcgcaatctctggagcgaagctagccgggcccggagccagaggacgcagctgcgcctgtgcgcgtttccgccgctgtcgtctcttccgccgggaggcccgcccgccaacggcctgcgcgtctgcgccggaagcggaaatggttggagcccttggccccgccctcgcgccatcttgggggccctggaggcggcgccgcggaggacggagcggaagtgctcgctgcagcttcccggagccggagcgcagcgcctgcggccgcccgtgccccgccgtcctccttcccgcggccgtgagggagaccgcggctcggccgtagcggagctgcgaggtgccaggaagggctgcgtggcgcgggaacggccgggcagcgccgcctccgcttcttccgggctgtcaaggccgcgggcgggcggggccgcgctgagggccgggcggggagggccgtcggggcccgggtggccgcggggaccgtgttcccgacccgcggccctgaggggtacgggtcgcgcctcggggtcgggcccgggacggggtgctggggggtgcggcggagccctggggcctgcgagggtcgggggagcgggagaggggccgggcgggggctgcagccctcgagccacccgggccgcatctcgtccgcatcccctgcttggcatctgggggaagcgggcagtcgcggcccccacagcgctgcgagttgggctgtattccagagtaatgtgccctgtccccatcctgcgtccaggtcagcgcttatctgtaggatttagtgttaagctctggggtgaaggcgttactgacgggctgaagggaaactagttacatcggttttgatcgtattctaaataggcaataaaatcataaattctccaggctgacttagtactggtctgtggccccactgataaaggtatcgttcgtttctctgccaggtgtctcacagcacagagggctgctttcagcctaagtaccttcagtgggcttttgcccttttccctttatgaagagtagagactggccgctagtcctggaagcactttatttttagttgagttgacatttcccaggaagatgcagttatccccgtaagtggataaagggttctcagtaattcagactctcacatggcttctgccgtatgcctgaggtgacggcgacggcggtaacagtgtgtcagagccaggtggagatataagatggtcaggcccagaggagcggggagcccaggctggaatgtggccttgggaaggaggaagagacggggtctgggagggcatttcagaggactgaacaacaccagaggcgtgaagcttggtgcacggcagccgggggctttcttagtcccggaggaattggggatggggacgtgaagagaaaggtgggagccagactgtcaatgctcccggacgccaggcagaggacttcatcctttccacgtgcagagtgatggaccacagatgtggatgaatgtgacgggcctggaacaaggcacatagagagtcttacactttctggcacgtcctcatggtctctgcttggactggttttatctccctttctgttttgtttgtgaccaggcataaagcagtcaccttcaacaggtaattgatgggctgtctactatgtaatggacttccaggtggcagggcccagccccgaaccagacaagggacccctcaaggagcttcattctagcaggagaaaattgagaagtaaaccagaaaggtatcaggaaacagttgtacacaaaataaaaatagggtgatgtgatgtaagggactgggggtcagtgtgggcggtaacggaggcctgtgaagaggaggtgggcttcaaactgagcagagaagaggactgcagagggggcagctggtgtgagggctggccctgatccaggaacagggctggcactgccttgcccggctccaagggtgctccacgggctgcccactgattcctcacgagagccttgtggagaaggcatgagaggtgctgttgtcccatttcacagactggaacctgaggcatcctggaatagcctgtcctagtcacactggcagagagtggtagagccaggatctgaaagcaggctgttggagtccaaagttcacgttcttgctcctgc

SEQ ID NO: 1296 - DNA, 4001 bp, Homo sapiens
gccttactgttttaaccaattactttttccttaacagagccaaaagaagtaggtgacttgtttcctagccatgttgtactctgtggatataggtgaattcacataccttaagtgttgataccatgtgatgcaaatgctcgctctttcctccagcatttttctcttaccatccctagtataatcctccattttaccatgtactatcctatattgtgtacatgtatattgcatgcatatcatagcctctgatgctcctctgggattgtgtgtttttcatcttaagagtccccatagtgtccagcatggtgacataaaacagggcctcatcatctttgccccttctcagatgttgttcaagcctgttaatatccctctccaaatgtgataaccattagtgaaaacgatattccagacacgatttcaccaatatggagagtctctacccttttcccccaccccaaatcacacttctgttagctcaatcttagacttcagctgttttagcagccatatctcacccatactggccctctggtctgctaaaacccaaggtctttttcgggaggtctgttattaagcccagattcccactaccttatgtttatttgtacaagtctttacgtttacccttgttaaactgcttcttggttttccacgcaaggcagcagcctgttgataaacgtgtttttgaagcacaattctgtggtgtgacagaagactctttgattttcacttgggtggtagcaggaaaaggagaccaaagagccttcagccacagggtgaaagggagcctccagaaggctggctctgcccctgggtctccatggagaagccacaggtgctaatggaggtttggtacgcacgtagtttgtgcccttttcttctttccagagcttcctgagcttctcccttctaccctgggcctcttcagttctcccagatagcggacccccgaggcagcagcgcctcaacaaggtggcagaggtccctgtaaagcccgcgctcgggctcgcagcccccaacaggcagcctctaacccgcgctcccgcgatgcctgggccccctctggaggctcccctcccccaccgcgagcgctgtccctcagcccccgcgagcggcgcatggacgcgggacgcagctcccggccccgggttccggcctccgggggcgcgggcagcgcgggaggctctccgcggcgacttggcgcaggggcccagctcgggcagaactggcgggctccgggcggcgctggtggggcgtgggcgaggcgcgggaggggaggtctgcgccgccccgggactggcctgagccgctgggggagctgcgtccctctgcgccccggggcgggaaaggtggccctcgcgcgggggtcgtggcagcaagctgggcccgcgattcggggccgggagtgggccggcccgtacctgatcttgaagtcgcggttataaatggtccgcagccgctcgcgatctgtctccatgtccagtccccgaacgaccaggaaactctcgaaacactggcccgcctcccggagctgccggcagctgaacttactgggcatcgcggcggcggctgcggcccaggcaggagggtccgtggaaatgaaactgaaagtcgccgctgcagctggaagttggcggccctgagatgagggtgcagcaggagggaagccccctaactctgacccctgatcctgcgggctcccttctccccaccaggcttccctcctccgttcttttcttacctgagctttcccttcggtttcttcgtcctatcccctccccctcttcgcattaactctttcctaaagcgtctgacccctccctcagggccctccccttaccccaagctccctcccctggcttctagccagtatcagaacgtggctaccgcttggggccctctgaacagcccgggaggacctccgagcctcagccagggctaccctcacgcccaccctccagagcctcgggactcagtgaaaagcaggagagcaaagggcagggctgggatctaggtcggctgcggccggaatggggaagctcatccagcgcctcccccagccttccagggacgtaaactcggggcgacacgccccctcccccattttcccttctcgggctttcagacgcacgtagttggcataagggtcaaagaagtttggggaaaagaacccagtgtctctgagataaaggtgtgtacgtgtgggagggagggacaaggggctctgccaggatacacagtaattgcttttctctgccacatcggcttatgtggaaaggctggtgaccgacccttacccctgagccacatatttgggcgcttcgttgcattccagtctgtattgctctttaatttttactggtatataaggtggacccttatattcatcaaaatactagcatcttgagcgtaagggactgttgtgttaggcaataataagtggttaatagtgacagcatcagtaccaagaagagaactaaaagggcagtgtgcttcagaagactgtatagacaaatttaagggggtggggctacaataacaaacctttgtatctatttttttcccgcagaatgaaatgacacacacactagaatgggacaagctaagttacactacaaagttttaaatcaaatacatcactttcaaataaatcaaagctagtgttgttctccatagtagctaccagcaggaggccacacactcaatctacggaattgaagaaagtccagaacccaggtcatactccagctgggctacccggtaccttctctcaggccaacaaccaaatgaagccaggaataacaggctttagcaacaggaaatgcaatgtcagtgggaaccaaagctacggggatgggtaaaatagggcagaggaaaacatcttacaaacttattatgcaaagtagaagaaaaaactagaaaagcagccaaagattttaccttttttctccctcaatgtcctgatgaggttccagaagaatagagagggtgaactcttaaaaattgccttgttacttaccatctcaaaaacgtaccatcaaccgtactcaaactgaatgtctggctccattctgaccagcaaatctaaatccctattattcttggatacaatctcccttcttctctggtcaggtttatgtcttggatgttctcaaaacgtacacaaaagtctgcagtatagtaaaaccttgggtaaaaagtgtgatgctatgtggctttgtttacaatggaacttctctaaacaatttcatccagaaaaatctacttcacatggggttctaattgttattgtcagagctctttgaatcagagcaactccatcttcaacagggactgggtaaaatgagactgagacctattggactgcattcccaggaggttaggcattctaagtcacaggataagacaggaggtcagcacaagatacatgtcataaagaccttgctgataaaacaggctgcagtaaagaagctggctaaaccccaccaaaaccaagatggtgaggagagtgacctctggccgtcagatgtgagatttgtttctgtgctcagagagcttatatatactctgtgcatttatatataccctatctgttcaaagaagaaatttaagttagctcaacttaaactacaggacaatccagctttgttcatatttaccaatcttcctttgatttttcacatagtaggtagctgaaaaacgagacaatggtcaccagcatttggtttacttggtagttttatagaaaattgtaaattcacaagttggcattcaaatatttatcattctttgagtttgaagagaatatgccaagtttgccaagcatcccatgaacctagatgagtccagcaccgaagtcttagactataaaagagaacaggcactggaactaggcaagcaatagagggataaccactgaggctcagatgaaaaaagtcttcagcagtgtcatttcaaaccaaaatataggagggaagcctcacaaaaaacccttttcc

SEQ ID NO: 1297 - DNA, 4001 bp, Homo sapiens
tcttaccatccctagtataatcctccattttaccatgtactatcctatattgtgtacatgtatattgcatgcatatcatagcctctgatgctcctctgggattgtgtgtttttcatcttaagagtccccatagtgtccagcatggtgacataaaacagggcctcatcatctttgccccttctcagatgttgttcaagcctgttaatatccctctccaaatgtgataaccattagtgaaaacgatattccagacacgatttcaccaatatggagagtctctacccttttcccccaccccaaatcacacttctgttagctcaatcttagacttcagctgttttagcagccatatctcacccatactggccctctggtctgctaaaacccaaggtctttttcgggaggtctgttattaagcccagattcccactaccttatgtttatttgtacaagtctttacgtttacccttgttaaactgcttcttggttttccacgcaaggcagcagcctgttgataaacgtgtttttgaagcacaattctgtggtgtgacagaagactctttgattttcacttgggtggtagcaggaaaaggagaccaaagagccttcagccacagggtgaaagggagcctccagaaggctggctctgcccctgggtctccatggagaagccacaggtgctaatggaggtttggtacgcacgtagtttgtgcccttttcttctttccagagcttcctgagcttctcccttctaccctgggcctcttcagttctcccagatagcggacccccgaggcagcagcgcctcaacaaggtggcagaggtccctgtaaagcccgcgctcgggctcgcagcccccaacaggcagcctctaacccgcgctcccgcgatgcctgggccccctctggaggctcccctcccccaccgcgagcgctgtccctcagcccccgcgagcggcgcatggacgcgggacgcagctcccggccccgggttccggcctccgggggcgcgggcagcgcgggaggctctccgcggcgacttggcgcaggggcccagctcgggcagaactggcgggctccgggcggcgctggtggggcgtgggcgaggcgcgggaggggaggtctgcgccgccccgggactggcctgagccgctgggggagctgcgtccctctgcgccccggggcgggaaaggtggccctcgcgcgggggtcgtggcagcaagctgggcccgcgattcggggccgggagtgggccggcccgtacctgatcttgaagtcgcggttataaatggtccgcagccgctcgcgatctgtctccatgtccagtccccgaacgaccaggaaactctcgaaacactggcccgcctcccggagctgccggcagctgaacttactgggcatcgcggcggcggctgcggcccaggcaggagggtccgtggaaatgaaactgaaagtcgccgctgcagctggaagttggcggccctgagatgagggtgcagcaggagggaagccccctaactctgacccctgatcctgcgggctcccttctccccaccaggcttccctcctccgttcttttcttacctgagctttcccttcggtttcttcgtcctatcccctccccctcttcgcattaactctttcctaaagcgtctgacccctccctcagggccctccccttaccccaagctccctcccctggcttctagccagtatcagaacgtggctaccgcttggggccctctgaacagcccgggaggacctccgagcctcagccagggctaccctcacgcccaccctccagagcctcgggactcagtgaaaagcaggagagcaaagggcagggctgggatctaggtcggctgcggccggaatggggaagctcatccagcgcctcccccagccttccagggacgtaaactcggggcgacacgccccctcccccattttcccttctcgggctttcagacgcacgtagttggcataagggtcaaagaagtttggggaaaagaacccagtgtctctgagataaaggtgtgtacgtgtgggagggagggacaaggggctctgccaggatacacagtaattgcttttctctgccacatcggcttatgtggaaaggctggtgaccgacccttacccctgagccacatatttgggcgcttcgttgcattccagtctgtattgctctttaatttttactggtatataaggtggacccttatattcatcaaaatactagcatcttgagcgtaagggactgttgtgttaggcaataataagtggttaatagtgacagcatcagtaccaagaagagaactaaaagggcagtgtgcttcagaagactgtatagacaaatttaagggggtggggctacaataacaaacctttgtatctatttttttcccgcagaatgaaatgacacacacactagaatgggacaagctaagttacactacaaagttttaaatcaaatacatcactttcaaataaatcaaagctagtgttgttctccatagtagctaccagcaggaggccacacactcaatctacggaattgaagaaagtccagaacccaggtcatactccagctgggctacccggtaccttctctcaggccaacaaccaaatgaagccaggaataacaggctttagcaacaggaaatgcaatgtcagtgggaaccaaagctacggggatgggtaaaatagggcagaggaaaacatcttacaaacttattatgcaaagtagaagaaaaaactagaaaagcagccaaagattttaccttttttctccctcaatgtcctgatgaggttccagaagaatagagagggtgaactcttaaaaattgccttgttacttaccatctcaaaaacgtaccatcaaccgtactcaaactgaatgtctggctccattctgaccagcaaatctaaatccctattattcttggatacaatctcccttcttctctggtcaggtttatgtcttggatgttctcaaaacgtacacaaaagtctgcagtatagtaaaaccttgggtaaaaagtgtgatgctatgtggctttgtttacaatggaacttctctaaacaatttcatccagaaaaatctacttcacatggggttctaattgttattgtcagagctctttgaatcagagcaactccatcttcaacagggactgggtaaaatgagactgagacctattggactgcattcccaggaggttaggcattctaagtcacaggataagacaggaggtcagcacaagatacatgtcataaagaccttgctgataaaacaggctgcagtaaagaagctggctaaaccccaccaaaaccaagatggtgaggagagtgacctctggccgtcagatgtgagatttgtttctgtgctcagagagcttatatatactctgtgcatttatatataccctatctgttcaaagaagaaatttaagttagctcaacttaaactacaggacaatccagctttgttcatatttaccaatcttcctttgatttttcacatagtaggtagctgaaaaacgagacaatggtcaccagcatttggtttacttggtagttttatagaaaattgtaaattcacaagttggcattcaaatatttatcattctttgagtttgaagagaatatgccaagtttgccaagcatcccatgaacctagatgagtccagcaccgaagtcttagactataaaagagaacaggcactggaactaggcaagcaatagagggataaccactgaggctcagatgaaaaaagtcttcagcagtgtcatttcaaaccaaaatataggagggaagcctcacaaaaaacccttttccagatggctgggaaatctttgccatagcgtacaacaggctgatttcagcagcttgtggtgataaaatagatacaattcaagcaaatattctgctaagggaggttaagaagggggcggaagggggagagggagtgtctctggcagacttggttaaggagggtt

SEQ ID NO: 1298 - DNA, 4001 bp, Homo sapiens
aggcttttgctcaaggtcacaactataagtggtagaagagaatgatatccaggtctgtccacacaaaaagctctgggtagagcttgttcaacaatttcataaataaggatagacttaaaaaaacacactggacctatgggatgagaaatgacactgactcaagcctggatgaagtaaagcatgcagtttgggggagggctcagtctgcaggcctctgccagcagcagctgaagaaagtgacctttactccaaaccctacagtgcgacaaaccacccatccagctctgcctagagtgggttaatatgccacaattcgaaaagagaaagagaatgagtgtttcatggtggccccagacagtttggtggccgcagaagttgagaaggctcaaatctggagatcaggtttgggttggagtcgtgcgtaagggagcggatgtcacataggtggggaagggagctgacttgagatacgttggcttaggaagagatgttgcaggagagagggtgaaatgcacaggctaggagagtagacggcttcacttgaagggaagggattggggctgtggatgcctctagaggcagttgtcagagggcctctaaaaggtccattttagaggaagcgagaaggaaggtctcgataaggagccattcagggtccattacctgctggatggttgtacaacggcctcaatttctcgggcagcatcagctccactttatcgaggagccggtggtaggtggcccgcaggcctcgggcaccggcggccgacatcgccgccgagggatcgttggcagccgggtgggagcgtggctgtgttctcgtccctggctgacaacgaaggggagctagtcacttttcctgccacgacgactcgcgtccgcctctcgcctggagtacccttcccgcggctttccctgcccgctgtgaaccgaaaagctgcggcccgcgccccgcgaaggttgagggggcggaggctgccgactgccagcccccggtccgcctccggcccccggcaggagagagggaggagccatggcaacaggtgccaaaataatcacctcaccaagtctgcgctgcgccctgctggcagcgcgcttgcgcaggccgagctgcccgccatgattggcccgccccgaggcgcgggcggggtcgagcggaaacctcctccttctccccatgccctcgaggccatgttggagaagggaaagtgaagctgcgctggttctactgccctttcactttgattaagcaggcccgtagttaaaatgggtttttgggccttcagtgcctaaagatgatgccgcacaattctcttgcttcttttcactggagactcgtgagcgagagactacagaattgagtagcttctctctctactcgtcttttatccctagcgacttaaggatctggttagagtggcccgaatgcattcttccagggtgagggcagccgcagcacacaccagcctcagtccccagggtggtcgtcatctcgcgagaaagggttggcggggagggtatccaggacgaggagagggaggagtcgccatcgcctccgcctccgcctcctcctgttggaggggggctgagggaggagactgttgctgatctttggatgttctggttagtctaagaaggagagtatgaggcgagctccggcccgggtgcggccgggcttcaggggcccaggcgccgctgctgccaccgccatctaacgctgcgccctggaggcccggcgcgcggatggtgccggtgcggctcgggtgttgaaacgggtgtcccctccccctcctcccctcccccacgcggtggtctcccctcccacccggctcaggcagagccatgtctcggggtggctcctacccacacctgttgtgggacgtgaggaaaaggtccctcgggctggaggacccgtcccggctgcggagtcgctacctgggtgagcgggggccccggggcggaggcgctgaggtcgccgcctagagtgggggagggggcacgctgccgggtctgttggaggtgggacggcgtctcggtgggggcgcccggagactctggggtgttgggtggggccttggttgccgaattccgtgccggtgcctcccccagtcaagccccctgtgcatgctgccagccgccgcccttgctgggtttttctcggagggccgggccgtgggcagaaggtactggcttgtaaaggtgttggggtcgctgatgggttgggactcgggagacttgcggaacctccaggagctgccgcgtttagagcaaaagttagctcttttgctcttttccagcgcgctttccccgctcagccgaagaacctaagttgttgcccaccctctccttcaatctccagagggtttaggtgtcggctgcgacgcgttgaccaccctcagggacttcacgctccagacagaatccgtgtaaactgtttttgcggcgctgagccaaaacctaaaagtgatagctgagctctccccacccccgcgcgctctcccagttccactctgctcttcagttcgttttgaccgcttaaaggtggtgtagggtttcacgttcctcttcccacccctggaaaacacacttggcatttacagtttcgtagttaagctttctaaaaacaaccttcagtacttgggggaacagtattccacttttttcgttttgcataacattttttttttgaggattctaggtcacgcccgagtcaactaaaaagtttggtttcttaaaaatggacgtacttagtaaaggtcttttttgtttcttcctgtatactcttcattactctttctttctatttggagatacggcaaacaacatcataaaatttttttctttccagttttgccacttgctagttaaaaagtgtttgttgctctcatttgtttttgatttcaagtaaagagaagaaaatgaaatctcattacaaccaacagttctggtttgtaaattatttaagaaaagttagcatgcaattttttaattctttttagtgtctcaagtaaaatacgaatacattttgtttataaaaactcaataaaaatgaagcaaaaatccctttgatccctcccattcaatttcactccgccacccttagaaataatattttctgttttctgaatattcttccagacctttttgtttgcattcttacaagtacatatgtacatgtacaaatgctggggtgtgtgtgtgtttgtgtgtgtatgagagagacacctgagtgcatggtgtcatattgtaaacattgttttcacttctccacattttggagatctttccatggcagtaaaaatagattgattctgtcttttaaattattacatagtaggtaacattatgaagtaccatagggtactcaacctttcttctttaagtagacgttcgcccttacagcattttaatgaacatcattctacaagcttctgtgcatttgttgtaggataagtacctagagtggtgattaatcattttaaaattgaacatagctggagtctggtttttaaaactatttaccaaaaaaagtgtgcagtatttcttttagaatttatttgcggagaaagaacttaattttagcttaataaaacaaacgttaacattgttttgcatggatacatttataatttggtcctttatctcagttggacagtttaagtacttgtatatagttctatattttagtgttttcttttggttcagttacttcagctatatctacaaacgagttaattaaaatataacaaaaccatatacctgcttttccccctcctactccaactccctaatggaaatggaatttgtgtattgggtctaggggaattgaagggttcactgactatattagaaagcctgaattacagtttttcaaatgtgtatgtatacatacagggagttctttatcttaaataatattttagatatgataatatatactcttaaaataggacatttttggaatgacttcctttaaaagtggttttctaagtacttgaaaa

SEQ ID NO: 1299 - DNA, 4001 bp, Homo sapiens
tgttcagggttttgttgcgaaatctccattaatttggaggcctgaaagcctttgcttttgtcagtgggaatgacccaaagtaggaagcccctaagtaggcgtggctcatatctgagcctatactaactctccaaggacgaacctaggtctggaatccccaaagtatggtctgtcctttcctggggcaagattgaaggtaggagataagaggtggggcagaagaaggtcagcatacttctctacttggggaggtctgctttggtccatcttgccagggcattgtgggctgagcacatggagactggtccagagcagaggctgagtgaggcctctgcagagcagggcagcaggtttctgtggcaatcagctgtatgaccgtgggaccagtggagttcttgggatctctggggccatagcggagttcgtacctcaggaaatcactgatttctggagctggctcctcccagctgatctgaagttcccctggctggctcccacccatggccttgatgatactggggggagccggcaggcctgagggcaagacagggcacatcagaactctgagtaccacagtctatggctcagcctctggactgcagagaggggtgctgggggctgaattggggcagcttctggattcaaaaattgtaggctgtcattctcctggagggcaggctagggaggctcctgattctgttcttctctcatgagaacagtgacttctttgcagtatgatggcttgctagactcagtgcttcttgtaagcagggatccctttttctctccatatccccatcacctagcccagtgtctggcacacagtaggtattctgtaactcttgaatggatgaataaatgatttgttgacgatgggaggaacagggtgtgaatgatctgttgggcatttctagctctagatgccaaggctgggaggaatgacaagggagtcttggggtgcctcagggggtctggtaataggggtatccgtgctgagctggaagggcacaggcaagtctgattccgggagctggactgggggcagcaagtggagggggcagggtgacaggaggatggctcttacctacactgtccacaaagaggactcgctgagtccgagtctggtttaggaacacattcttcacccagaggtgcagcggaaagaagagacgcacttcctcctggtctggaaactggcacacgtatcgggttccaaagtggggcatgctctgggaactcagggggcaagcacggggcttctccctgttggcatagaagaggtccctcctacacagccaccatgcggagccctgaggacccagacctgggcccatgcccaacttctgtctctagtactgccatttttcttctcactgcctgggataggtgggattaggggttatgtagggctggagctggggcccacatacatccaaagcacatctgttcaaaaagtaggtacttagggcttgtattcagagtggtcctcggacaggcaggaaagctgctggagtgggactcagctaagtgcagggacagatacatggggagtggggcacagtccagcacctaccgcgggtaggcatacagcagctggtatgtcccactgggcgctgcctcttcctcatcccagaagcaagtgaggtcctcaaatgttcgggagaaacacttcaggggctctgagtctgatgccagcaaggagacatctaaggaacagctggtgagttggccctgggtcctcccaggcatgtttatgtggaaggggaggggaccagcaggagagcctcttactctacctcccctcccggggccctgcatcacctcccagggctccctcttcctgggcataggtgatctccaccctctgtgcacctcaccttggctgctgacttgggccaggttttgaggggccaggaggaggcaggaggtgaccatgaagagggcccaggagggcatcttctccgccactgtgtgcctgccttagcccatcctcccttcaggaagctgggccccaatcccctcccaggccagcccctcaggttcctgtcagatacagccccacgtcctgtccctgtccctgcccctctggggcccatccagaccacactggggccaggggccaggggagggggagtgggcaggagggaaggaggaatttgaaagagaggacacaggccttttggtgtgagggagatgggggttgtatatttgaccgtgtaccaaaaggcaactcagcctctgtatctgtgctaacgattatagaatggtataatagcatcagaatagcaacttttactgagcacttactatgctgccgtgtgttaagcactttatatccattcacttagacaatccgcacaatagtcttgttatttccattatagagatgaggaaacggagatacagagaagttaaagatttgcccaagattacatactaagacataaagctcaggaggtcaaccttcagaacccacctgcataacagccatgctgtgctatgctcttgggaggctaatctgctgagaaataactctctgccccacaaccatgccaaatggtgggtatttccactttaatagttctgtgactttgcgcatgaataaacacattctccctggaactggaaatgccctctccattatgggtggcctccacggctgcctctaatcccttgctactcaaaatgtggtctgtagaccaggagcaacagcattaggtgggcacttattagaaatgcagaatcttaggccccaccccaggcctattaaagttgaacctgcattttgccaaaatccccagatggtttgaatgtaacttaaagttggagaagcaatggtcttcagtacttttatcctgtttgctcagattggagatggctcacactccttaccctgcccccttgtcttgtatccaataaataactgcgcagcctggcattcggggccactactggtttccgcgtcttggtggtagtggtcccctggacccagctgtcttttcttttatctctttgtcttgtgtctttatttctatgatctctcgtctttgcacacagggagaaaaacccactgaccctgtggagctggcccctacaaaaatagaacctgcattttaccaaaatccctagatggtttgaatgtaacttaaagttggagaagcaatggtcttcagtacttttatcctgtttgctctgaatcagtggatggggctgggtgcagtggctcacacctataataccagcactttgggaggccgagctgggtggatcatctgaggtcaggagtttgagaccagcctggccagtatggtgaaaccctgtctctactaaaaatacaaaaaaattagctaggcgtggtagtgcttgcctgtagtcccagcgactcagaaggctgaggcatgagaatctcttaaacccagggggcagaggttgcagtgacccaagattgcaccacggtacgccagcctgggtgacagggcaagactctgtctcaaaaaaaaaaaaaaaaaaattcagtggatggctggtctcagctcttcagcctgtgctcatctcctgtcactgaaccccaagcctcctcctgggactgctctgtatgtggattttatgccaattctaggaggcttgactcttgtgtgggtggaggtggggacaggaggtgagttgtggggagggtgcatagccacatcaactcccatttttagcccctcaggcctcagctagggctcccattgctggctgtacagactaagtatcctcagtatcaaggaggagatggaacaccttcagctctcctgtgaagtcttagtttctctggcaccatttctctgcaagcagtccctgactcagatttgtctttagctgtacctggctctcacattacgaggactgatggtaatgactttggatgccttccccagtccccaggcaagggctacccaaacttctgtgagatcaagtgagagggaaaacacaacttcagtgttcatgcagtcccatgg

SEQ ID NO: 1300 - DNA, 4001 bp, Homo sapiens
caacaaatagttttgtggagtttttttttccacatacatattgcattgtattctagtgtctttttgcttaagaacttacgtatctggaggagctttccctgttgattcatagatatcaatcttattttaacagctgcattggatttcacaatacagcaaactcagatttcttgcagaaaaaaatgaagataactagaaaatataagtcttcttccctggcacaactgtcctcattgctgaatccctggttgccatacagcttgctcttgactggagagtcaggaagggaagggcctcatacccctctcagctgggtgcagagcaacaccccaagcctacagctcagatgaccctacatgtgagccctctatggttcaactgtcctcaccttcctcttggccactgtggcccagtgccatccccaagacttacccacacaaggaaggtcattccagagagactatgtgtgtgggctggccccagggaggggcaactgtagacctttttgttctacaggagggggaggtggcaaccaaacaaagttccattgtctgaccaacgctggggggctcatgccacccctactcccaccccaactgtcctgaatctctcacctcagcatgcaataccatgtacttaccttctggaacttccaccttagaaccttcttgggaatcccccttgtttaacaagggagataattcactggctctaacttctattcctcctgttacaatatcaaccattgcccttctcagctgtgctcaatggttctatgagtggaacaagtgttgagacacaactctccctcttccttatacatcaagattccttccccctatttccctcactatgcccttctccaactctctatctttaacattttctcagggtacccccaaatagcccagtacaacccagaagagtctagggctcaagcagctgacagcagagaaccctgggcattctggccagccccctttcccttgatgtcctccccaccacccccacttgcctatggctcactcattgcactaggattcagggcagttcagagaagggaaggggccattccaataatcctgctttgacctcttactcacccaacatctgccagggggcaaggaaagggctggtcagcttatgaaggaagacagctttagagggataagatcccagaatctcatagaacctcactccattcacccacacaacaggtgaggagccatagagagacaaaaaatctgaggagctgagaccacaaacctgggctccttacttagatcgcactctctttttccttctgggaaactaaggttaaggcacctcctgcactgctaggggacgagtgggaaccaaacccaggtgtttgagcctatttctttatgtaatctaacactgcttcccaccaggctgttagcatggctctgggggcatgctactatttccaacctgggtccagccatggccaccactcagggaagcttgctacactctcttttaccctttcttttaaaataaaacctctacttcctccctctaaatgcatatttttttcttttcatatatatatatatatattttttttttttttgaattttacagatggagtctggttatgttgtccaggctggtctccaactcctggggctcaaataattatcccaccttggcctcccaaagtgctgggattacaggcatgagccaccatgcccagccgcatattttttctttctgaatataatgtcaccttcctgctcctgcttgttctttctttggttgcagtggggagtgcagcaaaggctgtggggattgctgagagacacctgagtcccaagactcccagagtagagtggctccacttacccaaagaagagaagagcagcacagccaggatagggctggggctggatgagggagccccaggagccatagctggggcaggggcaggggcccggagcatctgtggggttgagaaagtgggggaccaggaactgaacggggggttcctggaacctgcttaaaatcccctagggccccagcatgagggggctgtcctcagccagtaaccaattgcagcctggcatgtgcagttgagaggtggtggggaggggggcagagtgcagggagcagaaggggcattgtatagtctgggtggaggggtggggggacacataccaccccatacacagagggctttgtgtccactggcctccccctgccccaggctggaatgttgtggggggtggtgagggagagggacaaaaacagggacacagacacacttctctgagggatagatatggaacctcaatttaaaggccataaaaagggatttctcctcagcctccttgcctgagagaggctgcctcacagccctaggaactagagggaggtttcccccagagaactctgaaaataggatatcccctgttatctcctctaatgtgggctgcattacagacttcttgagatgaccaagtcctatgggagtttttttccccgcacctcccttcatcctgtgcgattcttcccagacagaagtttttctccactggactatttccaggcaagaagcccctgacctttccgtttgtcaagaagtccttcagtgcttcatgctgctgtttaagtccatttcaatttatttcaaggctacaaaattgtattaagtgccagcaatatgtaaagtatgagaatgcaggtaatagagagaggaataaaaattaagtccttccagcaaggagttgaaaatttggtttggggaggtggagatgggaagatcagaggacaaacccatcaacaatcaagtataataagccatgacacttcctttagtaatgaacaaaatgctgggagtacaaaagaggggcacacacagctgcaatatcaggaagactaagttatatgagagattaaagacaaaataaactttaataaatgaagtttatgccaggcatagtggctgacacctgtaatctcagcactttggtaggcttatgcaggaggattgcttgagtttaggagtttgagacctgtctgggcaacatagcaagacctcgcctctaccaaaattttttaaaaaatcagctgggcatgttatcacatgcttgtagtcccagctacttgggaggctgaggcaggaagatcgcttgaacctgggaaatcaaggctgcagcgagctatgattgtgccactgctttccaccctgggctacagaatgaaactctgtctcaaaaataaataaataaataaataatcaaacaaataaatagttcagagggaagaatagttgtgtctaggaggcaatgttagatatgaatcagccttgaaggatgactgtcattttggaaagggagatagggagggttaccagaagatagaacagcaaaagcaaggacaaagaggtgagacggagagacagaatgtgtgtgtgtgtgtgtgtgtgtgtgtgtgtgtgtgtgtgtgtgtgtgtgtgtatgtatatgagatgtaggtttctgaagtgttggatatattcagggccgatcttgtgccatccactttgacttgatttggggaaacttgaagtggcatagtcagaaatgagactggacaggaaagtcgaaaccagtttgtgaaaggccttaaatgacaggtgaaagaaggtgaattcaatttggtacatcatgagaacctgaaggtgttggggtggagttagccatggggatgtctacataaccagagctgaggtttttttgtttgttgaggcagtctcgctctgttgcccaggctggaatgcagtggcatgatcatggctcactgcagccttgacctctgaggctcaagcaattgtcctacctcagctttccaagtagctgggaactacaggcgcatgccagcatgctgggctagtttaaaattttttttttttttttttcagagataaggtcttgctctgtggcccaggctgtagtgcagtggtgcaatgatagctcactgcagcctcaacctcccaggct

SEQ ID NO: 1301 - DNA, 4001 bp, Homo sapiens
ttaaaaggtgctcagtgaatgtttgctgagtaactgtcttgataaaactttagaagctatcctgtaaaagataaactcttatgtgcagtatccatgaccagaaaagaggtgatttggcaagaattttagattcaataattttctaagttgaaccaataacatcagctgctgatttttacatatcaacattcatcttcattactgaagagttacgtccaagttgtatggggctattactctagtgatcttttcactactatgtagttttgcactccttctacgtttaataccctgattttaattaagatcaccctaactgctttgtcctccatagcaatgtctgacctctcatgcataacaattctgtctgaagcatatttctgataaaccttaattttaggctattttctacttgtttgattaaacacaaataccaccaccaacaaacacacttttaacctttttttctaagacaaaatacagaatggattgtgtcttacacaaagtgtgtcatcatctgtcaacccctggagggtagggagacttttacatttatgctttacagcccctggaatcactgtttaagtggaacagttggtgatccaacagaacttcacctagtttccctgatccaaggattatattaagaacttttccatgaagaaagaaattactgagtaaactctggtattcagatactgtgatgctaaatcataactgacattttgaaaacaaagggaatgaaaaaaatctacgtggtttcttagcagctggccctctttataactattatttaactaaattcggagacagcaacaagtactttgctttgaacaacaacacagaaaagtcctgtggcagataccacttcagatgtccataaaacaagtcatccaattcccataaattgagcccgaggtttaccttaagcttgagtcacaatatttggtaagaaaaaggagctttttttttcctttaggaaaattatgctttttaatgctctatgtcttgtcaaattatggtggctacgtctggaattatgatggatttgaccaaattcttttaagccaggccatctcactggtattccaagctctttgcattctaacctagaagtaacaatatttttttattggcgttttgcagaccacggaaatgagactcttttattacggagacttaaaactgaatgagagcatgggaaagggaacttacaacaaaaccctggcttaacaggaaacaaatcaacaaaggccctacaaatgaaaaacctgcaactttccgccacctcccaaaggtgaagaacgccagaaccctagttcctgagtcagaatccgggagggcctagacgatccagagtcaccacgaggagagggcagggtgcgccgcgagggctcaccgcagccgcccgccgggtccgctcccctggaccgccccccgggaaggagcaaggtaaagcactctcccctcctcctccgcactccaggatccaggaaagagaagaaagaggctctgcgccttcccggccagtcgcggaggcccgcgttccccatgggctgggtcccctcggccccagagagcgcaggccgcgccccctccccacctcggctctcagtgcgcgcgcctggcctgcgaccgccgcgatgggcgtgtgtcgggcccgggggccccactccccggccccagccctggtcctggcatcacttacagagcccaagcgccgccgccagcaccgaccacagccagcgccggctgtctggggctgcaatcaccgccccggctccggcggacgctgccatcgtccagccactgcagtcgccgccgccgccgccgcgtccctgagcccgggtccccgctgaggttggctcggcttggggaagaggcttctgatctctccgccacccgcgccgggtggcacctccacgccgcgctccccactccggtcccagccgcggctctccagctctgcaccgaagcctcagccccactccggccctcgctgtccgctcattggcctgcccgcacccttttaaggacgcgattggagagtcaggctgtccatcatccgtccgccgggaaggccccgcctcctcggtcccacccaggcgcctcggccccgcgcggaggccgggtctgcagcggtcccaggccgagccgagccttccgcctgcctgcgtggctgtccgcctgcgggccccaccagccagcgtctcctctgcctttctcagggtccagtcccgtggtcctcttcattgtctctcctcgccacaggtctttgctgggtactaacctcgcctccgtttcagctcttcttgttctctgccggcctcacctaacgaaaaagaagcaattcatttaccttaaaaagaaagaaaagacagaaagaaaaataatgaggcgttcaattgatgggggagagacttctgattcagtcgtccaggtggaacacgttccccgtgccgtgtccccaaggcctgtcctttgcgtggactagataatgtatgtgttgcaatttgcgaaatctactagtttaaaaagaagtctccatcttgccctaacctcctcttaggaacctccctcctggcttcagaaggatgggaatctggaactctttcctactacctgaaaaacaaatgaaaatgctttttgattgttttgctttcgcatatctgtgttcctgtctgtgtccgtgaaaaatagaaagcagaagttcccaacactgattctgaagtgccctgcagaagttcccgacactgattgctggccctgctcaacttggttgccttggcccagaacagtctgccacctacgggttgtccaatcaataggggaaatatttggaaggatccttatgaaaatggcttacaaaagggaaaaatgggggacaggggcacaagaaagatgagtgtgaaggaggaaaagggaagattcaggtgggaggctgatacgatgaggaagggaagcaagctttagacaattaggacaagagcgggggaagagtatggtgagaacccaaaatgtaacctctcacttcagggtttttgtctaaggtcagtcttaacaatgccattcctgatatctgtgctgtttcagctaacattgcagtacagcgaaatcataagaacattagtgagaaaaaaacttaaaaaaaaaaaataccagaaccactttgccctatttctgtcagcagatccttttgaagttgtatctcaaatgccataggttggaaaagataccaatgcattaattgaaccatggatgtagaacacctgggctttactctcaagaagcacatcgtctactagtgtacacaaacaagtactcaattacatttgtaaaaatgagggccgggtgcggtggctcacacttgtaatcccagcacttcgggaggccgaggcgggcagatcacgaggtcaggagtttgagaccagcctggccagcgtagtgaaaccccatctctactaaaagatacaaaaaaattagccgggcatgggtggcgcgtgactgtacccagctactcgggtggctgaggcaggagaatcgcttgaactgagagaagagagacagaacctctcatatagttttatactcagaaaaggaaagagaagcgaaattaaaggcaggtaacccggcgcctaagaaccagacccgaaaccaggcctgggcctgcctgacctaagcccggtagttaaagatcgacccctgacctaaccggttatgttatctatggattccagacattatatggaaaggcattgtaaaaatccctgtcctgttctgtttcgttctgattaccggtgcatgcagcccccattcacagtaccctctgcttgctcaattgatcatgaccctctcacgcggacccccttagagttgtgagcccttaaaagggacaggaattgctcactcggggagctaggctcttgagacaggaggcttgccgatacttccggccgaataaaccccttccttctttaactccgtgtctgaggagttttgtc

SEQ ID NO: 1302 - DNA, 4001 bp, Homo sapiens
ttgttcgctgccatatcccccaaagtgcctggcacatagtaggccatcaatcaatatttgaacaattaatatatggattttttttttttgagatggagtctcactctgtcacccaggctagagtgcagtggcatgatctcggctcactgcaacctccgcctcctgggttcaagtgattctcctgcctcagtctcccgagtagctgggatcacaggtgcgcactgtgcacagctaattttttgtatttttagtagagatgggtgtgccgagctaattttttgtatttttagtgagatggggtttcactatgatggccaagctggtttcaaactcctgacctcaagcgatccgtctgcctcggcctctcaacgtgctaggattacaggtgtgagccaccactcccagccatatgatttaaaatttttttatttgtataaatttatgatgtacacatgcaattttgttatagcatagattgtgtagtggtcaagttggggctttaaggtatccatcacccaagtaacacacattgtacccattaagtaatttctaatcatccacccccctcgcccttccaaatctccatggtcagtcattccactctctatgtgcatgggtgatttgaaagaactccttcctctcatgttcatcagtcacacctatggtggtggccaagtctaagttctggacactgcccaccagtaccagtcctcagcccagggagcaagtgattagggcagagaagcctggtggttctagcccatgggccctttcccctatttgaggcaacagaaggcatttgcttccccagtgacttgagctccccgaataatgaaaaactctcccttctacttgattaatacttctcacagtcagtaaacaaacccagagccatggttttatctttcttggatcttttattacaggtagggcttgtgttgaggaaaaacataaataaacctgaacaatggatctactccactgttaatgcccctgaaactctgactacatcctcatgagactctggaagttagaaaagaggagaaacaaaagtaaaagaaaaaatatgagcagaaaagaaaggaggccatgctcagagggaaagtgaggaagttccagagtctttctagaacggctccccctccctcagaaggtggtgacatcaaaatcctacaaatatgaactgggaaactgttcaggcaatccattgctcctggagtctgagtgtaatacatacacgtttctgcccctggcttctatatttttcaccacaagttttaggaagaaaagctgtgccttctaggctgcctcgactttggagttaggagagaagaggacgtgggatactcacgggaatcgctgtgcttcaccattaacacaatgatgagaggtaacaggaacgccatcagttcccccatagtccttctctttccgggttcttttaaccaaaaactgacaggtcccttctgagaacctcttggtgacacacaaggccttctcccaataagaacaggggaagatatgcagtgtcatcagttgctaggttaaaaaaaaaagataaaatgaaagcatgaacaccttcttcggtaacttttaagtctttgctggtttcagacactgcttgctccttttggtgtatctatcttcaccctattcccaatttttaaatatttatggagcatagtcatgttcaaagcacagagaaacaaagattaatcatatctggtcaatcagggagctcaagctgctgcctctgcttccctggagcttagaattttgcttaagggtcagtaagaaagagtcacagttcccacggcttggaactccctgctctggctccctatgatgctgaagtctctgtctgagatagcaggtgtcacttagattgtcccgtaatcttcaacttaggtctgtcctccctgctactctagcacccagcacaataagctcaaaacacttactgaataaaagaaggcaagagaaaggcctacagaagattctgaggggcagccactcagcttgctcaatcagcaatccccaagatcaagctgtggctacactgtcataaggagcacatgacaagctggaaaacagcagcttaagcttgtccagggagctagggaacaggcccagacaggaaagaggaagtagacatgaaggggagaggtgaatggaggcatggccatgaggcaggcaggcttgagctgggttcagggacctgggtttgcctccccactatttgaccatgggcagaatcccaaattgcaccaaggcctgatttcttcaactttaaaagcaaatcctgtcatatatttcacagagttgttgaaggatcagaagttctgtttatgatgcatttagtaggtagtagaaccttatgtaccggttgtatggtaggttgagaattgtcgccccaaagatgtccacaacctaattgccagaacctgtggatatattaccttaaatggcaaaaacaaaataaaacaaaacaaaacccttggcagatatgattaaattaaggatcttgagacagagagctatcctggattatctggtggacccagtgtaatcagaggggccttattagagggaggcaaaagggtcagagtcaaggagatgtgacaatggaagcaaaggtcagagtgatgatgccattgctgaaagaaggacatgagccaaggaacgcagatggcctctagaactagaaaagagaaggaacagattctccttagagcctccagaaggaacacaacactttgatttcagctgataggacacatttttggacttctgtcctccagaactttgaaagaataaatttgcattgttcgaggccactaagttggtggtaatttgttatagcagcaacaggaaactaataggtctacctttacccagaataaaataagaagccaaataatgaaattaacatttggcaatctctcagcggcccctggcaccttctcttctcagatctttgtatttctctcttcctttcctttctgtttctttacattgtttttccttttgttactcatttaacaaatacagtcacctggatttctcttttggaaaactcccccaatattcccaaatgtctctcagcactggaattccatggccatgtattttttcctttgaatttttgttaatatcttgttccaaaatgcattccataccataacctgctgtactgacattaaaaagtaggtatgaggccgggcgcggtggctcacgcctgtaatcccagcactttgggaggccgaggcgggcagatcacgaggtcaggagatcgagaccatcctggaacatggtgaaaccctgtctctactaaaaatacaaaaaattagccaggcgtggtggtgagtgcctgtagtcccagctactcgggaggctgaggcaggagaatggtgtgaacccaggaggtagaggttgcagtgagctgagattgtgccactgcactccagcctgggtgacagagcaaggctccatctcaaaaaaaaaaaaaaatgtaggtatgtcaacgatgtctttcttttttttgagacagagtctcactctgtcgcctaggctgaagtgcagtggtgccatctcggctcactgcaacctccgcctcccaggttcaagcaattctcctgactcagcctcctgagtagctgggattacacacccagctaatttttgtctttttagtagagatggggttttcccatgttggccaggctggtcttgaactcctgacctcaggatccacccaccttggcctcccaaagtgctgggattacaggcgtgagccaccacacctgaccgatgtctttcattttttaagtcattgtattctaattgcaaattagtaaatttaatccagagtacagggcaaatacatataaaaaacccagagagtgataagataaaaatcacccatcagaaaaaattgctgttggccgggcatggtggctcacacctgtaatcccaactttgggaggctgacgtgggcaaat

SEQ ID NO: 1303 - DNA, 4001 bp, Homo sapiens
ttgtaacccttatgtgacttcttgtaggtgttcaaatgttggggtgtgggtgtagcttatattttttaaaagatagattcccaagcctcactctcagagactctgctttgtagttctgaagggatccaggaatcactctttcatgaagctttcccttacctcccctctcctaagcgacttttgcatgactggtggacaggccaggagtgaagacaccctaatctgaagtctgatatctgtgtttcttctgtcagagtcctcagcccacaggcctagcccctccatctctccagctagattcattcccttccctggccttgcaccacgtttgaaccactctcaacttcttccaggatcctcaatgttttggcctccctcttgccttgggacctttgcaaatactctttcctcttcctataaacttccccaagactattcacctaaacttcaattgctccctctggctaacatctagtctagtcacatttcagacaccagcttagattagatgtcccttcccccaggaagtcttcctggaatccccaaatgtgggtgaggcaccctcctcatgtgatcactctgtatcagaggatcagtctgtttacttatatgcatctactctgaaaatgagtttggtgagtgtctggctatcttgttacccctattttcccagcacatagcacatggcacacagggaaggttcagaaaacattcacggagtgagggaaggatgaatgaatgaatgaatgacaactcttcaagaaagatgtcatcatctcattcattggcatgttagttcagactgtgcaggaatctagttatttctggccaggcacaatggctcacgcctataatcccagcattttgggaagctgaggcaagaggattccttgagctcaggagttcaaggccagcctgaacaacatggcaaaaccgcgtcactacaaaaaatacaaaaattagccaggcatgatgtgtgcacctgtagtcccagctacttgggaggctgaggtgggagggtcactggagccggggaggttgaggctgcagtgagctgtgttcatgtcactgcactacagtctgggtgacagagagagactctgtctcaaaaaataaaataaattgatttctactaattcccaagcaagtggtagaggctggattcaaatccatgtttcttcaacccacagttttccctataataccatagagattcccaagacatgaattactcagtggaaccatgtcttcctgtttcttattccccattccctctgccacttttaggtccttatcctaaaggaaaagttcagtgaaaacaaggcaactttcctgatacccagctataatgccaacatccaaggctttggagtcaggcagacctgaattcaaaaccttctctctcaccagctgtgtggacctggacagatgccctcatgactctaagcctctatcttaatattccagatgagatagcccacataaagtgatgatcgcagggcctggcccacagcaagtcctcaataaatgttcatccccaccatcccttcctcccctgggtgagggcaggctggggagacttggaaaaaagacaaagtatggtttccaggctccaagactcttctttccccagatttatggcattccctccctgcatcttttcactcccttcccctcacctccccccaactcccagccactacactgtcaggacctgagagcctaaactttctgtgagccttgggctgctcatgtaaagttcaatgtgttaccttcacctggagcatccacatggtaacagaaaatccagctctaagccaaagatatgaagttctaactgtggaatacagccagagcaggagacttgtacccagaagtgcgggaaggtggtaactcccttgtgggaggctgtggagactgcccccacccctaggactttcccagagctgcccctcagcttacctaggcttccccagcccaggccagtgttacgggctttatgaggtcaccatgacccagaagtccctcagccaatgagacccctgctcccacctatatagtggggagaagagatggggtcttttcaaagaactacctgccctgagactctcttcagcctcccggaaaggacttcactgctaataaacactgagtttctcatccagaattcaagtcttcccataaaaacccctcaccatatgaccttggacctctgtgtatttcagggtgacaagggctttgaaatcaggtggtctgtgatgaggcaactgagacccatagcgagaaaatattggcccaaggtcaggagctaggatgcctgcctgtccttgtgcactcaaatccttgatctttttcctactccaccctaactcctgttccaggcacagataagtgcgtggagcagggcaggaatgagggtggggcaggccggggcacagcagtgtcatctagatcttttgataagaaaagcaagactctacggctatctttctaaagaaaatccttttgatgatgagcaatagctcagctaattaagatgattggagactagatactaatagaaacttcactgggcaccatttacaaaatgataatggaatcttcccatcttcctgttcccccaggtcaggatgtccttagatacactgcataacctgttgtcagacaagctgcctagaagtcagcctcatccgactcagtccccacacttgactgtgacttcacattagtgagcagctgatgggctctcctgaattccctccagtccacctaggatctcactttttctgcttctctcctctcctgtccaaatctggacagggggtcccctgcacccccagtctccttctgctgcttcagaggccttgtgtcatcgaggattcctcctccacttgccccttccccagcaaaaatccttcctttggctgggtgcagtggctcatgctgtaatcccagcaatttgggagaccgaggcaggaggatcacctgagcccaggatttcaagaccagcctgggcaacatagtgagacttcatctctactaaaaataaaaattaaaaaatatcaaccaggtatggtggcatgcgcctgtagtcccagctacttagcaggctgaggtggggggaatcaccagcatctgagaggtcgagctacagtgagccaagatggtgccactgcactacagcctgggcaacagagcaagaccctgattaaaaaaaaaaaaacaaattcttccctcaaacttacttctttccccagcgtcccctccctcactctttatctccagtgaaaagcctcttccaatgatcgtttttgactcctccctcttcctctctggcctcctgcatgtaaactcccaagtccttccaattttacctccaaatccttggcctccaacctcacaccctccatcctagctcagatcttcgtcattgaaagcccagattctggccagtcctgtaaataatgtcccacagggcaggtgttcccctctcctagccacccgcattaggcagagaggcagcttccctgacaactcatttcccctcttaacaccttcagcgtcctccactgctgccagggtcacgtcaagctccttagtctggcattgaggccccttcacagtctgccctgcctgcctgtccatcttgtctctgctcccttttgatttttaagtttgtactgaagcaaaaaattgcatatgtcatgtctatttttatgaattttcaccaagtgagcacacccatgaaaccagcacccagatccagaaatagagcattaccaggaccccagaaatcctcctcatgtcctacttccaatcgctatcctcctcgtcaggggaacagctatcctgacttttaatatggtttgcctgttttcatacttcatataaatggaattataaaacacagactcctttcttctgacttctttggttcaattatcatgtttgtgagattttaaatatcctttgcacccggtagctatttattttcttgtaac

SEQ ID NO: 1304 - DNA, 4001 bp, Homo sapiens
taattatgagtatttccttttaattttgttctgaatacatttctttgtgtatatattagataccaaatattttttcttttcttattctcttatcacataatacaaaatgcaatgacttcatattctagtatttaagtattgttaatgttacatcatagtgtttaagttacaggacatcaaggaagagagtaaacatcactgaaggactttatctcctcctctgagaagggtttagtgcattttcagttgtatgcaggacatatgttggaacaggaattaaaagaaattaaagaatgtgtaagcagaaactcagttgtatgtaagaaaacccaattccccagagaaagagaaagagctggagtcctttaaaattaactgcctgtttttctgtggctagtgagccttatctctcctcctttcccaggcattgtgaagaccctgtttctctagctgtgcagctgcaaggtcactagacagataaactcaagtcataaaacatgtttttccttgaaaagtaagaaatgatgtaatgcatgtttcaattaattgaataactgtctttgtttctcacttctgtaatatgcttccccctacacagatctcccccaccccacgaaatgattaaaagataactctttgttcagggctcagtcctttggaggttaatccaactgggccggtgcacctaaataataaatatccttctcaaccccatcggtctctctgattccttatcaatcccactacatttcaacatgttaaatggaattatgagcttcttattgactttatttggagattaactatggcttaaggatatgtatatgggtgccaaattttcaacgtgggaactcattatggttagttaatattacgtgtcaaactgagtgagccataggatgcccagatatctggtaaacattattttggggtatgtctgtgagggtatttccagaagagattagcatttaaattggtgttctgatgataggagatgacactccctaatgtgggtcaacatcttccaatccattgagggcctgaataaaacaagaaggcagaagaatgcttagttttctctttgcctgactacttgacttgggacacaaatctgctgccctcggtgctctggttctcagatcctcagaaccaggctggaatttttatcatcaactctcttgctctcaggccttcaaactgcaccattggatctcctgggtctctgtcttgcagaaagcagaatccaggacttcctagcttctattattgtgtaaaccaataccttataataaatatatttatctatatagttgtggtttctctcatccttactaataagataatccttactagtaaggcatgaagttaggagattaatgaataaagacaaattcttccaattgccaactttggcaagatttctggatgagggcccatagtaatgtaattttctttttcttttcttttttttttttttttttttttttttgtctcactctgttgccaggctggagtgcagtagcatgatctcggctcactgcaacctccacctcccgagttcaagtgattctcctgcctcagcctcctgagtagctgggattacaggcacccgccaccacacccagctaatttttgtatttttagtagagatggggtttcaccaagttgcctagggtggtctcgacctcctgacctcatgatccgcccacagcctcccaaagtgctgggattacaggtgtgagccaccatacctgggccataacgtaattttctaatgtattcatggttctttttcttaacagaacaaaaattaagaaaagtagtcaggattagaaaaaaagacaagcttttgaatgacagaaatattaataggaattcacttacatatttgtaacttctctgtaatcacggtgagacaaagtagtgaagagaaactctagtatattacctcttagccaaaggtaaaatactctaggtagttatcaaccaagcaaattctttgaaatgttgacactcgtcatggcaaccatatgtttcaaagattccattctggaatgaatgtggtagaatgtcctggcatgcccaagtggctactaatgctcacctgtcattattgaggggtgggtaagtttctggtttctatgttacaagcactgaaagatagttcttcagaccaacagtccagtagaagctgggcaaaggataagaatagaaaattcacagaaaaggaaaactgaatggccaataaatattttaaaagatttttaatctcacttgaagttatgaaaatacaaaccattaaaatattatttcccagctaataagttaaaaagtactaaaatacaagtaaaaattaaaaaaagataatttcaaatattggcaaagataaaagaaagttgaactttctcacacgactggtgggattataaatggatataactagtttgtagagaaacttgtcaagttctagcaaaactgaaaatctacaacccagaatttccagttctaggtccatagagtgtataaacatgtatacaactgatgcactgagagacatgaaggatgtttattgtagcactttttataatagagttattaaaatataattcacataccataaaatttatcttaaagtatataattcaatcattttaaatatatttacagaggtatacaaccatcattactatctaattttagaacattttcatttagaacaagctccaaagaaaccctgtacctgttagcagacattcaccctccctctcccccaagtacctggcaaccactaatcttctgtctgccttctggacattttatgtaaatagatttatacaatatgtgactttttatgattagactgtttggatttttattactgagttgtgattttttaatatgttctagatgctagtctcttatcagatacataatttgcaaatattcctccttttctatgggctgcctttacattttcttgacagtgtctcttgaagcacaaaagttttaaatttaagtgaaatttaaatttgccattctttttcttttattgcttgtgtttttggtatcataactaaaaaaaaagaaaaagacattgcctgcattccctggcccaacttcacagagattagatttagaacttttctaagagttttgtagtttttgccttacatttaggtctttggttcattctgaattagttttagtatatagtgtgaggtagaggtctaattttatcttattttttgcatctggatattcacttgtctcagtacaatttgttaaaaagatgattcttttcctgattgtctccacatctttgtaaaaaatgaattgactaaaatggtttatttctgaactcaattttatcccattaatctatatgtttttcctatactggtagcacactgtggtgatttctgtgtctttgtagtaagttttgaaatcaagaagtgtgaattttcaaactttgtttgttctagggtcacaattataacattagcctaaaacaatgtagtttgaattaatatcaatttagtttcaataacatacaaaggttttgctccagtatacctggtttcctccttcattttttctgctattattgccatgcacattatatatattcatgttatacatacatatatttaaacattataatcccaccaacccagttttataattattgctttaagctgttttcttttaaacataataggagaacaaaaccaaataattttattctacctctgtagtttatgagtgtgctctctgtgtagacttgagtgactagctagtattcttttatttcagcgtgagacaatatcttcagtatttctggtagggcagatctgctagaaaaacaatcttactttatttgtgaatacttaatttttcctttctttctttcccttccttcctttctttctcttttctttctttctttctttctttctttctttctttctttttttttgaaggatagtttggtcaaatataga

SEQ ID NO: 1305 - DNA, 4001 bp, Homo sapiens
tcagtgcagaaatgaagactgtaataattatgagtatttccttttaattttgttctgaatacatttctttgtgtatatattagataccaaatattttttcttttcttattctcttatcacataatacaaaatgcaatgacttcatattctagtatttaagtattgttaatgttacatcatagtgtttaagttacaggacatcaaggaagagagtaaacatcactgaaggactttatctcctcctctgagaagggtttagtgcattttcagttgtatgcaggacatatgttggaacaggaattaaaagaaattaaagaatgtgtaagcagaaactcagttgtatgtaagaaaacccaattccccagagaaagagaaagagctggagtcctttaaaattaactgcctgtttttctgtggctagtgagccttatctctcctcctttcccaggcattgtgaagaccctgtttctctagctgtgcagctgcaaggtcactagacagataaactcaagtcataaaacatgtttttccttgaaaagtaagaaatgatgtaatgcatgtttcaattaattgaataactgtctttgtttctcacttctgtaatatgcttccccctacacagatctcccccaccccacgaaatgattaaaagataactctttgttcagggctcagtcctttggaggttaatccaactgggccggtgcacctaaataataaatatccttctcaaccccatcggtctctctgattccttatcaatcccactacatttcaacatgttaaatggaattatgagcttcttattgactttatttggagattaactatggcttaaggatatgtatatgggtgccaaattttcaacgtgggaactcattatggttagttaatattacgtgtcaaactgagtgagccataggatgcccagatatctggtaaacattattttggggtatgtctgtgagggtatttccagaagagattagcatttaaattggtgttctgatgataggagatgacactccctaatgtgggtcaacatcttccaatccattgagggcctgaataaaacaagaaggcagaagaatgcttagttttctctttgcctgactacttgacttgggacacaaatctgctgccctcggtgctctggttctcagatcctcagaaccaggctggaatttttatcatcaactctcttgctctcaggccttcaaactgcaccattggatctcctgggtctctgtcttgcagaaagcagaatccaggacttcctagcttctattattgtgtaaaccaataccttataataaatatatttatctatatagttgtggtttctctcatccttactaataagataatccttactagtaaggcatgaagttaggagattaatgaataaagacaaattcttccaattgccaactttggcaagatttctggatgagggcccatagtaatgtaattttctttttcttttcttttttttttttttttttttttttttgtctcactctgttgccaggctggagtgcagtagcatgatctcggctcactgcaacctccacctcccgagttcaagtgattctcctgcctcagcctcctgagtagctgggattacaggcacccgccaccacacccagctaatttttgtatttttagtagagatggggtttcaccaagttgcctagggtggtctcgacctcctgacctcatgatccgcccacagcctcccaaagtgctgggattacaggtgtgagccaccatacctgggccataacgtaattttctaatgtattcatggttctttttcttaacagaacaaaaattaagaaaagtagtcaggattagaaaaaaagacaagcttttgaatgacagaaatattaataggaattcacttacatatttgtaacttctctgtaatcacggtgagacaaagtagtgaagagaaactctagtatattacctcttagccaaaggtaaaatactctaggtagttatcaaccaagcaaattctttgaaatgttgacactcgtcatggcaaccatatgtttcaaagattccattctggaatgaatgtggtagaatgtcctggcatgcccaagtggctactaatgctcacctgtcattattgaggggtgggtaagtttctggtttctatgttacaagcactgaaagatagttcttcagaccaacagtccagtagaagctgggcaaaggataagaatagaaaattcacagaaaaggaaaactgaatggccaataaatattttaaaagatttttaatctcacttgaagttatgaaaatacaaaccattaaaatattatttcccagctaataagttaaaaagtactaaaatacaagtaaaaattaaaaaaagataatttcaaatattggcaaagataaaagaaagttgaactttctcacacgactggtgggattataaatggatataactagtttgtagagaaacttgtcaagttctagcaaaactgaaaatctacaacccagaatttccagttctaggtccatagagtgtataaacatgtatacaactgatgcactgagagacatgaaggatgtttattgtagcactttttataatagagttattaaaatataattcacataccataaaatttatcttaaagtatataattcaatcattttaaatatatttacagaggtatacaaccatcattactatctaattttagaacattttcatttagaacaagctccaaagaaaccctgtacctgttagcagacattcaccctccctctcccccaagtacctggcaaccactaatcttctgtctgccttctggacattttatgtaaatagatttatacaatatgtgactttttatgattagactgtttggatttttattactgagttgtgattttttaatatgttctagatgctagtctcttatcagatacataatttgcaaatattcctccttttctatgggctgcctttacattttcttgacagtgtctcttgaagcacaaaagttttaaatttaagtgaaatttaaatttgccattctttttcttttattgcttgtgtttttggtatcataactaaaaaaaaagaaaaagacattgcctgcattccctggcccaacttcacagagattagatttagaacttttctaagagttttgtagtttttgccttacatttaggtctttggttcattctgaattagttttagtatatagtgtgaggtagaggtctaattttatcttattttttgcatctggatattcacttgtctcagtacaatttgttaaaaagatgattcttttcctgattgtctccacatctttgtaaaaaatgaattgactaaaatggtttatttctgaactcaattttatcccattaatctatatgtttttcctatactggtagcacactgtggtgatttctgtgtctttgtagtaagttttgaaatcaagaagtgtgaattttcaaactttgtttgttctagggtcacaattataacattagcctaaaacaatgtagtttgaattaatatcaatttagtttcaataacatacaaaggttttgctccagtatacctggtttcctccttcattttttctgctattattgccatgcacattatatatattcatgttatacatacatatatttaaacattataatcccaccaacccagttttataattattgctttaagctgttttcttttaaacataataggagaacaaaaccaaataattttattctacctctgtagtttatgagtgtgctctctgtgtagacttgagtgactagctagtattcttttatttcagcgtgagacaatatcttcagtatttctggtagggcagatctgctagaaaaacaatcttactttatttgtgaatacttaatttttcctttctttctttcccttccttcctttctttctcttttctttctttctttctttctttctttctttctttctttttttttg

SEQ ID NO: 1306 - DNA, 4001 bp, Homo sapiens
cctaggctagagtgcagtggtaccatcatagctcactgcagcttcaaactcctgggggctcaaagtgatccccctgcttcagactcctcagtagctgacattacatgtctctgtaccaccacacccagcaaattttatttttttgtagagagtggtctcactatgttgcccaggctgttgctggcactattcctaggcacaatctcatcactcatcaacatgggaattgtgacctgctccgtttccagcctgggctggttcacccctccttaggcaacgtggtggtcccttgctcccaagaggtcaccatattgataccacacttaacatggacaccccatcagcatagcaaactacagcccagaagtcagtctccagggatcctctggcctcagcctcctgattagctgggactacaggaagcaccaccacgccccgcatgatggtttctgcagatgtccagaatttcagtgggacccacatactcacccataccttaactaaattcccaatgagcgctggatacttcagtccatgttcctggctagcagctgtaattcgattaatccagagctgaaataagaaaacatgaagatacttaaaaatgacttctggatgttatgtcccagcaaagcctctaattgatctaaagaatatttttctaaaagtaaatagcaaaatcagtgagctatgatggtgccatcactctggcctaagcgaaatcaagaccctgtttcaaaattaaaaacagcaaaaacccagctgggcacggtgtctcacgcctgtaatcccagcactttgggagggcaaggcaggcagatcatttcagatctggagttcgagaccagcctgaccaacatggcggaacccggtctctactaaaaatacaaaaaatagcttggtggcgcacacctgcagtcacagttactcgggagactggggcgggaaaatcgcttgaacccgggagacgaggttgcattaagcctagatcgcgccattgcactccagcctgggtgacagcgcgagactccgtctcggggtaagaaaaaaaaaccggggtacgttagatgctaggttcatgaggctgagacgggagtggtgaggcgcagtaatgaggcggcacgtggacagagtggaggcgccagcctcccagaaatgcggggggttccgggtgggcagagcttggcagcaggcgtggtctcttcgaggagcaccacggcagcagatagtagccctggagggttggcaaggggctgggttgacttcagctgccaaagggaagggaagccaccggagggatgagagcagcagcgactagggcggtggctggcgacgcagggagagtgtcaaggcggctctgcagtggcccgggcgaggggctggagcagggggtgacagtgggggtggcggcggggcgggagaacggatgtcccacagtttgcctgcggggcgacataatttgtcggagtttcgaagcaaggtatgaaaggaaggggctgagggtggccgggcggctgcacactagctgggtcgcggcgcagaaacgcaggggccgcgagtgcgctggccggcgggtgtcccgggtccacgcttacggtcctcatgttctttttcttcaggtatcgggctttggtgcatttcacaaaggctcgaatcacggttctgaccgccaacctgtagcagcgatttttccttccccggaagtgctgggacagaaaacgagaaaccagggttgtcagcggggcccgcgccggccgccccttggcccgcgggataccccgggcgcccagtgcccaggccgggcaggcggcactcaccctggcgtgcttcagcacctcctggatccgaaagtagcggtcggtgacgcgattccgcagccagagctgcgcggtgaggaagaccatggcgcctgcaggccggcgtcccgaacactcaacaacgcacgcgcagcgccgctgccatcttgcccgggtcggaaatggtggtcacgagcgcttccgggtcagcccctgcgatacttccggggcgaaggtcgtctcccgtcagcccgcgggtgcccagttgtgctcctgaactcgcggtggtggtgcgtgttggggagcggatgtggggccgcggcggggactgaaaggagaacggggccgcagcgcccgtggctattcgcggacgatggataaacagcagcgcacgcggaccgtcccggagcacggccccggccgcagctgtggctccgagggcaccgtgagggcagcggacccgggtcgggggccccgcggccggggagctcgggtgcggcgcgggcggggaggggcaggccgccccctggggccacgaggatgttcaggaaccgaggtggagatggtcgcatcggtgtgaaagtgcccgttgcctctgaaccttgcactttgtttacttactcattttgagacggggtctcgcccggtcgccctggctggggtgcagcggcccgacctcggctcgccgcggcctctgccttcctagtagctgggacgtcaggcgcgcgccgccacgcccggctaattttttgtgttttttgtagagggggcgtcttcccgcgttggccaggctgttctcggactgctggcttctgctgggattacaggcctgagccaccgcgccatgcctggaaattctcagcttcgaaatggtaaatgtgatcgctgtggtgctgatgcctgtaatcccagcactttcggaggccgaggggggaggaacacttgagtccaggagttcaataccagcctgggcaacatagtgagaccccatctctacaaaaaatcaaaaagaaattagccgggagcggtggtggcgcgcgcctgaggtcccagctactcaggaggctgagacgggaggctcgcctgagctctggaggtggaggctgcagtgagctcagattgcaccaccgcacaacagcctgggcagcggagccagagtctgtcccaaaaaaataagaagttttatattatgtgtaattttatatttctgctatattatcgaaaaattgggggtgtgcagtttctttataacagtttattatacttggatattttttaaatcatagaagagttggaatacaagtacaaggaaaactccccagtgttcactaccaaaatgtgccagctgttttcatttgttccatttgtttaatactctcgaaccaaattcacctactatttacgttttgctccatttttgaatcattctctctgtaaatataaacataatggatttttttcctaaaccatttgagacgctggagacacctaaacactttgctgtgtatttactcttaggaaccacaccgtagaatggtcaaaatccggacccagcccacactccagatttaactcgcttcaaatgtcttttatacctttttttccctgttgaggattcagtctaggatgacgcactgcatttgttgttgtgtttcttgttttgttttgtttttttctgtttttgagacggagttttgctccgtcgcccagtctggagtacaaaggtgcgatctcggctgaccgcaacctctgcctacccggttcaagtgattctcctgcctcagcctcccgagtatctgggattacaggcgcacaccgccactcccagctaatttttgtatttttagtagagacgggatttcacaatgttggccaggctggtctcgaactcccgaccttaaatgaccaggctgaccaacatggtcagctactcaggaggctgaggcaggagaatcgcttgaacccgggaggcagagtttgcggtgagccgagatcccgccattcattgcactccagcctcggaaactagcaaaactccatcttaaaaaaaaagaggaggccgggtgcagtggctctgcacaacactttgggaggccgaggcaggtggatcacctgaggtcagaaatccgagaccagcctggccaacatggtggaaccccatctctactaaaaatgcaaaaagtagccgggcgtggtagcgggccc

SEQ ID NO: 1307 - DNA, 4001 bp, Homo sapiens
cggccaaaaggtaggcagttgtaaatcagtgaaatgaacaaataggtagcagaaataaaaactggggttaaaatgtccctatcccacttagaattcctatcctcagataggaaataaccactcctccctaagatagctccttttctaaaggaaaaggacccagggccagactctagaattactgagtcctaaatttcccaactaagtatgttctctaaaccactcgattctcaattaatgaggtggtgaatgaactgaaggcataaatggtaagtgcttcagttaactgaatacttgcaacttaccacgtgccatgctaagtgctttcctgtatctcatttatgcctaaggacaaccaaatgaagaagtcatgattaacctcattttatagataaaaatgaaccctaacttcaaagacaaataaagatactacaatggcataaagagccctggacaaggaagtcagaccacctgggttctactccctgctccaccatcatcttactgtatgacgctaggcaacttaacttttttttttttttttttctgagacggagtcttgttctgtcgcccaggctggagtgcagtggcatgatctcagctcaccacgacctctgcgtcttgggttcaagcgattctcctgcctcagcctcctgaatagctaggattacaggcatgtgccaccatgacccgctaattttttttttgtatttttagtagagacagggtttcaccatgttggccaggctggtctcgaactcctgacctcaggtgatccatctgccttggcctcccagagtactgggattacaggtgtgagccaccacgcccatccagcaatttaacttttgaatttcagtttcatcatccataaacatttacagggttgtgggtgtcatttaaattattttaaatattttaacaaagcaaggtgcaaaataatgtattattatccctgtggggtaaatatacaaatatatattccagcacagttatatttatggaaaggaaacaagaaaccaaagtacttgtttaaggggagaggaactgtttgggaggtctgttaattccattttgttccttcccgtaacgtttgcattttctaaccatgtgcatttaaaaatatgtattaacggtttatctgaacagtgagatactggctcatttttcttctttatacttctcagtataaaggcctgatgttattttcggaaaaagaaacaaaaacaaacaaaaaaaaaccccacctgttattttcaattaatgctgactggcctaagtgttcctgtgagtattcaacaaatgcttagagaggactactatatgacaaacctaatgctgggaatttcattgccggcatttggtcttcacattgcccagtgaggaaggtgaggttgccagatgcatcgtaaagtcccttttacagacaaggaaatcaaggccctgaaagccggagtgactaccctggttcatacagcttgactaggagcagggccaatcttaagacccgagccttctgtgtgattgctgcaaggagccccttcacctcagtcaatccaggtctgaaccaccccagcccagagcagcttgcatgcccccgagatccttcccttctttcccttcacaatctggagatgctgctggtgagcgtcccgcagtggggttttccctgcatgttctgaaggcgcagtgcaatgtagtggggtcgaaggtctgccctctcaggtcacggctccaaaggcttcccccaccagcctcatcccagacatcgccaaggcctagctgtcttcagcacccacccgctccaaacttccggtgcaaataaaccctggggaggcgactgagccatggccagggaaaaggataggctcttcccgcacctgcctctcggacgggcacctctagggcgggcggccctcacctccactttccgcggcacttcggattttcagcacatgggccctcagcgtcccctcccccgccacgcccgtcgactttctgggagttgtagtccaagtgtaaaacggaagctcaaccacgaatcttacctctcagcatgctgggagttgtagtccgccgctagaaagctggaaacaggaagtttggcgggggtaggaaatcaaggaaaccggaacacaccatgaagcatgtcgggaatcgaaaggcaagctggttcggctggcccgcctggcacattcccgcgcatgctctgcgtggaggccgctgggaattgtagtttctagagaagaaggctccattttctaggtggttgtggcttcctgttcaaggcaaagggccgccctttccagacagggctaccgccaatgctctccctgtccttctctgctggagtgggggcagggcagattcaaaaactgccggtaggctttctagaggaagggatgaaacgtgggcccttccaatgctagtagccgatctagttacaaaatgtcagatctggaaggaaacagaaatgatctaaaccagtcattccacttaactcagggagtactggcggaatttcaccctaccaaccccctccccctaccaccccatcaccagctaagggtggcaggtacccctagcattagcaaggagaaagggttatcctattatttgacttgcactttggggtcaaattgtttatacaaccagcctccaaactcccacttcatggccatcttgggctgtggccgatactcgcatcctcccacaccccacttcttgtgcaaacccttttttaaaaaaaactttcccaggtgcgttaaacagtggctgggcaggagtagaatgaatggtgtggtttattctacgactctgcccacaagaagtttggatttccaaatgcctaaaaatggaggaggttgacaccctctacctaaatctgagatgacctggaaatcatttgcattccattaccccactttctgtcttcagttaaccaatacacccccaaagaatcagtcagaatccaatatagtaatcaacgggttttattttcctagaactgaaatcatctacggttctcagagctaaacttccaaagctacagtcagcaatttttcatcagagcccaagggagaggggccagggtaaaagagacgagactgtagagaggcatagagagaccagtaggaagagggtgggagagggcacttatttctctctgtcctctcagtgggttacaaatcagatctggtgacaacactgagggggccaggtcagggtatgtggatgagaaatgacactggaaggaacatcaaagccccagctacaaaaagaaagtcatcaagccccaaatagaaggggagcctcccagtgcacctcagaaatgggggcaacgatggggaaggagcagaatggagagcacacaaagggttaggggtctttaaaatttttttttgtaattttcttttattaaaaacatttcctaaaaaatgtgtcttttcctttatgtctgggtgatatatatgactataagctggccttgagcactgtgtggagaggaaaaaggacagctaggagtcttcccaagcatcctatttgtggcttcagagatctaaagggggacagatgctcaacactcccacccaaatgggtaaagtcaacccttcaggtctcaggtccttggcccgaacaacttggaagccccaaattctcttgatgattaactacaactcccaaaactcttggggtcggcaaaaggaaaaatgggtgttgtcaatcatcaaggatttatggaaaggagcccctcccctacaagctgtcccactttccctgaatctaggcagctgggataataggtgtagcaggggacaggagctcagaaggaggccgccctcctgtgctgcccccaccccgcatttgaggattgcccctcccaggccccacaagcccaccctgctgttgatgctccatcctttccattcctacccctgatcccaacccagaggtccagaatgcctaggagagtgggagaagggtgtcaggaggtgggagca

SEQ ID NO: 1308 - DNA, 4001 bp, Homo sapiens
tagccgggagtggtggcatgcgcctgtggtcccagctactcaggaagctgaggtgggagatcacttgaactttggtggtcaaggctgcagtgaggcacgatcatgccactgtactctggcctgggcaacacagcaagatgctgtctcaaaaaaaaaaaaaaaagtaacttctggattttgtggtgcagcagaaagagccctggactgggagtcagataaactaagttttagctctgacaccgccactgttccttaaacttgacaatagataaaatattaagactttatgttctatttgcatatgaaaaataggtgataattagagctgccatttactgaaagtcaccatctaccctgtgccaggagctttacctgcaagttagatgggatttcataaaatgaaaaatgaaactcagagactaaggaatttgctccaactcacatactttgtaagtgacaaggctaggaggagaatctgagtatgtctaccctaaagaacatcacctctctccattaccccaaatggcttctctagccctgtatcctgcagagttttattacagcctacagaacctctctgtgagcagcaaaaacataggatacacaatacattttcagcctaggcaaacgaatgtaatcttaacgtctaaaatactgctaatgcattcatccacttggtattgttaccagggtcactcaaggatgccaagtcttgtgagatccttcccactaccttgtaaggacactggaagtgtttaaaggcttgaaaatcagctttcaggaatggaattgagaagcttaagaggctggccaattgacttaagttttctcaaacctaggatttattctctggcttagtcccccaatcttgccagatttgccttttttttcccccctaatcactccttggaaaatactgtttccacttacctcaaccattctgttttcaagacctgccccatccctatcctgatttgaggaagatggaagaatggagaaagggataaacaagcttctccatggactctggaaaataatttctggtactgttctagatagacaggctggttttggcaaagtcattttgatctgtccctagtgagagtgacagaggagtagtcatgggcttaagaggtgacaggcctggagattaaacatcctgctgtctccactataaactctctccaactacttttaaaatatacagttaatctccagaatgtcagacctggaaaggtcaatgtggactgtccagtcaaaaccattcacttcccaggaaatagaggcccaggatggccagccatttgcccaaagtcaaagagagagagccagggctaggcctagaaagcagctcttttcatgctgacacgcaaactctctattactcctgcacagaggcccagctccttacaactcaattctaacaaccctcagaagacgggaatcactacggccccatttcgcagacgaagaaaccaagacccacagagtttcaatgtcttgcccaaagccacagagggtcggggtcggtgctggttagaggaacacggtcccttgccgcccgtcctggggcctcaccctcgagaaggcggcaacggtggtgaaagatatagcaggcctggtctttgtacagcggatgctcgtgaagagggggcgagcggtagaaccttgggtccttgtagccgcggtcccagggcggaaagatcggccgcgccagccagggcacgaagtgcatcttccccgcaaaggtgatgggctccagtccagggatctcgtacaccctatccaggggaggaggctccgacttccgcgtggagcgcacgccccactcatacgccccgcgtctcggggccccgaagcccccaaggccgagctgcccggagccagctagcgcccgccttgcgggcccggacgccaatgccataccgatctgatagcctcaagacctccacctggaccccgccatgttgccgcgcgcagggcctgctgggaacgaatgagaccgggcgccaaagctcgttttgggaatggcagccaattcaaccaatcacagtcaggatattcttgtcttgcaccggcccccaacccattctcattttcttataggtgatacctgctaagcgctccccgcctacccagagactgggaggaacctggaaaatcctcacgtgaggtgaagcgcaggcgagtaggtgagtggtcgtggtgggtggagaatcgctccaggacttcagacctggacttagacaaggttgactgcttatgagcagttggagcttgggaaggcacttccctttctgaggcccagtgtccctcgctgtaaaaatagggatagaaatgcctaagctgttgcacctgtacagcgcgctgctgcgagcgcctctgtcgctctgtccctctcctgagcgtgagagtgtcccccaagccagctctgagcgtgactgctcactgtacacctcttccccagcgccaaaagcgagccactttcctcgcttttcctttccctctggatttcccaattcgcctcctagaagcaaggacagagcaatgaagatgcgcctttgctccttgctcaacacctgtctgtcagctgcctgctgtgtgtcaggcgctgcgctgagccccggttggcattggtaaataagacagatgggagatgtagagcttacagtttagtgggagatgcagacagaacgcaggtaaacaacgcgaacaaataagtcaactgcgatacacacacttcctatcccttttccgtagttatttttctctttagcatttcacactaccgtaccatctgttttccatcctgatcttgcttaataactgtttctcaccctaagatatgagctcagtgagtgcaagggtttctgtttcttcactgctatatccccagcactgagaacagtgcctggcacatagtaaatatgtttagtgaatgcgtgtataacagaaacaaatagagtgccttatagagaatgagtaggggaaggttcagggaggacctcagaagggaggtgacctttaaaaccaaggcctgcggggtgggaaaagtcatccagcctgaggcaacatgtgtcaaggcctggattaaaggtggtgcctcttgaactgaaaagatagagctcagaggacgcatgaaccaactctttaaaattcatgactgacgtggccaacttttctgctaatttccaaaatagcagagaaagtgggactgttaaaacgtggagaagtcctacagtcatcgttcacacctgtaatcccaacactttgggagacctaggtgggaggggccacttgaggccaggagtttgagatcagcctgggcaacatggtgagacctcctctctaaaaataataaaaaaaaaattagcgaggcgtgatggcacgcacctatagatctaggtactcaggaggctgagatgggaggatcacttgggcctcggagatcgagtctgcagtgagctgtgatcctaccactgcactccaacctgggcaacacagcaagaccctgtctcaaaaaaaaaaaaaaaaaaaggccgggcatggtggctcacgcctataatcccagcactttgggaggccgaggcaggtggatcacgaggtcaggagatcagaccatcctggctaacacagtgaaaccccgtctctactaaaaatacaaaaaattagctgggcgtggtggcgggcgcctgtagtcccagctactcgggaggctgaggcaagagaatgatgtgaacccgggaggcagagctggcagtgagctgagattgcgccactgcactccagcctgggcaacagagcgagactcttgtctcaaaaaaaaaaaaaagaaagaaagaaaagaaatcagcataaagagggaaccagacctcattcactcataatgcatacctggtccatagcatgcaataaaaatgaattgggttgatctaacaccttgtagtctatgaggctctgtgaaggtaggaacaatgacctgtttacctctgttgcctccc

SEQ ID NO: 1309 - DNA, 4001 bp, Homo sapiens
acttgggaagctggggtgggaggaccgcatgagcccagggggtcagggctgcagtgaaccgagatcgtgcctctgcactccagcctggttgacagagcaagaccctgtctcaaaaaaataaatttaaaaaataaaaacacactactggttagtcctatctaattttggtgcttagagtcagttttggatctaagccttcctccactcctccaacaaccacctgctcccctgactcctgtcatgtggtacagtgaccacagccacatgtccatccgaaggcgactggtcaccagcacccccaccacagcctcgaccccagcccggcacctggaagcacctggagagggaagcttaccgccagcatgcgccgtggctccctgtagcggatgtggatggtggagccatcctgcttcaccagcagcacggggtagagtcgtgcataagcctggcggtgcacacgagtgagtgaggccctgctgctgtcagctcgccaggaggatgtgtgcaggcggcggagtgcaggtccggtggccttcacggtgctctgcctcagccggctgcagataaatgttcaagctctggtcagccgacagtgctgcagcagagtgccaacatgactgaggctggctgtgattgggcactgccgggccacaggagacattaccagagctggtgacccgtgccggggcaggatgagcctcggggcttcctcaggagccacaggctgtggtcagaggcgttctggccccctagccaggaagaggctgccaggctgagcaagggcacaaagcttccagcacaggggacagtggacaatagcaaggactagggaggattagaatggcggtttcctgctgaagagaggggttccctggggtggcccctgacagtaatccccagggacctaaaagtccatgcttacccaagcaggctgcccacggccgccattcctccttacagccccagtggcacgtggaggtggtcagtacaggccctggcgtgcaacctgctaggcagagaatgaagagatcttttttaaaaggaaggttcttccacctaatggtttcttatcaaatcccagcccaggatgcttccaagacacatgtaatcaccacgccactcaccaacctctcccagcaacccttggacttctcagaaccgcctgtagaggtttttccaaaagcagaagttggtcactactcccaaagattctgagtcagcctgcggcagggcccaggctgtctgttctggccgttaccgagtctgcgaaacctctctgaatggactgcagcctcaaaagtggagctgaggtcatgccttgctttctaaggtcattgctagttttaataaaaactcagtgaagtgaggattgtcatgcttgcttaaaggagaatggaggcccagggctgctttgctgtgacctggattcccatgggagtctgtgctgaggtgtgcgaagtaaaagcccagttttcaatactcagattccaggagatgaggctgcacagaggccgagcgcccagcttcctctggcgtacccctgtctctcaccaaggaagggacctgaagacaggtccggctgcctctaaaatggaaatcctgctacgtgtcctatgcccacatccctctccctcggcctcaccagcacaggagcctggggctggtccaggagggtcttcggggaaagctccctctcctttcctgctagactgcatggggacaagggcttatcacaggtgcagccccctgtccccttccctgcctccctccctcccgactccaccgggagggtacagcgcctcccgcctctgttcccggcccacacgaggcgccaacctgcggccgccacagtcgctgcggaggggtctgaggacaggcggtcctgactcccgctgcccggtggaactaagaccagggacgaggccacgcaggagatcaaggtactcactgcgttgggtgctgctgcgctgcagcccacgacgtcactggcaggcgctgcgtcgcgcggtatgacgtgttccatggcagggagaggcaagagtgggcggtgagacacgaagatatacgcccctgttgggcggggccggcgcggcgtgatgtaatctcgggggcgggacgaagcctaggtgggcggggcctgcgggggcgctgtggcggtacaagaacccaggcggggccggcgagcaggtgacctccgtccctaccgggaggaccagggcgggccggcgaggtcgagggggacccgcgggtctgagggaggacggagtgggggagtgctgagggaggacccggggtggggagctgagggaggatccgcagggctgagggaggatccaggagagctgatagaggtcccggagggctgagggaggacccaggggtcctgagggaggacgcagggggctgagggaagacgcaggggggctgagggaggatcctcggagctgaaggggcatcagctgggctgagggaggacccagggggactgcgggagcacccgggcgggggctgagggaaggaggatccgcggggctgagtgggcaccagctgggctgagggaggatccagggggagctgcggaaggatctgcggggctgagagaggatctagaaggggtgagagaggtcccaggaggctaaggggggaatctgcagaactgagggaggtcccagggggcagtgagggaggatccatgggcgctgaggtgggaatctagggaggctgagggaggatctgtggggatgacggaagttcaaggggggctgaagaggcacgcagcgggctgaggaggacctgagaggctgaaggaggatccgaaaggctgatacagcggggctgaggggggatccgcggggttggcgggggctgagaaatgaccctgtagttcacagcaaaatggagtaatttatgtcacaacgtaaccaaaatggagtggggagggccctaaggaagcagctgtcacgcatttctgaaatgccagagaggctcgctattaccttgtaaacagagcttattccgggcatttccactggcctgcagtattccagatgagatgtttggaccagggcaggcagatagcatcgcctatctgcctcagcgaaccagggtcactttgtgcaatgagttcatgagaccagggcctttgttttgtgaaagttacaaataaggagtgaaatcactttgtcaggcccagacaaacagggctgggaagaacaggaggctcaggcttagtgtctgagataagaattattcgcaaggactttctaaaaaccccacaagaaacccttttgtgtcattcacgggtctcctactttgacaaaatttagaccatctttaggactgcagtaattcagttaagatgctcggaataaacacttgcccagtaatggcagcgccaccaatgaactgaggacaactttgagctttggcgttgggcccctggaaccaatgaactctttctaagcagcttctgtgaaccgctcccttttcgctgataaaagttcccttttcactgataaaaagttccctttacccttccctcactgggaatgctggtggcttgctgctgttgatgaaaagagtcaaactttgtaaaatattttaagagatatattctgagccaaatatgagtaaccatggcctgtgacacagccctcaggacagaggtcctgagaacatgttcccaaggtggttggggtgcagcttggttttatacattttagggaggcatgagacatcaatcaaatacatttaaaacctacattggtttggttcagaaaggcaggacaactcgaagcaggggtcaagggtgctggcttccagcttataggtagattgaaaaattttctgtttgacaattggttgaatttacctgaagacctgggattaacagaaaggaatgtctgggttaagataaaagattgtgggtggggtgcagtggctcacacctgtaatcccagcactttgggaggctaaggcaggcggatcacgaggtcaggagt

SEQ ID NO: 1310 - DNA, 4001 bp, Homo sapiens
gcacttcacccaacacatcagggatctcccaagaggtctccatacctgttttgtggggcagccacaacacttcccctttctcccactcttgggtctgcaatcaggagacctcaagggaatcagggagactctcagggtgaggttggtaagtcttgtgacaaataaacactttttatgtttctactcaccgcctcacctgccttggtctggatcttctctaattttccttcttgtctcagctagaaaagaaagttaaagatgaaaagcagtaaaagaaaaatgagcccatgttaaatagcatcaaactattcctatgttggacattggctgggcttctgcattcctgttcttctagttcctatttcattttcaagttaagttaaatgtcaaagggaaggaagctgcaagagaaaagaagttttatctccccaagtctctctgtccttcctttgagctcaccaatttctcctcttcaaacagcttcttgttttcaggggatgcatatacagccagtccctgaggaaggagtcgattccggcctaaagatttcttcactgagaccaggtcaccccggactccaacatctgtcaattagaacagagacaggggaattagaaccatctaggagtccctaaagaaaagatgtcaaaaagagaagcacctcttagtttctcacagtgcttatttttcctaaaagaaatgctaattcatattcactaggaacaagatttaagagactgctaattagtttctttagaacttgatgtataaatttaatatcccctgtatagagggagttgtcgtcccatggaggatttcagtatctgtggcacaaattgtcaggctcctctccccacacactgttaatgatgttgctgcctttatgttttaattttcaatgctggaggccagtgtcacaatcacaatagtttttatggcttcctcttctcacatatagagttggattgtttccacaaagaaaaagcaaggcaaatagttgagggggacgggctagaaaaagctgatgccaaaccggaccagcctgagaggaagcgcctcggcccgggccttactctccaccgactgcgtcaggatgagctccaggttttctttgggccgatgcttcgtgtcctccaccagcttatagacgcgatgtcgccggtgcaggcgcggcttccggccctccccggccagcggtaccttccaccagcgctccacgatgaccgtgccctggcggccaggaaagcgacggtaagctagtctccacaaggaacaccctctccctccaccacggccgccagcccctcaaggaaagcccgccacccccacatcggccccctccaggtcccagtgcgcctccagaaacaatactcgagcgtatctaccccctaccccagactcagccctcacccgattttgagaaaggctgaagttgcaggccaggtcaggggcgttcccttcatgtcgcggccgcagtagctcctggacgcctccccgaagcagccgtccagcgcccgcccgcagcagagctctgcccggggccgtgacaacgggcgccgccatgttcacaggcacagaatgagacctgagggaggaccccggcgtcggcggcaggaaaggcccccgccagtgctgcctgcggcgcgccggtacggctgagcgaaagtatggggagcgggccggggaacagatggcaccgcggcttgcctatttttgctttttggcagaggtgacggacgcctagaattactgactgataatggaatgagtgttaggtggactgacgccggaaaagacgctcttcctcttgaaagtgtgggctttgctgtagctccagttgctgggctaacttttaattctaacgttctgtgatgactggatactgaccggagaatgaatgatgctctcacttttccttacttcaaatctacctaaaagtggtaaaggatgggatcccttggaaaactctgccagctccaggaggagcctgacccttaatcattatactgcagtatttaagctaataaaggagaattctaaatcacaagctatgtaaaccgtagaaaaaaaagcaactatggtaaggccgcgacagttccctctggggagggtctcagtactggacagaagaccataaaaactggatgaaagaaggtccatttggcagagattatggaaagactggcccttaaacatactgaccagtcctccttcctcctaaatacactacttggcctcctggacaccggtcttcttcagtctcgtttgctgatttctccttttctccccgcttcttagaatgccctcgggactccgtttttgaacctttactcttctcagtatacactcactgttgatctcatccagtctcgtggcttacaataccatttataagccaatgactcccaaatttctagttccatcctagacatctcccaaactcgtctcaaatattcaactgtttattcgtcattttcctcttacgtatccaaaggacacctcaaagttaactgtcccaaactaatttatttattcccccctcgcccccaaaactgccccatctgcagcctttttcctctcagttgacagaaactccattctttccattctaactcttttctctcatactccatcaggaaatcctgtgggttctacctttaaattacagatagtccctgacttggatttacaatttttgagtttgtgatggtgtgaaagtgatgtgcactcagtaggacatcaataagttacatgaaatattcaacactttattataaaataggctttgtgttagatgattttacccaactgtcggataagttgtctgagcatgtttaagataggctaggctaagctatggtgtttggtaggtgtattatatgcattttcaacttatgatactttcaacatacgatgggtttatcaggacataaccctattttaagtcaaggagcacttgtatttccagaatccagccacttgtcaccacctccaatgctctaccttggaataagacactactttctcctggattactgcaatagtcccctaaaagatatcccttaattctctacagtttataattctatgtagcttatttatagcagccagaatgatctttttaaagcataagtcagatcatgtcattcttccacccaaaactttgtaatgacttcctcctttactcaaggtaaaagaaaaaggccatcagatggtctacaaggccatacatactctgaccccattagctcctctctaatttacactgctccacccacagtggcctccttgtttcttgaaaacaccaggcacgtttcctgctcagggcttttgcactggctgcttttgcgttggatgctcttatcctcagatgctggcttggttaacaacctcacatcctccaagtgtttaattaaatgtcagtttttttcagtgagagatcaccctatttcttactgtaaccctgacccatccccttcacattccttatcttcctttatcttgctctattccccccaccccatagcagttaccttctaacatactaaacaatttactatgtttattttctaggtttgtcctctcacttttagaagatacgttccatagggcagggatttgttttgttcactgatgtatcatctcaagcacctagaatagtgcctggctaatagtagaccctcaataaatatttgttgaatggataaatatgcagaggtctcaaagtggcagtcccagaaccaaattttgcttacaatgttgtttttttatcaacaattttttagtagttgatttttttttttttttgagttggagtctcgctatgttgcccaggctggagtgcagtggcacgatctcagctcactgcaagctccgcctcctgggttcacgccattctcctgcctcagcctcccgtgtagctgggaatacaggcgcctgccaccacgcccggctaattttttgtatttttagtacagacagagtttcatcgtgttagccag

SEQ ID NO: 1311 - DNA, 4001 bp, Homo sapiens
taataagtgcaagctattatctcactttgtatatctcaactcattatcacttctttctagcttgctccttctaacaccccaataacaatccttctgggactttcaatccattgatcctaccatttttcacttttttcactcagcttttgatttactgtcttcctctctcacctagcctgaattccattgttctataaatacaacgttctcttgaatacaccatcaactctctggcccctctctcacttctctgtacttactccaattctcctgaccattccttctgtccatttccaactctcttacagggtctttctccccttaaatctctgacacttgctcccacatcctcacactcagctgatgacttcactttctccttaattataaaattagaagaaatcaaaagagcatttctataaatgctcaccaacatagtggctcacttactagcatctgtatcatatgttctacattccctcctgttatcagagatccactctgtccaacagagtaaccactaaccacataggggtattaaacatttgtaatataactagtgcaactggggaatgtaattctttattttaattaaaattcaaaaccaaagcattgtaaacattaaacaactttattattttggtagaactatatttcccattttaatgatgggaaatttagcacccaaactgagatatgctttaagtgtttgaaaatctagtatgaaaaaaaagaatgtaactatttcataagtcattgttatattgattctatgttaaaaccacagtattttggatatacctggttaaataaaatattatattaaacttaatttcatctatttcttattttttaaatgtggctactagaaaaattttaaattacacatgtggttcacattatatttctatgaacaacactgctacagattaactgtccaggttcctaagaccaaacttcatgcacaagaccccatagcctctctctcttttttttttttttttttaaatgtttttggtttttttagggctagtcaagtgaaaaagtgggagtggagaaggaacaaataaatctgtaactggttgtgatcaattagttgtaaacaccactgcactcgaaccagcctccattgcctcttgcctacataaaggtacagctctagcaattcttccctcttctacatcatcaatttttactacaggatctttccctttcatacacaaacatgctgttttccctgccatgttaaaagaaaacaacccccctccccgcccccgttattgacccattttttttgctctcctttacagcaaagctcctttaaaggcttatctatactccactttatttcctcctattctcttgaacgctttcgtccccataacaccatcagaacagctgtgattaaggtcccaacaaccttcacactgctaaactcttcaattctcagcacttctttttaattgatttatcaactttgagcagagttgcccactcctcacactttgaaattctgtcatcctttgcttcccggccatcccactctcctagttttccatctccctagctgacaactcctttcagtctcccttgcacggttctcatctcttaacgttacaagtctctgagagctcaatcctcggaactcgtctcctatctgcttactcccttacaaatcggagtcaatctcacatcttccaataccagttagtcatatgcttacgaaaaccaaattgacatctgcagctcggacctcccctgaaccaagcccaagcgcggaagagggcggaaggagaacccctggactggtcctcaccgagcactacaggtggcagagccgtgggggacccgtgggttatgagattcagcggtgaggggtagcggtgtggataaaagtagaggcctgacctgcttgaacgtccgcagcagcgagcccagcatgaaggccgccatgttgtccgctacaaactacaaaccgctgaaactttattgacactgccgaatagcgcaggacacgaggggcggggcctgggccgcctggggcggagctgggaggtgggtgggaatgtggcctacaggaaagcggggttagttttgggatcggagctctcgcgatatttcacggaacttgggcaaatgacaaatctgaaggcgccgcgttgatgctgatggcgcagccagacccgccccgtgtgttgcagcccgtgtaatacccttctctccctacccacagttggggtcatcttctataagcgggtcatgaaataggcgagctagctctgtgcactcttttcttcctttctggaaaactagttctgaaagcatcttttttgttgctgttgtaggttatgatttaattctaccttattggtgtgaccaggaacagggcaagagtccacctctacaatcccataggaagaacagtcaggagaattatatacatctacagcgggcacaggacttaggccagatcttcctggaaagtggtcagaaagacttagacttaagccacgggagttaggccaagctgatcgtttgccctttcaaagatggcaaaatactgttggatgaagaggtagcccaggatccagaactcttatgggtggtggagatgttcataccctggaagctgctagtgcagccctgctggctttttactgattttatgaaggatattaaaaaaaggctgggcatggtggctcacacctgtaattccagcactttgggaggctgaggcaggtggatcacttgaggtcaggagttcaagaccagcctgaccaatatgggtgaaacccagtctctactgaaaatacaaaaatcagccaggtgcggtggcaggtgcctgtaatcccacgtactcgggaggctgaggcaggagaatttcttgaacccaggaggtagaggttgtagtgagccgagattgcatccctgcactccagccttggcaacacagcaagacaaaaaaaaaaagatactgaaaaggatacagatgaacagtcggttggaagagatgtgtgggacaaggcacggtggatggggcttggagcttccatgccctttcctggtggggccatcttccagaaacctccacatattcagctatctggcaacttgtgaaagcatctttaaacagcattagtaacttttttctaaaaattgtgatacaatatacataacataaattttcccatcctcaccattttaagtgtacagttcaggggcattaagtacctttacactgctgtgcaactgtcatcattgcccatctccagaactttgtgtcttccaaaactaaaatactctaccattaaacaataagtccccattcccccttcctttcagctcctggcaaccaccattctactttttgtccctatgaattcaactactctacgtagctcatctaagtggaatcatgcagtgttttgtctttgtgactggcttctttcacttataacatcctcagggtttatccatgctgcaccatgtctcagcacttcgttcttttttatggctcagtaatattccattgtttggctacactacattttgtttctctatttatctgtcattaacacttgctttgcttacaccttttagctgttgtgaataatgctatgaacatgtgtgtacaaatatcttaaacagcattaggatcttgttaggccattttttgctttaagaagagagtaaagcaacctaatggtgtgagtgaggcaggaaactctgaagtactgagacaagactccagggtcttctttaattaattgtattggttttttaaaacagcctaagatttccccccagacccccagtgtgcactccccccttagtgtgtgggccacttggcagggcctaaagaagtctcggtttaccttgaattttcccaaggagtctctaattctctggctacttaacagaatgtgggaaaggctgttgtctttactgtcctggaatattagaatcaggagaaccatcataattcatttaatcattcagaa

SEQ ID NO: 1312 - DNA, 4001 bp, Homo sapiens
ctaggatgggtcctcctgtggataggacagagtttgactcccttggaatccaccatagtctggcccatggctcagcctagactaggcactcaacaaacacttgctggctgactgcatgtatgaattaagggggttgaggaaaggcagctagctgtacgatgcctgaaatgtaagcaccaagtagagatcacaggaaaacctcagtcttggtgtgtgcacccctgctatcccttggagatgaggaagaggcatagagtagatggacttatcctctccagtcagaccctgctatgcaaataacattaatgggcctcttctgtctgtaacagctcaagttgattctgatagggaggcagaaaagaattatattaaaaatatattaatagcaataaattctacttattttattttttgtagagactgggtcttgctatgttgcccaggctggtcttgaactcctggcctcaagtgatcctccagccttggcctcccaaaatgttggggccatgtccagccaataatttctttcttttttgtttttttgagatggagtctcgctctgtcacccaggctggagtgcagtggcacgatcggctcactgcaacctccacctcccaggttcaagcgattctcctgcctcagcctcctgagtagctgggattacaggcgcgcgctaccacacctggctaatttttttctgtatttttagtagagacgaggtttcaccatgttggccaggctggtctcgaactcctgaactcaagtgatctgcccaccttggcctcccaaagtgttgggattacaggcgtaagccaccgcgtccggccccagataataaattctaatatatactatcaatatatttaattgagcacagcgttaagggtgcttttcgtgtattatcgctgaatcctaacaatccttgcaaatggatactttcacactcattttagaaataagaatcagagagaggaagtaccttgccccatatcatttacctaataagaaggatcttaactactatgcatactgagttgcaatgggaaattacatcctgcatctcagaagcgcagacacaaagtgccatactctaggtaggcctgggtggtgccagccatgcactccctctgggaagctcattttcactcattcacctggaaagctcctgctcccgcccttcacacccctctgtccccatacaggctgcaggcctagggctttgtgtaaggtggacgtggggtcttttgctcaggacctctggctcacctcatctagtggctctaattcgccacatcggtccccttacccaccccagccttccaggaggtctctcttccgccccaagtcccaccttaggaactcctacctggtttccggacgacatatccgcgcgcggcctggaggaggagacctacgcagaaaagagagggctgaggaccatctccttaaatagcccacccctcagttcctttctgtgcccctcgcattgcccgtccgccacggtctatgcgcttctgaacctaaccgctgccccatttcttccctaccccttgtctctcacatcttgtttcacctcttgcgcaaccaccgccctttcccccttatcctgaccgctgtatatctcccctactcctgtgcttccttattccctatcttcgccgaaccctgtttccctacgcccgccgtcccatttctcagctcctcacttcgaggctgcaggccccactggttgaaaggaaacttggcgctcccaccgcccggcagcccgggtactaggacctgggtaactgcccgggtccgaatcaaactcagcgtcctccacgcgaccctcagcatggtgacctctaacccccgcggggcccgcgccgcggccgccgttcgctttgcggcacggaccgggttacatgggcgccgccatgctggcccaggatcgaccaatcgaggcagttgcaataccggagcagacgaagaccgagagaatggattaggtggcgtgactctgatgacgcaacgcacggggcggagctcagagaccgggttcccgctgcgcgtgatcgggccgtggtggttgtgtgcccacgtttagcagcgtgctggggtgctgtataaattctaaaatgccactttttggagggcatgcgttccgtccttaatctcattcctggccctcgggccagggttattttgggaggtccatggcgcctgcggtagccttctacccccaacccaatcccctctccaccccacctcacccctcccttagacaaggatgggaccgtgtaagaactactactgggtttcagccatgtctctggcagcctcgtagcctggagactaaagtcgctgagtttggaatcgcacagtcctggtctggaatcctaactcagccatttactcaacatgtgatcttgtgggcaagtcacttaacctatgtgggccctgtagggatagtaataacaatatctctcttttaggttgttgagaggattaactgagttgtatgcagaccacctggtatatagtgagcatttagtaaatctttacggtgacgttatttgtgaaatgagtggtgtaagggtggatacaaattagaagaaaaagaaaatttaattttccctggcgcaaaaagggaaaagactccttcccctcacttttctgagagcatttactttagaaaacttgtaattgtgaatactttctctactgctttgcgatgaatgtaaatcttcttaaaaggtaaataaacctcttgccagttttacaaccccggaatgtttttctcaaggacctgggggccaaccctttgaaatgtaataattaaggaagatagtgctctctctcagttcctgtgggagggtaggagcctaacttcagttggtgcctagctcttagttgcaacctaccctttgttataaagataggggaaatcgatttttcctttggataaaggcaattagcagacacaggtggcttcccacttaccaggtaaatttagagtgaggtgcagccaagtcctcttgcttgaggaccagttattgtttatcttgagaaaatggatacagtaagttgtattcactttgctacataaaagagtaagatttttgtctctttgcagtctctttagtggatcaccagtgtatcacattccggtttaatgcttattcaataataacactgttttctttcttttctacccttgtgaagaggttttctgcgttggcaggggattttgtctttaattttatttccccaacaggggttagtttttccaaagtctcttcaccgtgtcccaccgcactgtcactccccccgtgtaacccatgccactgtgccctaaggatcagttttcaagtctccaccactagaatgcagctctctgagggtgaactgagctgagtcgtttgcatagggcctagatactgagagctagcagaaggaagcaagggaaggaaggagggaaggaaggaagggaaaggaaggaagggaggaaggaaggggggaaggaagggagggaggaaggaagggagggaggaagaaaggaccaactctgagaagtttccccctgactgctgggccctgaaaaataaataacagagactcaggtacacccaagagtgtctataaacaacaacaaaaactgcaaaccaaaaactagtttacaatactgaagttataggaaacaagcacaaaaggccattgggtggggctggatggagcatgatctggtccttaaagtatgcagatcgcctgggaggcccagcctatggagattgggaggagagggagatgctggtgactggagatggtgagagcctgggctggggtagtttttagtcatgggcttatggaccctcccctcttctccagctagctcaggcctttaagaggcaggcccaagaagggaaccccaggaagccctagaagctccccagcgcctccatcccatggacccggatcccctgcaggagggggaagttgagcagtggcccaaagacacagtc

SEQ ID NO: 1313 - DNA, 4001 bp, Homo sapiens
atgctgtatctttcctgaaaacttgtaagctttcccatctttctttttttccctttcttcttaatatttttagaaatggggtcttgctatgtttaccagattggtcttgaactcttggcaacaagcaatcctccccactaggcttcccaaagtgctaggattacaggtgtgagtcatcccacccagtgagctttcccatcttttgcctgcttctctaggatgccaatctgaattcaccttttcctttagctttgtcccacaccaatcactccctcagctttctatttatcatactacgttcccgcttcctagcaacttcacatcttgattttccatttgggctcttttttaagtcttctaaagaattcaggttcctcataaaaggagtcattacgcttgggcaacatggcgagactccctctgtacagaaaatacaaaaattaactgcggtggtggcgtgcgtcactagacccagctagtcaggagactgaggcaggaggattgttgagtgacacagcaagaccctgtctcaatttttaaaaagcggggccgggcgctgtggcttacgcctgtaatcctagcactttgggaggcagaggcaggcagatcacttgaggtcaggagatcaagaccatcctggccaacacggtgaaaccccatctctactataaatacaaaaattaaccgggcgtggtggcgggagcctgtagtactggctgctcaggaggctgaggcaggagaatggcgtgaacccaggaagcggagcttgcagtgagccgagatcgtgccgctgcactccagcctgggtgacagagcgagactctgcctcaaaaaaaaaaaaaaaaattaaaattaaaattaaaagcggggaggtgcggggggtgattacttgttgaatacaattcatacagttaggtttgaggaagaactttttttctttttttttgagatagagtctcactcttgcccaggctggagtgcaagtggctcgatcttggctcactacaacctctgcctcccgggttcaagcgattctcctgcctcagctctcgagtagctgagattacaggcgtttgccaccacgcccggctaatttttgtatttttagtagagacacggtttcaccatgttggccaggctggtctgaaactcctgaccgcatgtgatccacccgcctcggcctcccaaagtgctgggattacaggcgtgagccaccgcgcccggcccagaacttcatttttaagataataaactgaggggctgagacgttttaagagactgtgaacacctgggctggcactgttttgagaacaatcaacgaaaggggaagggagagaataaccaccgcacttcccagagagtctaggcatgattctggtcccttaacagttacctgtttagggtcctgtatgcgctttccacgttcccttcctgtaccatcacagtcctggcgatgaacttcagatgttttgccatgaccttggatttaaaccttcactctgtagagcctaaaggatgatggagaaagggcgaggaaagcagaaagagaaacgcaacataatacaaactacaccgcgcggcttatttaggatttggaaattcaacatgctcagggacgcgcgagatggagcacatggaagtcatcctagaaagtagacgtgaatcgttgtctcttattctcactgccagtccaaatcctcgcatagagaagaaaagagatggcagcagggcgttaccacaaagacgcgtcgccgggcatgagaaggacacgagcgacaaggatgcgccacagggtcccaaccaccacacatagttccaaaaggggttgagttgggagttggggaaggactctttgttggtctttggaaaagggggcgaaagcccgcaaacctgccctctcgccaagccagccttcctttccccaaaccctgcacaactcctcacctcgcgcgctcagtacctagcccaccggaagggttctcactaccggaagcggaaattacggaatcgccagcgccgcgcaaagaaacaggccgagggagacaacgtgcgtggaaaccatagcaacgtcctttctggcctctgttgactgcctctcttccccgggcctggactctacacctgacaaagcaaaatactcattgacttaaattcccccgaaacacgtttctcgccctctcatggagtcgaagtccttcggcctctgagaaggtcagcccaatttcataccccttaatcctgtgaaatccttgataaatatttgagccatttctctttctcgatggaaaacaagagaagtaggcgcttcctgaggatgcttcctgttttctctttggaaaggacagactctttgagatctgctctccggacgaaaaatagattgattcatacacgtcatctgcctaagtgctaaggaaaagaaataaacatactgtgagtttcctatatcatcttcccactaatttaactacataaagtgaaatcaataaagatatatgggaaacacctgcagggtttagaataaaaaattatgtcagcttctatgccttttcgtgctaatgagacctactgaaaaacctccttttaaatttcttcttcgctgtggagacacccgtcctcctatttgtatgctacctgtacatatccatttatggttattcacgtaagttaacatctaatggctgtaggaaaacgtacctcccttagagagagagtgcgcgcgcacgctcacgcacacacacacacacacagacacagacacagacgtgtgcatcatcagttgatgctaataacttacactaacacttaagcccacctcagagtaagccaggtccaaagtaacgaaatagaactagattgggacattattatgcttgtcaacaaactttcactgaatgactactctgtgtcagatactgttgataccactctagtgcctcctggaccactaggaccacataaaagatactaaaacaaagtagtatataataaatgcaaaataaattatatgggctggacgcggtggctcacacctgtaatcccagcactttgggaggccaaggcaggcggatcacttgagcccagaagttcgagaccagcctgggcaacaaagcaaaactccgtctttacaaaaaatatagaaattagccgggtgtagtggcatggcctgttgtcctagctacttgggaggctgagggggaggatcacctgagcctggaaggtcaaggctgcagcgagctttgatcacaccactgcaccctggcctgggcaatagagtgagaccctgtctcaaaaaattaaaaatgaataaataaataaatagggccaggcgcggtggcgcacgcctgtaatcccagcactttgggaggctgaggcgggtagatcacctgaggtcaggagtttgagaccagcctggccaacatggtgaaaccctgtctctactaaaaatacaaaattagccaggcgtggtgccacatgcctgtaatcccagctgcttgggaggctgaggcaggagaatcacatgaacctgggaggcggaggtggcagtgagccgagatcgcaccattgcactccagcctgggcaacaagagtgaaactccatttcaaaaaataaataaacaaacaaataataaataaaatatgccacagcataatgtggtgaaaggcactggcttcaaagttgggagatctggattctatcccaattctaatactcatcaggcctatgaccttgaagaagtcatttaaaaccaggggtctggagactacagtttacaggtcaaatcctgctccacctgtttttgtaaataaggctgttgacctacagtcatgcttatttgactgtgtgttatgtatggctgctttgggctacgatggccgaattgggtagttgcaatagagacataaagcctacaaagcctaaaatatttactatctggcccttgccagactcactctatttcctcatctctaaaatgggactaattttgccctgttcagtc

SEQ ID NO: 1314 - DNA, 4001 bp, Homo sapiens
actgcttccattcctgccctctgccctgtcttccccaactattctcaccaaggcaaccagagtgacccttcataagtaaaggtaaatcacatgggtcctctgctactcacttcacctgggcaggaaagccaatgccttgccaaggccgaggaagtcctgccctctctgcctaactccctccccaaactctatttggctccttctgctccagcctcactggcctcttgtcccaaacacgtcatatctgctcccatttcagagccttttcacttcaggttccctctacttggaacagcattctcccagataattccacagctgctcaattccacaggttgctcgcttcctttctttattttctgctcatttgtcacttcatcagtgagacctttcccgaccacactatacaaaatatcaacatctcttcaccccattttcaatctgatttttagcattttgcggaatatgtttctcctaaaacgttaggctcgataagaaataggctttccttgtgactgctgtatcctctaacgcctagaaagtgccagacccctaaatatttttgaatattccagggagccgggttaagagagaggccaccacagcaaaggtggtcaaaaacggtctcttaagaggtgcgcaagtcgggtgtagtggctcacgcctgtaatcccagcactcagggagggtggttggagcccaggtgttcgagaccagcttggcaacacactgagtcttctctataaaaaataaacaaaaaaaacctagctgggtgtggtggcgtgcgcctgtagtctcagctactcgggaggttgaggtgggaggatcgcttaagccaaggaggtcaaggctgcagtgacttattttatttatttatttttgagacggagtctcgctctgtcgtgcccaggctgcagtacagtggagcgatctcggctcattgcaacctccgcctcccggattcaagcgattctcccgcctcagtctcccaagtagctgggattacaggcacctgccaccatgcccatctaatttttagtatttttagtagaaaaggggtttcaccatattggccaggctggtcgggaactcccgacctcagatgattcgcccgcctcggcctcccagagtgctgggattacaggcgtgagccaccgcatccggcctgcagtgttacgatcgcgccactgcactccagcctgggcaacagagcgagaccctgtctcagagggatcctattaactgacaactaagaaggcgcaaaccatacgaagatgtaagcatgccaggcagaaacaaccgcagacacacaacgccagacacgggaacaaacctgtgctgaaagaagggaaaggcagccagggtggcgggagcgcaggaagatgagaaagggccgaagttgggaaaagtgggccgaaacggcagcaggcatagccgggggcggtgttcaggagctgcctcccgacccagttggccttgcaagagcacctgaaactaggcaaaacgagtctccgctccccagacccgaccgggcgtcagccacctctggcggttttacagccccgaagcccccattccagctcgcagcgaggcagcggaacacctcgaggatgtcctggcgttccaatctgcgcccccgccgccccgaagccctcaccgcaggctgggtagccagcccacggagctccccccagggtcccgactcccccttcgcccacctttcttgtcgcgcttggatttgggcatcgcgctgaatccacgtgcggcggaagacggtgcaccccgttaggaccccggcggcgcgggggactctgggacggccctcgggggctgcccctcgcgtgtgcctgacccaatgtgcactgcagcctgcctctccctgccaagccgccgcctgcgctttctcccgcgcctgtagggcaacttcccgtgtgccgaggcagtccctgaatcccgagcgtcccgtccgaccgagggcctcgcgcgctatcccagctctgtggtcccgcggaggcggagcccgcggcgcggtgcatgccgggacggcggtgggtggtgcatgcgctcgcatcatggcggctgagtgggcttctcgtttctggctttgggctacgctgctgattcctgcggccgcggtctacgaagaccaagtgggcaagtttgattggtgcgtacgtgtggaacatattcgagagataagtggctgtttccccagtacctgtctcctacctgctaaaggttgtcacttaacaggattggccgcataatttgcaggacccagtacaaaatgaaaacgtggggccccttgttaaaaaattattaaggatttaaagtcgttggaagcagagccttaaaccaagtgttaggggtcattctaagctgatccttgcgtgtaagccggccctgccatccaggaatgcttggggtgccggtcagagatcactgatcccgtcctccctcgtcaggttcgatttttttgactgtgaggtttctggtctaccaggtgtcagaggtcgccaagctgtcagtgaactttaattcctactcgaattggtgtcttgtaggcaagtgaacaggagctttcgtcttaaaagtcctaaactgagtccttttcccctctcatcaacctagtctggccctgggctcacagcaggattgcccaaaacactaagcagctagaatatgccattcactcattcattcattcacccacccacgtcttccttaaggccctggagtagcttgcttttgtttgaattttactagttaagacttgtgtgatcttggggaaagtgacttaaccactctgtgccttggtttctttgtctgtagaatgggtttactaacagtccgttatctcttacagtacttgtgagaatgaatgagacaatcccattaaattacttagcacaatgcctggctcattgaatgcagtcattaagcgttatctgttattattgctatttacactttattcttcagggcccaggtcagatttctcctcctctgaagtattttctgtcttggaaaagttgattcgcatatatgttgagtacctgttatgccagacagtgtgacaaataaaacatgttacatttttaatgatgtgcacaactgttcacaatgtcatatgtgtatgttacacatatatatcgggtgatatgtgtatctaattttgcagaatacttgatatatgcaattttcttaattttattttcatgaatgaatgaatgaatgaatggcatttcctaactgcttagtgtcttgggcagctctgctctgagcccagggccaggttaggctgatgaggggggaaaaggactctgtttaagactttttttttttttttttttttttttttttgagacagttttgctcttgttgcccaggctggagtgtaatggcgcgatctcatggctcaccacaacctccgcctctggggttcaagcgattctcctgcctcagcctcccgagtagctgggattacaggcatgcgccaccacacccagctaatttttgtatttttggtagagacagggtttctccatgttggtcaggctggtctcaaactcccgatctcaggtaatccacccgcctaggcctcccaaagtgttggaattacaggtgggagccactgcgcccagccaagactttttaaaattttttgagacagggactcattctgtagcccaggctggagtacagtactatcatggctcactgcagctttgaccttgcaggttcaagtgaccctcccagctcagcctcctgagtagctgggactactggtgcacacctctccagtttctttgtattttttgtagagacggggttttgccatgttgcccaggctggtcttgaacacctgggctcaagcaatctggctgcctcggcctcccaaagtgctgggattacaggtgtgagccactgcacctggcctacagttttcagattgaaaaataaatgaagacatacaggtatgcatcacttaatgatgggaa

SEQ ID NO: 1315 - DNA, 4001 bp, Homo sapiens
cttaagagtttgagggctaggtgcagtggctcacacctgtaatcccagcattttgggaggctgaggtaggaggatcgcttgagcctagaagttcgagaccaggctgggcaacgtaggaaaacactgtctctacaaaaaaattttttaaattagccatctgtaggggcacatgccttggtcccagctactcgggaggctgaggtgggaggatcgcttgagcccaggaatttgaggctgcagtgagtcatgaccatgccactgcactccagcctgggcaacagagcaagactctgtctcaaaaaaaaaaaaaaagtgcagagaggaatttaattaatcatatagtcagcctgaggtatccattagtccatcaataaaaacttcagaagacagtctgaagtaagtctggagtgtagatgagatctgagctgtggagatagtcacatctaggtagaagtggcctaggaaaaaaagctttaatgacatgcccataatttgggaacaaaggtgggcacagcaattctctgggaggtagcagaaaaacaggggcaagtggaatcaaggaagccaaattaaaagagtttaagagaagaccagtcaagaacattaaacataggccaggcagcagtggctcatgcctgtaatcccaatgcttgggcagaccgaggcaggagcacttgagaccaggagtttgagaccagcatgggcagcatagcgagactctgtttctaaaaataaagaaattaagaacattaaatacagcagaaaggtcacatgagatgaactgaaaaatgaccattggatttggtatttgttactttaccattgtgttgcaatcgtgtgtgaaaaatggtgatgctttgtcatgaatagagactaacaaaataataaatgatttgaaggacatgcatcttttttgtttgtttgttttgagtcagggtctcactgtgtcacccaggctgaaatgcagtggcgcaatctcagctcacggcagcctcgacctcccggactcgccatcctcccacctcaacctcctgagtagctgggaccacagtcacgtgccaccacacccagataatttttgtacttttagtagagataggggatgggggtgggaggttcaccatgttggccaggctggtgtggaactcccggcctcaagtgatccgcccaccctggtttcccaaagtgctgggattacaggcgtcagccaccgcccagcccactcttttaatactaaacatattattttccctgaattagatgaaatgttcaatttaatctattttatcccaccttagcaggatttggagaattaaattcagcagccaaagatcagctcacaacttctatcagcaaactcacgcacaaactgtcatttgtcagacactgtgagggacgttatatgggatacttcagcctttctcagaactgagccatccacagtcaaggtcttgcaatagaaccaatttgaaaagtcaaggcttctaatcacccagactcaccaaattcccagggcactcagatctcacgccccaaccaaatcacaacttcactgtggtaaccaccacccacgtgcccccgagcctccatgaactgccggcctctagcctcaaggagactcctccacccaatcactccttgccttgagctggccgggagtttggcgcggggcagggaaggctgctgctgctgctgctccggtcgcccgcagctcctgacgtgccaggacaggtggatgcagagaccacctggaccgaagggcggctctgtggagtctcctggagtccgaaattgtagcggggaccctgaggtgagcgggtttctcccgacgacggggaaaccgccggggcagaaggcgaggttgatgagatctcaggcctcagcatcctcccaaaccttccctgacccgagaagtatgaggtttctgagcgacccctccagtagcccaactacagaagctgcgccgctgaaacgggcgggagaactgcgcgccgacgcactaagctgcactgcgcaggcgcaggcaggctcagctttccacatggattcacgtacttcaggtctatgaccctgcttccagccattcccaaacccatcactttccacatgaacctcactggaacatcctcagcctgcaggtatcagactgaccagaactctgcaaggcccatcaatgaccacccgatttgttagccccattattctcacagcacccaatctcccttattgcaaatgttacatgcatttcccacacgtccaagcacactagcttatctttaaatgtagaaaccacccaacacagtacacccagtgcctttgacacaatgagaacgtgtaatgctcacacagcataacccacctaaggttgatcttgtgaccaaatataggaaagatagttatattatcaaaagatagtatgcacatggctgtgtgcatagtagagtaggaaacagggaaagactgactgggtaagatctctcagttaacaattccccatctaccaatttctagtactgtggtttctaacatataaatcagttaatggcacactagaagttcaaactccagctttgcagtggtgacctttagaaaattccttaaataaggccaatagtaccaacttaccagagatccatggattaaacatgacgaaattatctggatactgccatacagaagctattagaagacattaatttacaccactactgaaatcctgccactgttgagtatctcaataaaccagttatgcacagcggtttacccacatgcagtgacaacagtccttaagaacatctctgttcttggaatgattattgcacagggcattccaaacatacttgagaaaaatctcaatttccatcaaaaaaccttattttcagatcgggcacgatggctcctccctgtaatcccagtactttgggagactgaggccagaggattacttcacctccggagaccagcctggggaagacagtgcctgtccccaaaattaagaaatcagctgggcatagtgggcatggtggcaggtacctgtagaccctggtactcaggaggctgaggtggaaggactgcttgagcccaggagtttaaggttacagtgagctgtgattgcactactatgccccagcctggggaagaaaggaagaccctgtctctaaaaaataaaatttaaaaatagagaatacctcactttcaccaaaactgtaaacccctagagtgattgtactcattttaggccaggcgtggtggctcacgcctgtaatcccagcactttgggaggccgaggtgggtggatcacaaggtcaggctggtctccagctcctcagcatggtgaaaccctgtctgtactaaagtaacataaaaattagccgggcatggtggtgtgcggctgtagtcccagctactcgagaggctgcggctgaattgcttaaacccggcagacggaggttgcagttaagctgagatcgtgctgctgcgctccagcctgggcaacagagattctgtcacaaaaaaataaaaaagagtgattgtacccattttagctttttaagaaaaagacaggtgcaaaaaaatactgtggtgaccatcaacttacccgttagtgtttccttatttgaagacaactccttctttgggtaattctgatatataaaatgctaaaaaaaaaaaaaaaaaaaaaaaaaaaaaggacagtccgaatcacaaccccattttaagatggtagattgccatttaacctaagtctgtgaccaattcagaataaccatattcaaacctatcaatcatttccaaatttcaacagccatttattttgtgcatcatttaattcatgtatgggttctatccactttcatcagttaacattcttgttgacaaaccaatttacatcaacttgctatagaacagatgaaaggtatacatgggggaaaaatcaagtagaaacctagagttattttatgttagctcagttattgaacataacagacacagaagtatac

SEQ ID NO: 1316 - DNA, 4001 bp, Homo sapiens
tccctctctccttaaagccctgcagcagcttcctgtggctctcaggatagaattcaaacacttccaggatctgggcatctcctgcccctccacagccctgcctcgccctgcattccagccccaccaaaccacagtcagtcccttccatggttttggatctcttgtctgggaactttgcacctgctgttctctctgcttaaactctcgctttcacccatgcgacctggttcactcctcattctcctgcatgtctcagcttggaagtcacctcttccagaaagccttccctgaccctcaggtccaggttagatcccccacctggattcccacagcaccgtgtttttcccctaccacaaccctagtcatgccctttagcgaacagccaacagttactaagcacctgctgtgttaggctgtttcttaggactttataagaaagatcacatttaatcctacgaagtaggtactgctattatcctattttttagatgaacaaactgaggcaagagcagtcacacacacatagagtcagtaagtggtaaagttgggatagaaaccaagacaatctgactcatggatgttacaccgtgtgttagaactagccttgaaaaaaagacacaagcttgtgccctgtgccaagaaagtttctgataatggtggcggtggtggtggtggtgggatttaatcagttggcagaagtctgtatttctaacaatctctgattcaaatgggcaggacccatgtccatttctctttattgcaattgtactatgtttcttaccttcactctgcaacaagcttggtgaagacagagaacatgtatctgaggcccttcatctcccctcagttcctagaccagcactagcccatagtcaaccctccatcaaagtagagggagaaagtaagtggcttttaccctgtgctttctgaactcctgggatgctaggaagagccagaaaaccttgtccaccgaacccacaaattcactctcttcatcccttcctcactccacttccttcccagtagttgttggagtttttgaattttccctctgtgagcccttgccctcccctgccatgttctcagcaaaggccctggcctccaggtccatgagaacaggattccctgtagtaagagctcttccctagcctcctccacttccaaaggggctggaatcttcaccccttgatcccttccctttttagagcacagaggaagcggagccctcctcctgccctgggctcccatgccccacatgttcctggagagcacccttgggccactgttgtaactacatggtgacttgcttgctctcatccttcatgaccccccctcctcccatgccccactttgttaatttcactctcctctcaaaactccccacagtgccagtgatggggtataaatgcagctgggcaacgaggctcccacagacagacccaaacctatcttccaagtgttaatttcttttctctcctcttcttcaaataggtctcttccttacacatttctgccattcctttctctctctgccttgcctctcccttttctcccggccacagccttatccaacctcccagcccagcttggactcagctttcctaggaggctcccagacaatccagtgggctctcatttttttgagtgtattcagcagttggctgatgctgcatctccagcacttgccctaggttgttttatctccctaatggcctgtaaaccccttgagggcaggatctggcctttgtactctaaaaaggtcttcctactagagaatgctccacacatgtgtgatgcttcggggagtcccaaccttcatcagagattcccactggtgccagctcatagctcatcatgacgtgtcccagatggtgactgggagtagcctatgccaagcaggagtttttccccgaagtcttcctgtttattgcaccgggctggctgcaagacattgaggatgctgccccaggggccagcagggtgactggggcaggcgccatgatggctgtgcctgggtgctggccagtgtggccccaagaagaggccgggagccagagctgcatgccctctgtcagcaccagcctcctaaaaacactctcgactttctccaagcatggattgcctgagctcccctcctgctccccaaagaggccggggaacaagtcagacaggggataagtcagacaggctcagctgtgggaggctggaggaaaaagaccaataaaactgactttatttgtaatgttcccatgtttgtgattttgttatttctactctgtttcctcagagcaatgaaacaaggaaacggaacaaaaaataacaaaacccagctctaagtatacgtgaactgtaaggcctccctctggcctcctctcttcctccttcctcaccaggtttgcctggctgacccttccagccagtgaattcctttcccaggttgagtgttttccattttaatttttgtggcatttccctggattaatggttaacgcattcattttctcccctccagcctccattatcaaagagtgctttgaataaccattaactctctggttaagcgaaagaaacacgttaatcatctacaagtcctggggcaggaaaattattcttggtaaccttctcccaatggcaagaaaaccactgtccctgagcagctcaacttcagccacacctgggtctacaagcttgcaaaacccctccggtaaccttgttacaaggacttggtaaactgaggtcataaactgctgaatggctaagcgctgtgcttttcaacccagccaccaccggttctctaggaccctataaagagacaaggctgggctgctgcttctccctttacttttaaaaattgttttgccagtaaagtctcatctattgtacattccttgttacggggaaactcaagtggctgtacaggctgttcttggagccacagttaaaagcgctttgactcaaacacacatgtggcgtcatcctgagctccgtttgcgtggggccggaacaccggactaggaaacctctccctgctttagcaactgagtgtggctagattgagggaccacagggggtggctctggatgcagcaatccaagtccccttttcagggagggtgacctctttccgaagttcagtggatggcccccttccagggttagggagacaggaggaggaggaagaagaaaaggaggaggaaagctctcaacagccccccacccccaacccatccaggagagaaggactgcagtccccgagaccagctggaggagtggcgtgtgcatggtgtgccctcagggtagagcgcgccatcttggagagatgcctctttcattcacaaagcggatctgttgcagagcccagagccccggggagagcagggcggcgtccaagtgcttgctgggtttggcttgcactccctctcccttaaagaagacagaggcggaagggagaggctgttcttcggaggcgagcctcaggcactgctagacttagtaggaaagatattgctggggtcttggcaagccgtaggtgcagcgctccccatcgtcattccggtgcggctggttactgtcaccctgcctcctccccgccggcctgagagcctctctgttccagatccaaacatttccacattaggcagcctgcatgtgcatttccctggcagtggagggaaaggcacccctgtgacctgggatgaccgacgacggggacttgccctcctcccccacaggtgcacttgctcttttctgggccagccttgtgatctggtgtccgggcacttggcagcatttagcaaatgttcctcagtgctctgtttggtagttaatgctgttgacacggacacctttgggagcacgtgggagaagctgctgcctccgtttcccccgggttacagcgcctggcgcagtctgttgtcccctcagaagtggtgggcgacattatctcctttttcatccctagccctctcccttgaagctgtcctgatctctcttttggaccca

SEQ ID NO: 1317 - DNA, 4001 bp, Homo sapiens
tgagtgacaaaagatagttagcaggatgagaagagcttccaccctggagtgcacattgccacgccactacctgcaagtagtcacattcctccacgtagaaatgcagcctgtcctccagctcttcctggtacttgggttcctttaggacactttccccttggccaaaagcctccagccgacctgcttccctgccacaagtaaacatgatccaagacttacatctcttccctcaactcctcagcctcttgtcctggggaagggcagggaagatggcctcaagagcctcatcctgcattggtggggacccatgtttcttgcctcaaagcctctggggtccccatacccatcgtggttgtacttctgaatcatacagatgctccggggatggagatggactctgaggaagtctgaccagaccctgatgctggcctctgtagggataagtggttttggagttgtagcggtggggagtggtgaggaacctgaagacaagcagaggaaatgtacctttctccatgtttctgctctacccaagcccccatccatcagtatctggagaagtctcacctttgccattgggaatggatttgaccctccagacaccatcactactcagcactccctgggaggggtcagaaaaatcgacatttagttccaggcagtttagaggcaaaggttgcttcgtcctccttgagttggctggccacaccgcatagcctcctttctgttcaccgagtcgcagtccttaggaaaaggagtgctttttcccaaaatatcattctaagacacttaaaatgattaaaatccccgtttacctgcccctatggagaccctcgggttgtggcaccgggttaaaaagttcaggacagaggccctcacctctgcactcagaaagtcttggagataagggttcttgggatagagttcctctttgtgtgtggtgagcttcccctgcctgaaagagtttggagattgatcaaagaaactgcactctgatcagagttatccagcgttctgcgtacatacacgatccccacccttatccatacatcagttacacaccatgctattgcagcatccaactgtttgtccctgtagagtccaccttcctcttttagggagctcaaactacctgtacagaaataacagagacaatgttaggtcaaagcctgggcacccttcccctctagctaaccttcctctgatcacctgacaacctgctgtcaccatctctccagcacttggctcttccaagctttctgggatatacactagttgggggaaaaaccttggcttaggagaatctagattccatctttcggttcccagcttagtcattagctgtgggacgcggggggaaccacatccaggggtctgacaggagtgctgcagttcaagtcctcactgtctccagggcctagcagcctattcccgaaatggctcttgagcaactgtcgtgggcccctcgagtgttggcatgttgtgctcagctcctcatctccggtcctggagctcggtaaggtgggagggtcttgaagataacggcagcgcaaggactaggcacgcggaagggaaataaggggcatcggctaactctgccaccacctcacccttcagatccatgaggatgagtcgcggcgtgtaggtctcctggccgtgcagcgtccggcccgtacgatacaggacgtcggggcacagctctcccgggggctccttggaatcggtcgctcggcccagcgcagcatcctggggaagcagagaggacgaggcaggccggctgaacgtcgggactgtagatcccgaagggctcctcgggggcagctgccggctgacctcacctgctggttccaccagtgcgcgcccacgaaaccggcaaaatgtcccaactgcagtgtgagcacctcccgggccccgcccgccatactgcgctgctccacggggccgccgcgcctcagccgcgccgctcgctgctcctagccgattggcttggcaggcgcgtgggcgggtgttattctcggctacttattggcccgcaaacacatcctttcccattggagaaacgatgcgccgatcccttcctacctcttcctagacgtggcccagtccggcttctctgtggttgcctgtgaggggcggggctccacgggccacgccgttgctcctgctccacgttggagcggggtgggcgccgtctccgccgctgacttggggccgccagggcgcgggccgtggaaggctctgcttcctacttgtcttgaggtcttatcccttctcacagatctctccgctggctgatagctccccgggcaaaaagaaaaccttgccagaaaagcggaagctcccctaaagcctcccatgccccttcatctcttcagaagtcacgtggaccacgactaataacctgtggactggcttagctatcatatctctatcatttacacgtatttatctatctctgtgtatctaacaccttatgtaaagagagtatgtatctgttggcgtcttttgctcaatatggtttatgtaattcatatttttgcaaatatctataattcattttcatcactgcggaatagtccattgtatgaatacgccaccactgatctattctaaagaaagaataggctgggcgcggtggttcacgcctgtaatcccagcactttgggaggctgaggcgggcagatcacgaggtcaagagatcgagaccatcctggctaacacggtgaaaccccatctctactaaaaatacaaaaaaaaattagctgggcgtggtggcgggcgcctgtagtcccagctactcgggaggctgaggcaggcgaatggcgtgaacccgggaggcggagcttgcagtgagccgagatcacgccaatgcactccatcctgggcgacagagcgagactctgtctcaaaaaaaaaaaaaaaaaaaatatatatatatatatatatatatatactgctgataatagcttttgggattgtttccaatttttgggctattaggtgctatgattaacattcttgtgtgtatttagaaacaaggcaagggccgggtgcggtagtttacgcctgtaatcccaacactttgggaggccgaggcaggaggatcaactgaggtcaggaggttgagaccagcctggctaacatgatgaaaccccggtctctactaaaaatacaaaacatgtagccgggcgtggtggcgggcccttgtactcccagctgctcaggaggctgagtcagggaatcatttgaacctgggaggtggaagttgcagtgagccgatatcacgccactgcactccagcctgggaaacaagagcaaaactcctctctaaaaaataaaaaataaaaaaataaaaataaaaataaaaaaggccgggcgccgcggttcaagcctgtaatcccagcactttgggaggccgaggcgggtggatcacgaggtcaggagatcgagaccatcctggctaacacggtgaaaccccgtctctactaaaaatactaacaattagccgggcgtggtgacgggcgcgacctgtagtcccagctacttgggaggcggaggcaggacaatggcgtgaacccgggaggcggagcttgcggtgagccgagatcgcgccactgcactccaccttgggcaacagagccagactccatctcaaaaaaaaaaaaaaaaaaaaagagataaggcaaatattggttgggcgcagaggctcacgcctgtattcccacgttttggtgaggctgaggcaggaagatcgcttgagtccagaaattcgagaatgtgagggtagactggacaatgtagtgagactccccctccccctatcctctctataaaagaatttttcaaaaaattagctaggcagcccacatctgtagtcctaaccagaggctagggtgagaggatcgcttcagcgcaggaattagaggctgcggtgaaccatgattggagcactgcactgcagccagagacagagggagaccctgtctcaaaattttaaaaag

SEQ ID NO: 1318 - DNA, 4001 bp, Homo sapiens
ttttgcctatggagaaagtggagcatcggaggagccacagagagggaagtgagggctagcaggtgagggcggtgtgatgtttcttctcctctcagccaagctctgtcgctccttgctccaagggacagactgtgctcctgtgggaagcctctgacctcactccagtgagaacagcaaagtgagtggaggtgacccagccgcccttctgcccaccacagctgcttagctggaggatgaaatacacttattagccaaacccaatgacaggccttcgtttctgctttttaatccctcagtagtttataaatgttcctttctcttttgcagctttgaactacacccctttctttaaggaatgtcaaattaaacttgaatacaaaagaatatttctcaccatcataccatataagtttttatgtgtaattttatggctacgctttccgactagatattagtattataatattccaaagcgaaaagcaaaaaagagttattgccattgagatgtaaatatgaataaacaccgtttttagaatccagtgatttttgtcaggcttttgggagtgcttgcttgtcattttataattgcaatgaaactgaaaaatagacctgaaattatataaaaatacatcaaggagtgccctgcatctatgttctcctagtctttgaaggcaaattctctatgaatagaacttatagagattctaattggtcttacaattgagtttccggtaattgaacataccttttagtcttctttacttcatatcatcatttcacatcttcttcatttcaattactggtgctagaaaataaaacgcaatacactgtgattcgtgtgtagaatgctggttagttcagctccaaagagcaagtaagatgttctatgctcagctctctcctgggtctgctcataataggtattcagtaaatagttgttgaatgattaaataaatgaatgagcaaatggatacaaggatgctgctatgtagcattatgtaacttgcttagattgtatgtattttttactgtctgtctcccctcaatgggatgacggcctctcgagggcagacgttttcgtatgatttgttcacaggtgtatcccaggcacgtagtaggatgactgacacataaggtacttggcaaatatttcttgaacaattaacgagtctggggctgtagccacagattgcactttctcatctcagccagatggttcttaaatgtatatcttcagtcataaagggaattgggagaaatattttagatgtgttaaagaatgaaagcagattgctcgctgttcctggtctctttacacaaatgagtctgcccacaagagccctcacggggaatgtgtgaaaggcgactgtcgaccccagcgtttctttcttaggaattccttcagaccacctttaatttgtctgctgtgtagtttctcactttttggctcctcactatactcacttctcatgaaaacagggactcaagtggatgcgtacacccatgttcgttgtgtgctcttcacagtagccaaaaggtagaagcaacccacagtgggtgaatagataaacaaaatgtggtacgtgcatgcaatggagtattattcaaactttattttattttacttttcaagtctaagtgtttaattattattcacctatttcacagaaaaaagaggaatgtagcaaatgggtcggggttgtagaaaaaaaaatcccggactttacgtgtcattctgttttcatccgagagcagggcagtcccgacatcaggcacagcagctgcacttttccgaagcccctttgcggatgcagccctgggcacacttggcacagcccagggggcaacaggagcagcagctcttcttgcaggaggtgcatttgcactttttgcacttgcaggagccggcgcaggcgtaggagcctccagcggcgcaggagcagttggggtccattgcaagccgaggtgagaccggcgttcccaagcgagaagagaagaggcagtggaacacgtggagggcgtcgtggattgattcaaactttaaacaggaaggagattctgacacctgctacaacatggatggactttgaagacattatgctgagtgaaataggccagtcacaaaaaggcaaatacaggccaggcatggtggctcacacctgtaatcccagcactttgggaggccaaggcaggtgggtcacttgaggtcaggagttcgagaccagcctggccaacacggcgaaaccctgtctctactaaaaaatacaaaaattagctgggcgtggtggcacatacctgtagtcccagctactcgggaggctgaggcaggagaatcacttgaaccagggaggcagaggatgcagttagctgagattgcaacactgcactccagcctgggcaacagagcaagattccatctcaaaaaaaaaaaaaaaaaaaaaaaggacaaatacaattccgcttatgtgagtttcctcgaggagtcagattcatggagacaaaaaactggatggtgggggaagaggagattggggtgttattgttgaataggtacagcgtttcagtttgtgaagatgaaaaagtcctgaagacattgttaatgataaaacaacactgtcaatatacttaatgccatgaaactgtactctggttaaaatgataaaatttatgtcatgtataattttactatgataattaataatcttttaaaaagacccatccataaccacccatttgggctctatggttccactcatgcctttggctttgccttgaggtcctatttctggagaaatcttcaggtatgaatcttggcctgcctcgaggacttagctgtgttccttgactcaggtttgagtggcaccttctcgtgttccatttgttcatcatcttgaacctaaagcaaagaatccactcttaattgttgtcttggtttaagtcaggggccagcacgagagggttctttattacggttttcagttaaccattcagccttatgcaggtcccttggaggagaagttgaagagattaatggaagccgaaatggctgggaactatagattgtgattattgtactactaagatggtgttgcagctaggaaggaagtaaataattcaatacaatacatatgtatatacacacatcaacttctgagtccatatataaatgagtaggtgacttgggcacttgcttatttatgtattatcctagagcatatatgttatgaaaggagggattttttgttttgctcattattccattcccactgtgcctgttatgaattaggtggccaatcaacattagttaagtggatgaatgagtacattttacacacacacacacacacacacagacacacacacggagattgagagagagggagggtcattgctgcttctggcttagtgccaaaaagagttacatgtaaagaaactcaaatctattatagcagttagcttgtgataggctttctttcctgccaaaccataattgtgtgctgttgtaaatgacatctcctcccatgctttggaaacttgtcttcatttcgaaactggtttattgtccaagttaattctcctcccgcgttttcttttcttttctttttttttttttttttttttttttttgagatggagtttcactcttattgcccaggctggagtgcaatagcacgatcttggctcactgcaacctccgcctcccgggttcaagtgattctcctgcctcagctttcagagtagctgggattacaggcacccaccaccatgcctggctagtttttgtatttttagtagagacagggtttcactatgttggtcaggctggtcttgaactagtgaccttaggcgatccacccgcctcagcctcccaaagtgctgggattaccggtgtgagccagtttgcctggccaactctccctttctatactgttttgcatattttcattttatgagcaggttggaagatgaattttaagggtgtttggaatacagaaaggatg

SEQ ID NO: 1319 - DNA, 4001 bp, Homo sapiens
aagtagatgatgttgttgtctggactgtgttcccccatggttcagttgtgctcagcccagttgtgagaaatgaaaacgtaatgacttgtctgcaacagaacaaagccagagttagagtcataccacaagaccgacggacctcctcagcaaccacaaggctcattttccctctcacttaaagagcaagccaaagcaaatgaaaaaccatccttgggaataatttttttattttaactttaaaaccatcaagtcatttttaaagaaaagcaatgccgactgggcgtggtggctcacacctgtaatcccaacactttgggaggctaagatgggaggatcgcttgaggccaggagtttgagatcagcctggtcaacatagtgagacccccatctctaataaaaaaaaaaaaaaaagaaaaagaaagaaaagcaatgcttttcaaaaactgaataagttcataagaccttctgaatacgcctgtcaaacaatttgaaacttggtcaaaatatttaaaggggacaaaagagcaaacagaacagcagctgctgaaaggctgagttgctacaaatcttaagggaaactccatccattcaaatatcctccaaatcagaccacgaggcagtaaatggtttcatgcagtttatggtagaaggagcaaggctttggaggcagagtcatctacctacaaatcctgtctttgccttttactacatgggtaacttttctgtgcctcatttttcttacgtgcaaggtgggaccagtaattcctgttctctcaaagtttttataagaaataaaagaggcaacatatgtaaagcacaatgtttggtaaatagtagaggaacaagtatgaattccttcccccctacctagaacagatgtttcaaccttctgggtggaagggctattcctcaatcaggcacaaacaacgaagatcactgtatctatttatgtcctaaaacaatatggtgtcaacaagaagttatggttctgtggtgggctctcgtccctgaatcaattgagtcttattatttttgtttctacagctcctagcatagtacactgatactatgataagagttcaggaaatgtcagctaaatgactgaaagacatggctacctactctctcgtgaagatatactatcttgggaagatacattctcttgagaaaaataccacatttgaagctttcatgttctggaatagtgattcttccttcatctgcaaacacaggctctacaaatgtgggtttggcaggcagaatagagaattttaaaataatcagcacatcccttttagttttcagtctggctttgcgctttatctttctcttctgctctgggttagaaagtgagcctttacttagtgggatggctagacagttaccagagacaggccaaaggattggatccgggaggtaccggcccgacccctagctctggcttacgcaaccccacagatgtacatttcgctgcatctgagcagagagagaagagcaccgagggccccagtgggctgccccggcaccctcggcggcaacgcggagaccaactgtccgaaacaaacaagaccaggaggtttgagggtagccaacgaggagtgcgaacagagcccccttgagaggaggctgggaaaaggaacctgtctgggatagcccccagcacagggctacacagaaaaatccgaagacaagctgggggtctccaagcaaggaggagaggggcagggtccgggtctccatggaaacagggaaggggggctggatacccatccccatggaaacggagaaggggtggggtccctatggtgaccaaactgaggtctctattgggaaatgcttcaggagggagcctaagtcccgcgcctcccggtaagtcccaagcccaggccgagtctagtttcgccttttacctccgcggctcccggcaacggcggcagcagcagcttctcccctccccagcggcaccatgattgcccccaccttcccctaacgtcacttccgcttcctctttccggaggaaggtggggacagaggatccgcccctccctggcgcctctggttggctcaggttgtcagggggctgagctgcagcctccaattggcgagcggggcaccgaggggaaggcgcccaggaggtgggttcatccgcgtggggaagcgcccggggtggccacgcggggcccggagggtgtcgccctcgcggcaccggagtcaaggagaagggaacgaatccccaaggaagaatccgaaatgtcctcagccaggtttgcgctgaccgccctcgccctggcagccacagccgcagcgggaaggaccacagttggcagtcagaaccctggctccaacccgccaggggagcctggacggccgcgacgttcccgggtttctcctgccgggaccccggccttcccttcagcacccatcaaagttaacacaggcaggaggcccagaaaggaagacaagaccccaaaggcagaactaagagtattctaagcccagctggagaggacgccgccgcctcttccccttctcacgcgcttgcctaggacccccagctcccttctcacgcgcttgcccaggctggcggtcccaactttcttcccctgcaagaggacgcggctacggcgggactcatgcccgggccagttagcgccacctaccggccactcccttcctttcaccgttcacattgtcctgctggcccgcgtcttaaacccatttcacagtgcccagaagtagtgggcattcgtacccaggaagcgattctgccttcgttatgcccctgtcctttccaaatgcctggaggatctagctgttagatcctcccagctgccactgcctgttttaaccataagctgcttctctcgaatattcagagtgggacaactccaaagaccagaccaggggtcaaggggttcaggtcagtgccataaccatttcttgctggaagtatgtgaatagtgactggtacccaccagactgccaggaatatgtctctttggccccaaggcttgagccacaaaatccagctgcagcgaactgccatctcttaagacataaaaacatacacaaccgccactgttaaaaatacatttatcattaaaatatattacacatggagacaggatgcatcatatacagtttggaagacttgctggcccagaaaatcccacttgtttcaccgaacactcattttttcagtgattttacattttatttttagagacggggtctccctctctcacccgggctggcgtacagtgatgtggtcataggtcactgcagcctcaaactcctgtgctcaagtgagccacccacgtcagcctcccaagtaactgggaccacaggcatgcatcaccacacccagctaattttttaaaaatgtttttgtagagagggggtctccctgtgttgcccagcctggtcccaaactcctggtctcaagtgatgctcccacctcagtctcccaaagtgccgagattacaggcgtgagccactgtgcctggtcattttaattttttaaatgcctgtattgccctcagaggctgagcaaccagcctcagagttattgagccattatctgggcaggaacgggggtcgagtttgcatatgcatatacacatcctcagacagagcactgaaagcatctgaggtggctgtagcctattttatccagcagcttctgcctgcattcttgccatccaactcattggcctttcaggactttccatcaaatatctgatcatggggatctcagcccagactgactatgccctggaggtagggtgagtgagtacaagtacagttatttaaaaacattttaggccaggcgtggtggttcatgcctgtaatcccagcactttgggaggccaaggcaggtggatcacctgaggccaggcattcgagaccagcctggccaacatggtgaaaccgtgtctatactaaaaacacacaaaaaaattagccaggcatggtggcggacgcctataatcccagctact

SEQ ID NO: 1320 - DNA, 4001 bp, Homo sapiens
cggggatgatttaaagaactattaaatataattgtgtcatctagaaaaaaggcttaacaagatgatttctgtacaactagttctaaaactgtgtatgcatttcatcctgatagttacacatttccgttaatacccactaacattataaatgtagtatcaggaagcaggtgtgttcttaattcaaatatttagaacatttttagcactttaaaaaactgcaggtgaactaattttaaaatgtgaattcaaatacatttttatatttaggaatctgaaaaaacaagtcattttgtattccctctcaagttataactaaactatagggcacttaaagccatcagtcaaaacaactccctttaaagcattttcaaatcttaaaaaggttattgtgaatttaattacattttatccacattaactacttctacatacaactatctttgaaatttactgacaaaaaaaaaaaaaaaaggaattcccaagagagaatgaaaccatggaaattgaaaccagcttgtaggctaggtatacaggagggtcacatggaatccatctgaaggagaaagtaactactattactaccggaggttctgaagtcaaattaaatcaggtactatttacatatttctagctctgtactgacctcacatggtgccttcctatgtattacacacaggcctagctaggttttcacatttaagttagtgttacatggtttctatctttaaccaaagttaaatgttttaaagaatagagtaacattccataagccttttcccattgttcacaaacccttgctgttagtcagattaccccgataaatccatctgttccctctaattgcttccaaagaaaaattctagcaaccaaggacaccagattgtaaaacacagagttagagttctggcactaccgaaatatgttaagaaatcttggcaaattggttaaaattccttgagccgtaattacctcagttgtaaaaatgaatacaatacaaatctacatcctagacgtagattatatgagttaggtttaattaaacacaagaaaagcctcatatttttggtgagctccaaatataagctacctagctttcccccatctcactttccctcccaccgcttccctttaagctttcaggttgtgcttccaacctccacttcagtgtgttccccttatccttaccagcacttacactcgaccccctttactccaattccatacaattccaccctccgattccaagctgctacttccctttgcgcactgctaaggtcccaggcagccctccactctgctccccacatttccctcagcccccatttcccaacggctcctcctctcggctccccaccccctcgtcaccaggttcatcctgcccctccaaccgtctcccgcccccaggttccttcctgccctccaaacacagcttccccgtctcaacgtttcatcttgttcctccaacagactcccccaacgacctcctcgctcctttagtccctattttctcccaacactcaactgactactcctcttcatccattcttttcaatatacacataaatgcaaaggcacccacatacaggagcccccacccccaccttggtcctccatctttcccttttatacttgcttcctttcttcctccttcccccaacccccatctcctccggaagagtcggttcccaggccaaggtctctcacctcattcggtcacttcagtggtgccaaccgcttcatacaggaaaaaacaaccaatccgtccccgtgggcgcttcccctgcgagtccgagcacttactgggcacccgccccaccgggtacccggcacatatgcacgcacaaaccgaggtccttggagacaagggttgggggtagaatgagcgttcttacaccggcctcaaacacagcccacttcaatacagcccctcgccattttggtttcccgcggactgccggtgcattctgggagcgcggagcgactccggtgccgaatggcagctctccaaagccgcgggggggcagggactgcgcggcgagcgcggaggaacaccgcgccctgcgtccccgactggggctgaacaaagaaggactctttaacgttgcagtgaggctcagtccttccgccgccggggctaacacaatagtgaaagctgcgctcctgatcgtcggcaggctggcactgttatacaggaaaagggtcgtgtgcgaccttcggtgtgcgtggtcgtaacggtgctctgtgcatcttgctgggccgatttcttttccctggagaaaaccttaactgaagcacgtttcctctactttcatcctaaggcctgctgttagaatttccttcagaggggagaagacccaggatgtcgagattaaattttattcagcgattcactgtccagtcccaaactccttatcaggagctgcttttatgaaagactttcagacgatttttttcctaacgatgaaaggttgttttctgtttacccgctttgcagtccttcctagttgtaatgaaatctgagaatagtcccctgcaaaatggtttaagaaaacagaattgtttattagtgcagacccttagcctgcccagattctgctgcctacaggggtcccaactgacaagctgtgagattgtatgcttgtctctttaacttacacctagatacaacccagctcctcttagtagccacgtgtggaatctttatttataatttcgtcaaaatatttttaaagccattttatatttttgtcccatattatgccacagggatagtgaacaccatattttttctgtctctgaaaaagtaccttttgtggtctaagctcatttggctcatacttcaaaaggggttccctcagcctgtgatctcagaatttggcaaataagcatattcgttttatccaataccattcaatactttaaatattgtggtcatacccttccactcctctgcttctcctgaataatagtcctaatcttttaagtctgtcttcttactgtaccctcactgtatctacttacctactacctttcaggtttcactttatttcaattctcatcatcgtctctcataaattcgtcttaagtgaccttcatacgttggctgaggaaaattttgacttaaaaaaagcagatgcagccgggcgcggtggctcacacctgtaattccagcactttgggaggccgagacaggcagatcacctgaggtcgggaattcgagaccaacctgatcaacttggagaaaccccgtctctactaaaaatacaaaaattagccaggtgtggtggcacatgcctgtaatcccagctactcgggaggctgagacaggagaatcgcttgaacccaggaggcagaggttgtggtgagccaagatcgtgccattgcactccagcctaggcaacaagagcaaaaactccatctcaaaaaaaaaaaaaaaaaagtagatgcattcccattcaggaacgtggcattaaggtaaataaataaataaaatattaaaaagtagatgcagtacaaaaattaataaagatattgcacaaacagatatatttgctgtgcagctaagcctaatcagagaacatctgttttggagaacgtttggtctaagttttcctcaacatttctgtaaagtggtcaccaagcctcaacttcaaaatcttcagtgattcaatacttcagacgcattcatttccacctcagaaactctaataatttaggctctttggctacacaaaagtattctaatcccttatacattagagaagtaaattatgcctctatcaaaaaaaagtgttatttttctgtgcaaacgtgtgagtacaaaggtgtaagcaaaccaagtgttcagagatttaaggacactcagggagtcacagtcaagtataaagaatacctgtcagccagccaccagcaactcactcctgtaatcccagtactttgaaaggccaaggtagaaggatcacttgagctggggagttccagaccagtatgcagtctgagcc

SEQ ID NO: 1321 - DNA, 4001 bp, Homo sapiens
cagtcatgctctcaaggaactcgctgtccagcagagtgataggacatgaatacatacttctagcaaaggctgagtagcattaggcaggtggccagatgaggtcagagctctggccctagtgccctgtagtaagttgcgagggagtaggaaatgaagacaaaacagcaagagcacaggtccagcacaagaaggtgaaggacatggaaagaggagcagagcatgataaagctacaaaagtagggggcaagtcatgaggtccgggtcactggggagccctggacaggctctgaatgggagatagactagactgacaaagcagctctttctggagacctcctgtggagggtcccctcttctacccttgggagacgaggtgtcattcacttcacgatacacatggggaaaggaagttggacaggggaaggcacttgtctaaggtcactcagtggtcatgccagtgcaaagcacccaaagcctggtccaggtcctgccacctcctgcgtgggctccatcttctcggctcagttcaagcctttattatcagagtccctctgtgtgccaggctctgtgctgaatgtccgtgtcggccacaaattgcactaacggtgcttactgccacttcctctccgaccttacctccaaagacccagccgggcctaaccctcacacacagccagaggaatccttcccaaacacagttaatcacatcgctcatccgtttaaaactggcttactagagccaacacaggataaaatccacaatcagtcccaaacccatctttctctgccgtctctagaccacattcactgagcaccaaggcctgcacgcttcgcagccagccctcctgctctcccccttgccctccagccacactggccctcaacccccaacactgggcccacctctgagccctgcatcaaacaccagcacccccttcgccgagctcattcttcatcattcctcagagctcagcttaagcatcaccttccttccctgcgacagggtcaggtcctttcctgtgcgctccgcagcaccctgcctgtccctcggagtcctcgcgagaggaactagataactgtgatccccgcgcacagcacggtgtctgcctaggacacagtgagcgcttcaacgcgctgaactaaacgaatgaaggggaacaccaactcagctgtcacccccgcccccaagtgtcactggctagaagatcttcccccggttcgccggcagcaccggtgggtcttgtcacctctgcgccccgcagccctccggaggctgcagttgctgtctgctgacaggcgtcccctcaggagaacgggagctcctccagcgcagggccctgctcagcacccctggtcccgggggcccccacggaggccgccgcgctcagtgaaactttgccgcgcgcagcagtggccggagacccgcgcggaccctctccccgcggggacccgccagggcgagtcgcccctcccccgcggcagacgacccgacctgggccaaggtcggccaagtgctcgccgcctgcccagcggcccttggacccacaggacccggacccgagtgcgcggaagcctccgagccgcggccaggtctcagaatgcgcggcggggcagcccggcccgtcaagcagcgaagccgaaactagaagcctgaggtctggcttggtcactgtttgctggggaactccgacgagcaactacccttcggggactcagtttcccccgggccaagtgagacggacagctgcggctcccgcgagaactcgcgcgggaacaggagctgcgggctccgcacagcgcccggcacgtagacccagtctactaacgggctggaaggtcgcgctcccgcctccgcgcctccctagaacctttctcacctcaagctcgggctcccggactctctcacctcacggcccctccttccaccttgggccgcccagcctcaaccgccctcacttccgctgacccgccccccggaagcgatcctccgcagctgcgcaccgaggcgcacctccgcgcaccctcaggaggcgggtccagctcggtggcgaggggagcgcggcccccgagtgggcgaggcgctggcggctgtaggctccgataccgcggagcacactcccctccatcgagaccgtgcccccgcggggtctgtgtccccgggaggagttggctgcgtttggagatccctcggcctggtattcgtcgcgtctccctgcttgttgctctccacgtttagccccatccgacttctggaagcccaggggtgtgtcgctcgacccctaaaatatgctcctacccctagggcaaacttcagaatcctcaccctggcccccttcccagttcttggttcccaggcaggtccctttgcaaagcctctctccagcaagaatgcgcagaatgggcctctttctcctcttgactcctgccctccagcactttgcagctttcttctattttagcctctctctctctctctcacacacacacacacacacacacacacacacacacacacacacggtatattcaatgagtttgcttattagatgggtacttgatgtacaagactccagaggctctgtgggaagagccacattccttccaggctcactaacccactccctctttgtgctccagccctcactgtcttggtctgtggcatgcagttcctgggtcacatttccttctctgccttcagcacagcctcgggctgtgcctggctcccaggctggagttccttggttccaaagcctgcagtcccctctgccagagacagagctggtttcatgggtgaacagcccatgcagtcacaacgggccgcatgctcagaatcctgtacttggtttagtactttgctgttgccgtcttgaaatgattttctaataggggttcttgtgttttcattttgcacggggctgtgcaaattatgtgactggtcctggctagagacctcagaggtcgtccaccctgatctccaccatatctcaaacgctgaagattgacttccaggtctggccctcttcccaggatggcacattgtgttttaatcattacctttccctcctgtgcgatggcggatcatgcaagtccacgctggctgtctgtcctgggtgtagatgctgatttggtgtcccactcagatccccttgcaggaagaacggagctccctacctgggaatttccttcacctcccaagccaatgactgataaaaggtccaaaaggccagttcagctctgcagtgtggtttatgccccacagctcttccactgtgggtcaggccaaggctgggctgagactgttcctgctcagcatttttcctttccctcttctgcttccttccttcttttactggtttttctggaagtacactcccccccagccccaccaaacaaacaaaacaaacaaacaaaaaaacacttcatgcctgtctcaggctctgcttttaagacaatgattttaactcccagatctctctcaacagagagcaccagattctcaaaacagtaagtcctaccacttgttctatcgtaaaacttattttgggcaagtcactcaagccttcgataggtaagatagtacctgaaagcattccagctcaactctgccccaagagggagccaccccatggaaggacggagctgagcaacatgccactcaaaggaaaagcacttagaaccactctagttagtcttctctaattttattacagggcatgttggggacaggggagggaagtgttagaggagtgacagggcagcccggggccctctcccaccctgagcctcgaggcctggtgggggacatgaactgcagaggcatcagataaggcctcagaaagcccaggccatcattttccatgggaccaggctggctcaatgtggaactggccctcccagagcagcaggagaagggctcgcatgggctgcccccgtcacctgtgcctgacaggatggggggggaggcagagagagagcatcagacgccctccctccccataagg

SEQ ID NO: 1322 - DNA, 4001 bp, Homo sapiens
cttttctgaatgttggtttttccatctggaaaaaggagacaggaaaagctgccactggaggctaccttaagggtcaatgagtgaaatggggttgagtgcttaatgaactgttaaaacatgacacagatgggtgaggtgacatctgactgctcttcacagcagtccttgcatggtgagcagatgcaatcagtgtgctcgttcattcacttgttcatcaaacaccaacagtacccacttgtgccaggccttgtgctgggcaccgtaggggctatggaaggagtaagacacagtcatgctctcaaggaactcgctgtccagcagagtgataggacatgaatacatacttctagcaaaggctgagtagcattaggcaggtggccagatgaggtcagagctctggccctagtgccctgtagtaagttgcgagggagtaggaaatgaagacaaaacagcaagagcacaggtccagcacaagaaggtgaaggacatggaaagaggagcagagcatgataaagctacaaaagtagggggcaagtcatgaggtccgggtcactggggagccctggacaggctctgaatgggagatagactagactgacaaagcagctctttctggagacctcctgtggagggtcccctcttctacccttgggagacgaggtgtcattcacttcacgatacacatggggaaaggaagttggacaggggaaggcacttgtctaaggtcactcagtggtcatgccagtgcaaagcacccaaagcctggtccaggtcctgccacctcctgcgtgggctccatcttctcggctcagttcaagcctttattatcagagtccctctgtgtgccaggctctgtgctgaatgtccgtgtcggccacaaattgcactaacggtgcttactgccacttcctctccgaccttacctccaaagacccagccgggcctaaccctcacacacagccagaggaatccttcccaaacacagttaatcacatcgctcatccgtttaaaactggcttactagagccaacacaggataaaatccacaatcagtcccaaacccatctttctctgccgtctctagaccacattcactgagcaccaaggcctgcacgcttcgcagccagccctcctgctctcccccttgccctccagccacactggccctcaacccccaacactgggcccacctctgagccctgcatcaaacaccagcacccccttcgccgagctcattcttcatcattcctcagagctcagcttaagcatcaccttccttccctgcgacagggtcaggtcctttcctgtgcgctccgcagcaccctgcctgtccctcggagtcctcgcgagaggaactagataactgtgatccccgcgcacagcacggtgtctgcctaggacacagtgagcgcttcaacgcgctgaactaaacgaatgaaggggaacaccaactcagctgtcacccccgcccccaagtgtcactggctagaagatcttcccccggttcgccggcagcaccggtgggtcttgtcacctctgcgccccgcagccctccggaggctgcagttgctgtctgctgacaggcgtcccctcaggagaacgggagctcctccagcgcagggccctgctcagcacccctggtcccgggggcccccacggaggccgccgcgctcagtgaaactttgccgcgcgcagcagtggccggagacccgcgcggaccctctccccgcggggacccgccagggcgagtcgcccctcccccgcggcagacgacccgacctgggccaaggtcggccaagtgctcgccgcctgcccagcggcccttggacccacaggacccggacccgagtgcgcggaagcctccgagccgcggccaggtctcagaatgcgcggcggggcagcccggcccgtcaagcagcgaagccgaaactagaagcctgaggtctggcttggtcactgtttgctggggaactccgacgagcaactacccttcggggactcagtttcccccgggccaagtgagacggacagctgcggctcccgcgagaactcgcgcgggaacaggagctgcgggctccgcacagcgcccggcacgtagacccagtctactaacgggctggaaggtcgcgctcccgcctccgcgcctccctagaacctttctcacctcaagctcgggctcccggactctctcacctcacggcccctccttccaccttgggccgcccagcctcaaccgccctcacttccgctgacccgccccccggaagcgatcctccgcagctgcgcaccgaggcgcacctccgcgcaccctcaggaggcgggtccagctcggtggcgaggggagcgcggcccccgagtgggcgaggcgctggcggctgtaggctccgataccgcggagcacactcccctccatcgagaccgtgcccccgcggggtctgtgtccccgggaggagttggctgcgtttggagatccctcggcctggtattcgtcgcgtctccctgcttgttgctctccacgtttagccccatccgacttctggaagcccaggggtgtgtcgctcgacccctaaaatatgctcctacccctagggcaaacttcagaatcctcaccctggcccccttcccagttcttggttcccaggcaggtccctttgcaaagcctctctccagcaagaatgcgcagaatgggcctctttctcctcttgactcctgccctccagcactttgcagctttcttctattttagcctctctctctctctctcacacacacacacacacacacacacacacacacacacacacacggtatattcaatgagtttgcttattagatgggtacttgatgtacaagactccagaggctctgtgggaagagccacattccttccaggctcactaacccactccctctttgtgctccagccctcactgtcttggtctgtggcatgcagttcctgggtcacatttccttctctgccttcagcacagcctcgggctgtgcctggctcccaggctggagttccttggttccaaagcctgcagtcccctctgccagagacagagctggtttcatgggtgaacagcccatgcagtcacaacgggccgcatgctcagaatcctgtacttggtttagtactttgctgttgccgtcttgaaatgattttctaataggggttcttgtgttttcattttgcacggggctgtgcaaattatgtgactggtcctggctagagacctcagaggtcgtccaccctgatctccaccatatctcaaacgctgaagattgacttccaggtctggccctcttcccaggatggcacattgtgttttaatcattacctttccctcctgtgcgatggcggatcatgcaagtccacgctggctgtctgtcctgggtgtagatgctgatttggtgtcccactcagatccccttgcaggaagaacggagctccctacctgggaatttccttcacctcccaagccaatgactgataaaaggtccaaaaggccagttcagctctgcagtgtggtttatgccccacagctcttccactgtgggtcaggccaaggctgggctgagactgttcctgctcagcatttttcctttccctcttctgcttccttccttcttttactggtttttctggaagtacactcccccccagccccaccaaacaaacaaaacaaacaaacaaaaaaacacttcatgcctgtctcaggctctgcttttaagacaatgattttaactcccagatctctctcaacagagagcaccagattctcaaaacagtaagtcctaccacttgttctatcgtaaaacttattttgggcaagtcactcaagccttcgataggtaagatagtacctgaaagcattccagctcaactctgccccaagagggagccaccccatggaaggacggagctgagcaacatgccactcaaaggaaaagcacttagaaccactctagttagtcttctctaattttattacagggca

SEQ ID NO: 1323 - DNA, 4001 bp, Homo sapiens
tgcggccaggcgcagtggctcacatctgtaatcccagcactttgggaggccgaggtgggcggatcacgaggtcaggagagcgagaccatcctggctaacacagtgaagccctgtctctactaaaaatacaaaaaattagccaggtgtggtggcgggcacctgtagtaccagctacttgggaggctgaggcaggagaatggcgtgaacccaggaggcagagcttgcagtgagccgagatcacgccactgcactccaacctgggtgacagagcgagactccgtctcaaaaaaaaaaaaaaaaaaaaaagatttgcctagtgagcttggccaacccaagagccttcctgggctctcaggtttcttgaggcaaaacttctaaagatgcaaatagaatccttggtagctacaaagctcatctagccaaattataagtactatccaagcccaggattcattcttgaagatgagatgtaaaagcactgctgggcccttgcaaagggagagatcagagaaaataggagaacgaacaccagctcatgccaatctcagtctcatgagctacagagaaaaagagccaaaaaagtttatcctggctcagccaccttctggctttgtagctacaggcaagttatttaacttttctgaatgttggtttttccatctggaaaaaggagacaggaaaagctgccactggaggctaccttaagggtcaatgagtgaaatggggttgagtgcttaatgaactgttaaaacatgacacagatgggtgaggtgacatctgactgctcttcacagcagtccttgcatggtgagcagatgcaatcagtgtgctcgttcattcacttgttcatcaaacaccaacagtacccacttgtgccaggccttgtgctgggcaccgtaggggctatggaaggagtaagacacagtcatgctctcaaggaactcgctgtccagcagagtgataggacatgaatacatacttctagcaaaggctgagtagcattaggcaggtggccagatgaggtcagagctctggccctagtgccctgtagtaagttgcgagggagtaggaaatgaagacaaaacagcaagagcacaggtccagcacaagaaggtgaaggacatggaaagaggagcagagcatgataaagctacaaaagtagggggcaagtcatgaggtccgggtcactggggagccctggacaggctctgaatgggagatagactagactgacaaagcagctctttctggagacctcctgtggagggtcccctcttctacccttgggagacgaggtgtcattcacttcacgatacacatggggaaaggaagttggacaggggaaggcacttgtctaaggtcactcagtggtcatgccagtgcaaagcacccaaagcctggtccaggtcctgccacctcctgcgtgggctccatcttctcggctcagttcaagcctttattatcagagtccctctgtgtgccaggctctgtgctgaatgtccgtgtcggccacaaattgcactaacggtgcttactgccacttcctctccgaccttacctccaaagacccagccgggcctaaccctcacacacagccagaggaatccttcccaaacacagttaatcacatcgctcatccgtttaaaactggcttactagagccaacacaggataaaatccacaatcagtcccaaacccatctttctctgccgtctctagaccacattcactgagcaccaaggcctgcacgcttcgcagccagccctcctgctctcccccttgccctccagccacactggccctcaacccccaacactgggcccacctctgagccctgcatcaaacaccagcacccccttcgccgagctcattcttcatcattcctcagagctcagcttaagcatcaccttccttccctgcgacagggtcaggtcctttcctgtgcgctccgcagcaccctgcctgtccctcggagtcctcgcgagaggaactagataactgtgatccccgcgcacagcacggtgtctgcctaggacacagtgagcgcttcaacgcgctgaactaaacgaatgaaggggaacaccaactcagctgtcacccccgcccccaagtgtcactggctagaagatcttcccccggttcgccggcagcaccggtgggtcttgtcacctctgcgccccgcagccctccggaggctgcagttgctgtctgctgacaggcgtcccctcaggagaacgggagctcctccagcgcagggccctgctcagcacccctggtcccgggggcccccacggaggccgccgcgctcagtgaaactttgccgcgcgcagcagtggccggagacccgcgcggaccctctccccgcggggacccgccagggcgagtcgcccctcccccgcggcagacgacccgacctgggccaaggtcggccaagtgctcgccgcctgcccagcggcccttggacccacaggacccggacccgagtgcgcggaagcctccgagccgcggccaggtctcagaatgcgcggcggggcagcccggcccgtcaagcagcgaagccgaaactagaagcctgaggtctggcttggtcactgtttgctggggaactccgacgagcaactacccttcggggactcagtttcccccgggccaagtgagacggacagctgcggctcccgcgagaactcgcgcgggaacaggagctgcgggctccgcacagcgcccggcacgtagacccagtctactaacgggctggaaggtcgcgctcccgcctccgcgcctccctagaacctttctcacctcaagctcgggctcccggactctctcacctcacggcccctccttccaccttgggccgcccagcctcaaccgccctcacttccgctgacccgccccccggaagcgatcctccgcagctgcgcaccgaggcgcacctccgcgcaccctcaggaggcgggtccagctcggtggcgaggggagcgcggcccccgagtgggcgaggcgctggcggctgtaggctccgataccgcggagcacactcccctccatcgagaccgtgcccccgcggggtctgtgtccccgggaggagttggctgcgtttggagatccctcggcctggtattcgtcgcgtctccctgcttgttgctctccacgtttagccccatccgacttctggaagcccaggggtgtgtcgctcgacccctaaaatatgctcctacccctagggcaaacttcagaatcctcaccctggcccccttcccagttcttggttcccaggcaggtccctttgcaaagcctctctccagcaagaatgcgcagaatgggcctctttctcctcttgactcctgccctccagcactttgcagctttcttctattttagcctctctctctctctctcacacacacacacacacacacacacacacacacacacacacacggtatattcaatgagtttgcttattagatgggtacttgatgtacaagactccagaggctctgtgggaagagccacattccttccaggctcactaacccactccctctttgtgctccagccctcactgtcttggtctgtggcatgcagttcctgggtcacatttccttctctgccttcagcacagcctcgggctgtgcctggctcccaggctggagttccttggttccaaagcctgcagtcccctctgccagagacagagctggtttcatgggtgaacagcccatgcagtcacaacgggccgcatgctcagaatcctgtacttggtttagtactttgctgttgccgtcttgaaatgattttctaataggggttcttgtgttttcattttgcacggggctgtgcaaattatgtgactggtcctggctagagacctcagaggtcgtccaccctgatctccaccatatctcaaacgctgaagattgacttccaggtctggccctcttcccaggatggcacattgtgttttaatcattacctttccctcctgtgcgatggcggat

SEQ ID NO: 1324 - DNA, 4001 bp, Homo sapiens
agaaggattgcctgagcccaggagttcaaggccagcctgggcaacatagcgagactccatctcttaaaaaaacaaaaaacacacctgtaatcccagcactttgggaggccgaggtgggtggatcacctgaggccaggagtttgagaccagcctggccaacatggtgaaatcccgactctactaaaaatataaaaattagccaggtttggtggcgggcgcctgtaatcccagctactctggaggctgaggcaggagaatcgcttgaacccggaaggcagaggttgcagtgaaccaagattgtgccatagcactccagcctgggcgacaaaagcaaaactccatctcaaaaaaaaaaacaaaaacaaaaaacagaaacaagtaatcagagccaccagggcacagacaggccaacagagggcatagggtcatctggcagtctggttaagaaaataagacaaacacttaaaaacaaacaaaacacttgcacagcaatgggcaaacacacagtagtgaatgggtgtgtggtgacatggcacaacagaggaaagcccaggtgaggttcatttctttcagactgtccaccactaaccctgtgtacctaaccatttggggtcttagactcttttgacaatctgattaaatgcactgctcccttcccctgaaatacacacacaggtgcacagactacacggggatacatccaaagacaaggagttgattccagactaagaaccctgggccaaagctttctccctctagggctgctctctttcattctgacctcaaactccagattctcagtggggatggctgtggggagtgaggaacgggggcgggggggaggagtaacagcaagagcagccagttggctttcctccagcgtttaagggcgcacctcgttaattgcttgctggaacagaacctagagtaggaggaagctgaaccacctgtaaaccctctgattttcaaagacttattgcattcctagtatatgccacgcatgtgccatatttgtaagccaactcccacgatttatccgttatcagctggactcccatagcaccctgggttgtaactgtgggtgaaaaggcctgtctcctttctctttccccagttccctgagacaggaccggtgtcctgcctggggtatccccagagtttggcacacggtgatagccaacattcactgagcgccaaagggccaggtgctgccactctctcaaaataagcctctgccacttactgaacaactagtctgcgccaagcactgggatactaagcctacgactcccagaaaggtcccggcggacccccgtgcgcagcgggacgcagtgggcgccagggaccgcagtgccccgggcccagcgctcttctccaggtgatcgccggggaggcaggtttaaaaggcaggagccggaagccgtctcggcgcccaggtggccgagaatccagtcaccaggtcactgagtcaccgatgggggcgaggacacgggcctgggccggtcagaggggcgggatcgtcacccctggctcaggggcccctccgtccaggcagggagccaaagtcagtcttcgcttgagggttggcggtcgctggaagtggtagccattgggagttacactaatcccgcgaagggtgcgcaagggaggcggcagccccccccaagaagagaggcaggccggcctccagcgctccccgcccacaagcacgtccttgcccccgggaggttgtttgccggctccaggatctccctcccggcgaccccggcctcgccgtcactcaccctccagtcccgggtgactcagaacgctcggccgccggccgcaccactgtggccgctgcaggggcggggaacgcagtgaaggggcgcggcgcaggtgtcaggttgctggagaggcgggcctacagggcggaaaccaccggcgcgggtgaccggaagccccgcccccaacatggccgtgcccacaggtctcgttggaggccgtgcctttatcgtcatgtgacgcgagtcctcgccccacccgtctgcagccactcctggtctcagtcccagagctcgagagggccacgtgaccgtcccggggccagtcacgtgaggcgcagatcctggctgggagggggttggtagaggggtccagagtggcagtaaaggaggaagatggcggggtgcagggggtctctgtgctgctgctgcaggtggtgctgctgctgcggtgagcgtgagacccgcacccccgaggagctggtaagaagccggcggagtcggcctggggagggggcggttgctaagggactgagagaggcgttgccgggggtggggccgggccaatctgggcccgcaggtggcagcgggtggggcctggggaccgcagccagggctctcgaagcgtctaccctgcttcacgtgcctaagtctggggtcttttctcataacccctcctggaatctgagggagaatccaggccagctccagtaaatcccacccatgtttccttttatttccatctgaaaagagtttggaatgaaacaagcgttttcagaatgagcttcctcacaggactttgtgcttatcatgctgctgttttagcttctccagtcctttctcactctatccctcaccctttctgggtcactgacagtccagcttccccctgcaaagcatcctgggaaaacttgagttgtgttcccagagttgacaagtcctttctgatttcagatacgtcacactgtcaaatggaacctgcatttttaccccccttttcagctggcgttggacatctttgaggtgtcctgaagaggagggtggttatttggagactatcagtggaaatgaagagctcagctgatggctgtagatcctcacccacatggtccctcacccctgaaaggttttttttgagggctggttcctatttgataatggctccagatgatttagaagctagccactgatttcagtaaatacttctgcctccttccactcctaaccactaaaaaaggctccctctgcggatctgtttttctagaccatccttggagaaacacaggaggaggaggatgagattcttccaaggaaagactatgaggtgagctcctttgatactgcttgggcaactaaagtagtgagtggcctggtcacttcaggccgaagcattatgattccaaccagagatgctctttgaccttctgtcccagggagtgagtgggtaagagaacttccttctaggaaagagactgtttagcaagcccttttctcaccttaaccccaaaacaaggtctggtgtttttacacgtttataaatctgtggcaccttaacctggatagagtatgtatttgccattaaactgtttgcttttacagcttacagagagacttagagtgaaaggcactggcaggcagtatgtgcccctaacaggtgtgtgcttataaactgttaaggaggccttgcttctcttctaggagagcttgcttttcagatattttcttgctcaagcagcttctctctgacatgttcttgattaagttccacctttcatgtatgggattcttagagtatgtgtttttagtaaagccaacactgctggggtgaaacaacatgcgtgactttttatcattaaattcttaaacgtaataaagaaggtagagaaaagcctataactccattcattaaaagatgactgttaacaccttactaagtatctttctacatccttacccatgcttttatatacatgatacatgctttttttaagtaacaaaaatgagattccactaaatcatctattttaacctgtcccactcaccccctttattatactttttgtatcattaggtaattttccacaaccttttcttttttttgacagagtctcactcttccataaattcttcatgctgtagaatttagtgtcagcgttaggatttgtagcacttttttgtttaacttttattatgaaggatttcaactatatgcaaaaacagaataatctgttgaaaccc

SEQ ID NO: 1325 - DNA, 4001 bp, Homo sapiens
aggggctggaggagtctcagaaattgtcagggagaggatcccaaggttctgaggtgaggagaaagcctcaggttaggggcctcttacctgaaaagcctgaggctctaggcctccagcctcaaaaccaactctgagcagccggaagtctcggccatgaatcagaatctcctcagggataaatttatgcagggaccctggacggaggagctggactcgggacaagccgctcactgaagtcaagaggtacagaacagtgtaaccatggaccagagtctctccagaagggactcttgcagcccatcccactccatccctgctgttttctgagaacagaggaaggatgaggagggagttccaacaaccccagtgaaccccttcaccaaacccccccccaacttaccagcctctaatcgtccaatgttgaccagggcaaaatcgtattcactgttcaagggagtgtcctagacgaaacacgtgactgggtagacatctgaaatcgccctcattttcctaccctggcagccccaaccccttctagggggcaacaaccctagagagagttcccactgattatcaatgatacattcaaaagacagcccttaacccataatgtttgtctaaatcctgctagactcccctacccatttcccactagctgtcatttctgtggccccaaccatctcacctgattccactgccatccacagggctggaaggtgaccctaaagttggtacagatcagggttccagacaattctggttccaggcccttcctcacccctggggcccatgctaggatctgctcccctaaaggggaagaagggaagccctgttatgactgttcccagtgttgcccacacttggatacacccacccctccaagaaagggagatctaaatagggaagattaaaatcctccccaaagcccactacaatgtaagcttatgaggaaagataaatgttttttaatttctgtaactagaacagagcctagaacaaggcctggcacatagcaggcactaactatgtatcgaataagtaaatttgaaaaggggtaacagggtcaaggaaacagaaggaatgtcaaggtccagctctcagccagctctagaggctgtcagggaggacagcgagcctcaggcagacgtacttcgagccacgagaggaacacaggggtatctttggtgagggcatgaaacaagattggcgtaggatgaaatttggaagtctttggagagtgatagggcattattacctgggaggcatctggaggccaggcaactgctaggctgacgactcctgggctccggcatcctattttcctggacagactttggtccagagggttgaggggggtctagagttaacccctaggctccccaactccccagaggcagctgcctgtagaggcctacactcacactctcgggggaaactgagatcagtgtctgtggggagctccagacctaacagggctggtaaacagtaaagggaggggctggttaatggataatgagacaacgaacttgagactgagaaagacggaccaggctccatcagcagaagctgatagacagacacaccctcctcctcctcctctagagcctttgcttcccccttttatctccacctcatccccgttctcaccctcttgccgacaccccccaaattccttctccttacccccatctctggctcctccttctggggggcaatgttgaaactctggccccggcccccccaccacatttctctggctccatccggggacacagcagttaagggtgggaaacctcaaggatgctcacccacctcggggagaggctgagtcttgttgagaagaggggtgttagggagaggggtagggggttggacacaagggaaaggagcatttgacgtgcacggagcagagtttgggggtccttggaaaggtgtgtccagcccagcctgagaagtctcctcggaaacttcagtcgactctggagagggcgggagagatgcccaaccccttaaaggagaatacacacaattctggaaaagtggagaggaaacggtggagtctgagacggacgggtggggaagaaatggggactgagagaaaaacgactcccttctttaccccaatcccagaccctgttctcttcctgttcatgagtactggagaccgtttgaggggagcagttctattgattatgaagctggaatcatctgggctacctgtctggagtgtctcagtgatgacttcccttaaaagctccgttcttttgtcttctcaaaggggtttggggcggggagaggggtaggaatgtgaaagtggttcaagcctccttgccgcctcttccagaagaaaatgaaaattagacctggggggatttttgtcagcagaggcccaagaattaggtgaggaagcagggaaactggttaaagtggttttgcatatctttctctagagggcatgacacagacatcatgtgaagactgcagtggagaagtataaaaagagatggaaatgtgtccaagatgcagacacaagtacagtttgtgtgcaagtcttggggatgtgggtgggacaaaaagatcttaccagttaatcttgcccatcacgtagatacacaaccaataggcaataagtgcccattcccgtatgtgactccacccctccaacccagacaccagatctccaaatgaatgattcatgttcaggactttcacaggtgagggctggaaacctctcttcagctcagcagtccatcccccgtccctcccatctgcaaccctagaagcaaagatgggtaaggaaagctgggaacaaggagagaaggagctgcagctcctttaaaggagggggacttggggacagcaaagcaaaaatctttatttagacatgaaaaagacagaaaataaaatacaaaataagagttaatgagctgctgttttattgcttttgaatctacagaggcagcaatccttagatgggggccccagttttccaaagtgacactcaattttcccctccccccagtacaccacccttctggcctcagctttcagtttcctgtcttggctgcaactgtggaaatagtgaagatattgtgagacagaaagtcagtctggaacaaagaggtatacacctgctaagaaggtggcccagaagcctgattctagaagtcctaaaggctacagagcaccaccaccccacctgcccctaatgcattccatgggcctcaacctcttgggggaagaaaatatttcccaaggtctgttgtaaaaagaaaatagggaccaggcgcagtggctcacgcctgtaatcccaagcattttggaaggccaaggcaggcagattacttgaggtcaggagttcaggaccacctggccaacatgatgaagccccatctctactgaaaatacaaaaattagccaggcgtggtggctcacacctataatcccagctacttgggaggctgaggcaggagaatcgcttgaacccaggaagcagaggttgcagtgagccaagatctaatgactacgctccagcctgggcaacagagcaagactccatcgcaaaaaaaaaaaaaaaaaaaaagacataggaagaggtgtgtaccataacttttaaatcccattatccactttccttctcaccaccatccttcattcaagagcctcattctattctttagcactttgaggtgtggagacagtggaggaacacggagaaaaaaaatcggggggtaggggtgtggtggctcatgcctgtaatcccagcactttggaaggctgaggtgggtggatcacggatcacctgaggttaggaattcaagaccagcctggccaacatggcgaaacccccgactctaactaaaaaaaaaaaaaaaaaaaaaaattaagccaggcatggtggtaggctcctgtaatcccagctactcgggagcctgaggcaggagaatcgcttgaacccaggagacgaaggttgcagtgagccgggatcgcgccattgcact

SEQ ID NO: 1326 - DNA, 4001 bp, Homo sapiens
gcttctcagctctttgtcatcagccatcctctgctttttcagactcttccttaccctaaagcactctcactcaccagccttgctcagggttatccccgaatactgttgggcttgattgctctgagctctggcttggacaatggccatggtcacctgcagaggaaaggacattccatccttttggcttaggctgagtaagtgaaaagaaggaaatggagcccatgtgttgctccactctctttgccaagaatgaagaagaacagtgaagacagtccctagagaagggggcttcctcaggtcatggggactggggtcgggagaacaaatctggaaccacagaatcctagaatgatgattctgggaggaatcctggtttttcagaggaggaaacttgcccacagtcacactgctggtaattaatagagtaaggctagagcgcaggctctttactctcatcacgcaatcatttatcccagccttttagcctttccttgagagaagcagggggaatgatgagaggatcccaggggctggaggagtctcagaaattgtcagggagaggatcccaaggttctgaggtgaggagaaagcctcaggttaggggcctcttacctgaaaagcctgaggctctaggcctccagcctcaaaaccaactctgagcagccggaagtctcggccatgaatcagaatctcctcagggataaatttatgcagggaccctggacggaggagctggactcgggacaagccgctcactgaagtcaagaggtacagaacagtgtaaccatggaccagagtctctccagaagggactcttgcagcccatcccactccatccctgctgttttctgagaacagaggaaggatgaggagggagttccaacaaccccagtgaaccccttcaccaaacccccccccaacttaccagcctctaatcgtccaatgttgaccagggcaaaatcgtattcactgttcaagggagtgtcctagacgaaacacgtgactgggtagacatctgaaatcgccctcattttcctaccctggcagccccaaccccttctagggggcaacaaccctagagagagttcccactgattatcaatgatacattcaaaagacagcccttaacccataatgtttgtctaaatcctgctagactcccctacccatttcccactagctgtcatttctgtggccccaaccatctcacctgattccactgccatccacagggctggaaggtgaccctaaagttggtacagatcagggttccagacaattctggttccaggcccttcctcacccctggggcccatgctaggatctgctcccctaaaggggaagaagggaagccctgttatgactgttcccagtgttgcccacacttggatacacccacccctccaagaaagggagatctaaatagggaagattaaaatcctccccaaagcccactacaatgtaagcttatgaggaaagataaatgttttttaatttctgtaactagaacagagcctagaacaaggcctggcacatagcaggcactaactatgtatcgaataagtaaatttgaaaaggggtaacagggtcaaggaaacagaaggaatgtcaaggtccagctctcagccagctctagaggctgtcagggaggacagcgagcctcaggcagacgtacttcgagccacgagaggaacacaggggtatctttggtgagggcatgaaacaagattggcgtaggatgaaatttggaagtctttggagagtgatagggcattattacctgggaggcatctggaggccaggcaactgctaggctgacgactcctgggctccggcatcctattttcctggacagactttggtccagagggttgaggggggtctagagttaacccctaggctccccaactccccagaggcagctgcctgtagaggcctacactcacactctcgggggaaactgagatcagtgtctgtggggagctccagacctaacagggctggtaaacagtaaagggaggggctggttaatggataatgagacaacgaacttgagactgagaaagacggaccaggctccatcagcagaagctgatagacagacacaccctcctcctcctcctctagagcctttgcttcccccttttatctccacctcatccccgttctcaccctcttgccgacaccccccaaattccttctccttacccccatctctggctcctccttctggggggcaatgttgaaactctggccccggcccccccaccacatttctctggctccatccggggacacagcagttaagggtgggaaacctcaaggatgctcacccacctcggggagaggctgagtcttgttgagaagaggggtgttagggagaggggtagggggttggacacaagggaaaggagcatttgacgtgcacggagcagagtttgggggtccttggaaaggtgtgtccagcccagcctgagaagtctcctcggaaacttcagtcgactctggagagggcgggagagatgcccaaccccttaaaggagaatacacacaattctggaaaagtggagaggaaacggtggagtctgagacggacgggtggggaagaaatggggactgagagaaaaacgactcccttctttaccccaatcccagaccctgttctcttcctgttcatgagtactggagaccgtttgaggggagcagttctattgattatgaagctggaatcatctgggctacctgtctggagtgtctcagtgatgacttcccttaaaagctccgttcttttgtcttctcaaaggggtttggggcggggagaggggtaggaatgtgaaagtggttcaagcctccttgccgcctcttccagaagaaaatgaaaattagacctggggggatttttgtcagcagaggcccaagaattaggtgaggaagcagggaaactggttaaagtggttttgcatatctttctctagagggcatgacacagacatcatgtgaagactgcagtggagaagtataaaaagagatggaaatgtgtccaagatgcagacacaagtacagtttgtgtgcaagtcttggggatgtgggtgggacaaaaagatcttaccagttaatcttgcccatcacgtagatacacaaccaataggcaataagtgcccattcccgtatgtgactccacccctccaacccagacaccagatctccaaatgaatgattcatgttcaggactttcacaggtgagggctggaaacctctcttcagctcagcagtccatcccccgtccctcccatctgcaaccctagaagcaaagatgggtaaggaaagctgggaacaaggagagaaggagctgcagctcctttaaaggagggggacttggggacagcaaagcaaaaatctttatttagacatgaaaaagacagaaaataaaatacaaaataagagttaatgagctgctgttttattgcttttgaatctacagaggcagcaatccttagatgggggccccagttttccaaagtgacactcaattttcccctccccccagtacaccacccttctggcctcagctttcagtttcctgtcttggctgcaactgtggaaatagtgaagatattgtgagacagaaagtcagtctggaacaaagaggtatacacctgctaagaaggtggcccagaagcctgattctagaagtcctaaaggctacagagcaccaccaccccacctgcccctaatgcattccatgggcctcaacctcttgggggaagaaaatatttcccaaggtctgttgtaaaaagaaaatagggaccaggcgcagtggctcacgcctgtaatcccaagcattttggaaggccaaggcaggcagattacttgaggtcaggagttcaggaccacctggccaacatgatgaagccccatctctactgaaaatacaaaaattagccaggcgtggtggctcacacctataatcccagctacttgggaggctgaggcaggagaat

SEQ ID NO: 1327 - DNA, 4001 bp, Homo sapiens
aaaaaaaaagaggaaatacaatgatccacaaatgtaattttaaggctgcttgtagccatattttaaaaggtaaaaagaaacaggtgaaattaattacctaaaccaatatatccaaaatatcatttcaacatgttatcaatatttaaaaaattgatatagtgtccattctttttttttagcgagtcttcaaaatctaatgtgcattttacacttacaacaatgtcaatttggactagtcatttttttttttttttttgagacagagtctcgctctgtcacccaggctggagtgcagtggcatgatctcggctcactgcaacatccacctcccgggttcaaatgattctcctgcctcagcttcccgagtagctgggactacagatgtgcagcaccacgcctggctaatttttgtgtgtttttagtagagatggggttttattatgttggccaggctggtctcaaattcctgacctcaggtgatctgcccgccttggcctcccaaagtgctgggattacaggtgtgagccaccatgcccggcctggactagtcacatttcaagtgctccacagccacatgtggctggtggttcttgtactgaacaacgcagttctacaggggactagctcttcaaatgtaagctaaaagaaagtaattagttcctggccgggtttgggaggccgaggcgggcggatcacgaggtcaggaaatcgagaccatcctggccaacacggtgaaatcccgcctctactaaaaatacaaaaaaaaaaaaaaattagccgtatggtggcgggcgcctgtagtcccagctactcgggaggctgaggcaggagaatggcgggaacccgggaggcggagcttgcagtgagcagagatcgagccactgcactccagcctgggcgacagagcgaaactccgtctcaaaacaaaacaaaaaacaccaattagttcctgagctcattccctcattcctcaattatgcccacactgccatgggtgtaacatacacctatcccaagtatgttcagcttatgctacaaaaccaatttctcaaaattcttatttttgaaagaatttgtaaggcacagaggaaaaacctgggaataattggttttgtaaagctttcaaatactccactgccaagaagaagactgcagaaagaaatgtcatcctttaggggagaagaaacttaagaatccctgctaagaaaactactccagtttgtgtgtatgtgtgtgcgtccgaaaggggggaaggtggctggcaagggatttctattctcaggaaagaaccagtgtatctttatatgatctgaggcccacaggccatctgctccagactgaattcaattaaacttaggatatctgaagtcaaatatcctaatggtgttgatagggcttaaggaagttaagattggatgggggaaacagggatggggctgggggagagggagagaagatgtaccccaacgatgtaaccaagctcagtttcggggactggatctctgagaggtgtccacagtggaggacaaggggctgacacggacgctagtgttccctggggcagagatacacaatttttatacgtggctcaaaagaaagggtggctgtgacaggcaaaagacccaaagggcaataccagagctgatgggccggccttcgggcggacgtaccgcgggccgaagggtccaggggtctcttgggggtcccggggaggtgggcgttgcctcgaggggtgggagtcaaggcctcagacggtgcccaggtcgtggggccggcaatgtggggaccccacgtcccagacgggcggcttcccctggcccccccacgggcaggctggccgtgggtctggacattacgccgccctagaggggtcgtgccaggccctagactcaccgcgcggcttcggccaaggcctcagctgccgccgccagcaccggtaccgccgcttcaggccccctgccccaccgcccgccttccccgctgtcctctaagccgggagcgagggaaggagggttcccagccctgaggaccaatcgacaggtatagggagaagatggactgaaaaacaggccaatagtaatgaagaagagaagcttcaggacccggcttctccagggggcggggactgttcaaatagacaaaccacgcggccagtggcaggtgaaaacaggcttgggtccactcgggagaaccaatcggtcgtgagttcacctcagtcacttccactcacacatccggtacggcgctgctaggattcccttctgcatccgggctgtgaactcaaggagtccggtgtctgggtatctccggatcgcagcgagagcggctagcagaggttcgcgacccctcccggtgtaattctgagaggagaatgtgagcgatgccggtgcccaggaattactgcatcaaaagacgtttcgggctagcgctctttatggatcctgtgatatctcttttgttacaattaataagcatttgaaaatgtttttaattagattctctaactttcccaaaattatccaactcaggatcactccagagaaaccatagccaagttttaaccaaaagagctagtcataaataaaaattttcaaagcaacattattttttaaaaatcctttcaaaaaatcaatagctggcccggcgcggtggctcacgcccataattccagcactttgggagaccgaggcaggcggatcaccgtaggtcaggagtcgagaccagcctggtcaacatggtgaaattcccccacccgcaccccccgtctctactgaaaatacaaaaattagctgggcatggtggctcacgcctgtaatcccagatactcgggaggctgaggcacgagtatcgcctgaacccgggaggtgaaggttgcatgcaccgagatcgtgccactgcactctagcctgggcaacagagcaagctccgtctcaatacatacatacacacacacacacacacacacacacacacacacacacacaaccaaagaaaataaataactgctggtcacggtggcccacgcactttgggaggccaaagcaggaggatcgcttgaggccaggagttccagaccagcctgggcaacatagcgagacgatgtctctacagattaaaaaaaaaaaaatcaacagcaaaagtggatttgactacatttttttttaatcacagtgctatttgtcatagtaaacactgaaaattcctaaatatttcaaagtaggagtccaataaaatatgatgcattcgtttgggcgcggtggctcacacctgtaatcccagcactttgggaggccgaggcgggcggatcatgaggtcaggagtttgagaccagcttgaccaacatagtgaaaccccgtctttactaaaaatacaaaaaaaaaaaaaaaaaggtaggcgtggtggcaggtgcctgtaatgccagctactcaggaggctgagataggaaaatcccttgaagccagcaggcggaggttgcagtgagccgagatcgcgccactgcgctccagctggggtgacagtgcgagactccatctcaaaaaaaaaaaaaaaaaaaaaaaaagatgcattcataataagaaaaatacatagccattaataattataatttagagcctagcatggtggctcatccctggaatcccagcactttgggaggccgaggcaggattgcttgaggccaggagttccagaccagcctgagcaacatagtgagacccttgtctctacaaaagaaatttaaaaattagctgtgtgtggtagcacatgcctgtagtcccagctacttggaaggctgaggcacgagaatcacttgagtctatgacttcaaggttgcagtcatctgtgatctccactgcactgcagcctgggcagcagagaaagatcctgtctcaaataataataataacaataaatagtggtaattagatgaatatttgctaagaaggaaaaggttcacaactagtttaaaaattacaagttgtgcaacaatgtaagtataatac

SEQ ID NO: 1328 - DNA, 4001 bp, Homo sapiens
aagattgtacgccagtaaattactaagggttattaggaagttaaaacctgattctaatcccaataaaagttgctcacatagacagaagctggactacatctaaggtcttttctaggcacaatggcctgattcagaacttcagaggccctagacttggttaaactccactcagtgctcaactctagaagccagccttgggggtgaggggactaggcaagattcaaacattcaacaattttcctttcagtttattttttttttttaaatcactcactattcacagtattttaagtcttcagtggcattttgctcctgataatgacacctaaattcagatgaaagggaaataactttacttgtttaaattaaatgggaagggggaggccagaaatcatgagtaaaagatgttttccaaataaatatgatctccctatgatcatttattcaataagatataaatctcttatagggaggtttacatttattaattaaatattaaatataaataagatgtaacctcattacatcttatttaatatattaaataacatataaacctctcatagggaggtttatatcttatttaataacagcagtgatgtgtttctcagccacagttccactagtttcaagaacaattatatcagtcccgttatcagaacccaagaatcaagagagtcaccggttaacctctgataaatttccttgtgcgttacgaatttagtattccccctcttcctgaagctaaacatccccactatgtgataggatatttactgttttgtacttatcactaattctcgtttctacatctcctcacccgtttttacgggtgtatttgtcctcaaattataatcaggcatgaccttagagatctagagctcgttataaagctaacattacgttcagttctcgtgctaaactagctttttctcactgttgatcccagggccaccaacatcagaatcgcttgaaattactacctcccatttcggtatctggaggtggggtctgctcatctattttaacatagtgagtctatgcatattgcagttttgcagcagcgtgcgtagaagcagaaaataaaaagttccatgtagtagttttaaatagttctctgagtttcctcgtctgtctctccgcgcctgaactttctttcgcagtaggtgcgcaatacatatttacgaataagcgtcacaccatgcaaaaaaaaaaacttccagagggcccagctggtttatgctgcgtggaactggaaagtttagttactgtgacgttaagaatgtgtttcgggggcgaggggaggacgctttttgcaggttttgatggcttgcctggggagaaagaggtgaaggtcggacaaagagtggagcaaaacacgtagccctccgggctcctgcgctaagttctaaaggtgccgcccacacgcggggaaacaccgccgggcgtctcccgccgcagaagggaatcgccccagggattaggaggccacagcacgagttaagaaacacaacccaaccacgcagacggggtcgcagcgttaccgggttgcgacaggtcttggagcgcgggtgacatgttgtcgagtctcctccttgcgcagagggcgcggcagagaagacgtgctctccacaggtgacgacggccaagggccacgccagccagcgccaggcgagcctgccacacaaggcccgggtcttttgacgcctcccgttggctcgcgtcgcggggggactgcggaccccgaaagcccgcagcgccctagggcctctctcggggctgggcgcggcaactgctggagcacgtgctttcttcccgggtacccggccagtccttggtgtcggcctagcagccagacacgcgcggccagaggcggagtcgcgggacggcacggaaaaggacccaagagaaaaccggcagaggaggacgacgtgacatccggctctgagccccgcagacatttagaacctttcagagcgcggttagttctgcgctcaatctatcctcggcgtgggaggtcccgccccttccggcctgtgattggtctgcccgagctcctcgcagccgcattggctgtcaatatcaaccaatcacctgctgtttagccccggggctctctgggagatgtagtcccgctccccagtttcccgcgggagcttttcgcgtctctgtgtgcccaggatccggaagtgtaagcctaagtggcccctctaaggaaaagtcacagcgccaagttcgtgctgatctcgacacgctgtgtggtgtcgagcctgaaattttagttccgttttgctgttgacttgcgctgggcaagacagttaacctctcagtctccacactctacaaacaagaatgataggatggtagtaattagaattttttagggttgtagtaggcgttaaatgagatcgtttgaccgcgctatgaaaactctgaattaccatatgggggtgttaattgtaacttattgacagtaaacatatattgagcacctactatgtgtcaggcattggggcacacacttggaatgcaaaatcagacaagctacatcgcaccctcacgtccttggaggaggaactcacaacctagttagattaataattgaacagggaaaaaagaaccacatacattttaaaagagctagagtattcaaaggggccagggaaaggtttcaaagaagaatctgggtcctgaaggaagagtggtaccaggtaaggttgttccagtcaggagaagctccctgtgtacaacacagcactttagggaattctaaaataaagggcagctctgtaaggccgagcatggtagatgtgagaaaaagcaaattcatctagaaaaatctctgtaaggctgagcatggtagatgtaaggaaaagcaaatgcatccagaaaaataaaaactataaccaaattatgacatttactaagctttaaaaaaggcacaaatttgcatgccattctcattttattgtatgtaattatacctcaattttgaagatttgaaaaattattataatgcgtatcacattcttaccaagaccatcttaccaaagatggtcttacttggaaggtggggggaatggagtaggtgagagagaatgcaacaaagaagggagggaggaatgagatggccctaaatagccaaaaatcttaagattataagggctagggtgagagtaggtgagggataaacgactacacattgggtgcagtgtccactgcctaggtgatgggtgcaccaaactctcaaatcaccactaaagaacttattcatgtaaccaaacaccacctgctccccaaaaacctattgaaataaataagttaaaaaaaaagaagaagaaaaggaggaaagaaaaaaaagcaaggtcttctatgctgaacttattaaattatttatccaggcttgataaatcatgatggttttctcatatttattattatgtttattcatttctcaactcctgagtttttatctgcaaaaaaagaagtagtgaaatttaactgtgtaaagatgcacctgtctaaaaaaaaaaaaaaaagattataagggctagttgtttgtttgtttgagacggagtctcactctgtcgcacagtctggagcgcactggcacgatcttggctcagctcactgcaacctccgcctcccgggttgaagctagttttttaattatcatgtatccctcaaagtttgttgacgtgtttcttgaaaaatgatctttcaggcacctagtcggcaactgtcccccattcacattctcttactggaaattccaggagttgtgtgccagtccctgtttgatgcaagtcatcaaagtttactctctcagctaaaactgaccaaattctgtatttcttaaagtcgtaaaagagtaacaaataagattagaggaatacatagtgcctaaaggggcagtgaatttctagtacaaaaacgcgatttacagttccaagaatactgtatgggttgcaatgtgtccccctcaaagatatgttgaagcc

SEQ ID NO: 1329 - DNA, 4001 bp, Homo sapiens
tcaataaatgtgtattgtatagaattgactgaacttctctcactggcagccccctctatccaagtcacctacctcttttcgaaggtgggtgatgatcttgtgtggaactgagatgacctctccatgactggtccgaagggcaggcagagttcctgatattgagagggaagtataccaaccagacccttagctgcctagtcatacatagttgcaacacattcctgcctatttcttgcttctccccttgtacacacccttccttacccccaagggatactgggtacctgaagggctctgccaggggttgctgatcttgtgtaccttcagtggagcaccagtaaatctggcataggtctgcagggaaggaagcagaagtcagagaggcagagccatgtcccccacagtggtatcaagaagagaaataacatttattgaataccttatgtgccattccctatacttagtatcttagtctcgaaaaaaaagggggagtcactaccatttctattttacaaatggacaacacagggctcagagagattccggacatgtctgtgattacaggacagccaggaaaatcctttcctctatctcctctcttgccatctacctggtgaacatctatcctcagaagcttttcctaaccagtatccctcttcttggaagcactgataatgcccttctctttggcagtatctgtggtctgttcctactttaacttatatgtgaatattttattatatttatttgcttacctatctgcctttctgtaaactcgaagggaggaaccaaattttattcatctttgcctggcaatgtttaatatttggaagaaatctaatagatcctctttaaagcaaggagtcaatgaataaatgaagcaaaggaagtctgattgctaagctctttatacaaagcctggctgtgagtcgtttggtctaacaaacaatagcctcagtaaatgctgttaagtgaggaggaagaggagaagggggctgaggagaaggcaggaattccaagctagagtaggtccctgagacagtccagcctagtaaacctccgaatggagaaaaaaaatgcccaaagagaaaggatctccgcaaggtcacacagccagtgaatggatgagcaaggactagaacccatcacctgaactcccaaccaggcgtcttttcattgctgcattaagcctagaaaactacagcatagggcactgaggccatatcggccacgtacgctctttgactgcctcagtttcccccactgcgcccgtgctgagtagccctggcaaggtttggatgcttggctagttcggccccctccccagtcatcagggcacagcagagggcgccggcgccacccctcaccagcacggccaggctgtccaggtccactgacggcagcccccagccccctgaccagcagaacagctccatgggcgccgccatcttgcccaccctctgtcccggaaacacttccttgtgtgcttctgccctcccctgcctgggcccgccccccgccaccgcccctccgatcgttgcggtcagggggcctggggagatccccggggaggcgaggcttcttctggcccgactggcagctgaactgcgggggactgggccgcgggcctcgggggagggcggccgccggcccatccagaggtggcccacgtagcgggacagcgctgtcggcccggcgcgcctcggagagtcacggcgcctcgtccaagtggagccccgaacccctgaaggcgcggcaggctctggagagcggggtcttgtgcgcctgggccaggtctgggggctcttgccaaactgcacgtggcctgtactgctccagggccccttggggctcgtccccgagcggggactgcgggggggtcccccgagcagcatgttttccacagcgcgttatgtttggagcgggccctgcgccgcctgtcgccatggaaacaaaacaggggcggtggcggcggccggagcggaggccgggctggggcttgggtgggggaggggaagagaggctcgcaggctgtcgcttaggtgacgggaactcaggcgcccctctgcttcatccgggtcacggcccgtccgctagtacccacagtgttccacagtctggtccttggctcctcgcctgtacccctggtcttctgcgcctgtccctggtgtccctttcctcttttttggtttcttcactctgacctcactgaccactgctttagattctcccttcagttcccgtcagacgcttccagactcccaagctttcctacgaatgagggaaaatggagaaacaggcacttgtcaggggaccccccaccctaataaagagcacttgctccgccagaacagcaaaattcatgccatgtgggcatccctgggcactatagcaagctagttgcggccactcccttggcatcctttcctgccagctgtggaataatgcccactgtctagcactgcccctgccaggggttcttgccttccacaatcgtggcttccagaaaacagtggcattcggtagcgctgtgtgccgagacccccaacaatgatgactgcggagagggaggcacctgggggaggatcattagggagaggtagaaagcagggaggcctccaggattctttcccagtgcccctggttcccagagctgatgatgcctccagggtgattggcagctctttgtttcagccccccctcacccgcctgctggccccccctccaattctgtccctccgccccccggctcctgctctctccgcctagccttttcccctcccagctgcctgcctgccaggggtagtgagccggctgagaggcatggagacgcaggaacttcggggggccctggctcttctcctcctttgctttttcacatctgccagtcaggatctgcagggtaagcctgtctccatcctcttagaccgctctctgcttcttccccatttgccctcagcccaagtagcagagaacatgtgggcaaggggagaggggaagagtccagaaattgagccagaggaaaacttaagactgcctagagttggtgaaattatggcctggtggagaggagtgggcaccggagagtagtgggggagctggaacaggacagggtcaggcatgaggccagggcagaggactcaggaactggatgctcaggctgcctggctggggtggttcctgagcatctgtaggcaccctagggtctgggagagcagcctgaaggtgggcgtactgtaggtccctgggcttcgtccccctgggctcctggctgcccaaggacagggcgggggtggggaccaagaagcctgggctctcccggaggtctggtggtgggatgggccgatggatgtgggagaggtagctggagcagatgacacaggcatagattctttactggctggagggaaaaccacagattggccaggacacaggaggcagaggagctgggtcctacattcccgtgggagatagcccagatggtgggagggttagagtcctcagtgggcagctgttcttatccagagcgagtgtgctgcgcccctaggatgggaggaggggaactagggtgtggaacgagccaaacccaggagtggaaagagaagctgccttccatttctacgttgtggacaccaggtgccactcctgtgggggatcagcacagcatctcctttgcgccacctggtgggggcatctcaaatttgtggggtgctgtttctgtgtttccaagtgagtctcaaacctgcaggttcctggaaggtagtaataggcaataatggggaaaggaaggcacagtgcctctgtcctctgagagcaacaagggttgaggtttttttttgttttcgttttgtctttttgagatggagtttcactcttgttgcccaggctggagtgcaatggcgcgatctcggctcactgcaacctccacctctcaggttcaagcgagtctcctgcctcagcctcctgagtagctgggattacaggtgcccgccaccacgccc

SEQ ID NO: 1330 - DNA, 4001 bp, Homo sapiens
gggctgggggggcggtggagcccggggccggcaggggtccggggccgaggtgacaccgtgggctgggggggcggtggagcccggggccggcctggtgtccggggccgaggtgacaccgtgggcttggggggcggtggagcccggggccggcctggtgtccggggccgaggtgacaccgtgggctgcgggcgcggtggagcccggggcgggcctggtgtccggggccgaggtgacaccgtgggctgggggggcggtggagcccggggcgggcctggtgtccggggccgaggtgacaccgtgggctgggggggcggtggagcccggggccggcctggtgtccggggccgaggtgacaccgtgggcttggggggcggtggagcccggggccggcctggtgtccggggccgaggtgacaccgtgggctgcgggcgcggtggagcccgggtccgtccttctctccgagggccgaggtgacatcgtagactgcgggcgcggtggagcccgggtccggcctgctctccgaggccgaggtgacaccgtagactgggggggcggtggagcccggggccggcctggtgtccggggccgaggtgacaccgtgggctgggggggcggtggagcccggaaccggcctggtgtccggggccgaggtgacaccgtgggctgggggggcggtggagcccggggccggcctggtgtccggggccgaggtgacaccgtgggcttggggggcggtggagcccgggaccgacctggtgtccggggccgaggtgacaccgtgggctgcgggcgcggtggagcccggggcggacctggtgtccggggccgaggtgacaccgtgggctgggggggcggtggagcccggggcgggcctggtgtccggggccgaggtgacaccgtgggctgggggggcggtggagcccggggccggcctggtgtccggggccgaggtgacaccgtgggcttggggggcggtggagcccggggccggcctggtgtccggggccgaggtgacaccgtgggctgggggggcggtggagcccggggctggcttgttgtccggggctgaggtgacatcgtgggctggcggggtggtggagcccagggctggcctggtgactgggaccgaggtgacatcctgtccccaggtggcagctgaacctgaagctggttccgtggccggggccagagtgacatcctgtccctgagtggtggaggagcctgaaccggggctgtggctggagagtacgctgctggtcatactcacagcattcttctcagtagagctgggcactgaacttctctgggtagccgaagtctccttttctccacctggggtagagcttgcatgaccagaacccgtaacaactgttgcgggtttaggggctgtggtagctgtaagaagttaaagtcatagggttgggtctttatgaaggaaaaataagagcaagaagaaaatataagctctggccaccagagaaataataccaggaggactggggagtgggcagcctcagtaacccctgggttggccgcctccttccctgcagcagcctccttctctctgcccataggccttggctcatggcccctgcatttcttcccctcttaagccttccctctccctactctcttccccctagacttctctacaggacatttgcttgcccctggtacccactctcagggttgggggcaactcttctcagcctgtccttagcctctccctccttctggcacagacagggcagcctctgtctgcaattcttaccttaacttcatggtgccatctgccagggagcaaaacccacagaaagaccacgaagaccacctaagcagggcagcccactccccacctcgtgcccctcacctgtaagcactgtgaggagcagcagcaggaagaaaggagactgggtgcccggtgtcatggtggtggtgaaatgggtggggagggggcagaacagattcaggcaggcgctggctgcttgagaggtggagcgggcacaggcgcctaccgctttataccggtccccccactccccgcccgcccgccctaggcacagccggagcaggtgacaggtgacaaaaccccgccccctcccctacctcctacctcttcctcctcctccccaaccattcctgggtagggtacaagggctctaatcgctcaaccccctgactacccgtttgttctccagctggcctccccctttcaccaaccactccctggctccgggggaggggggaggggcagtctggaacttggggcccctgggctctagttttagcctcagggcaacaactaacgtggggatggggaacaaagccagctaggtcgaggtcctgtacagcaaggtcgggaagcccacccctaggtctcccactccacttccccgccctccccgggtccactgaagcagagcggggccgagaaataagagggctggataatgagtggactaggtgctagttttgggctccctccccccaccacttcccggaatagccccacccttctaaccgctccctgtcccgttccacacgcagttctaccctgaaacccacagtccccgccccagccggactttccagcagcctgggttccctccttggagaaagccaaggagggagtgggggaagaaatttccacttaagggagtaaacctgggctccgatgaaccctagggtccttccttgccactctccaccactggccaggagctcctcccgccctctagtggtcaccgggagccttgcggggctgggccgcgcaagctgaggggccgctcggaccgggcggagaggagtaagggcagcgctgcctaagtgaggcagcgagagcccgcgagagggaagcagggcccgggagagaagggtcactgccgtggccagggagggaggaacgcacagcatggtggacggctgggagctttaggagggggcactccgggacgcgtggtggtggcgtctggaggaaatggagctaagcgggtggggtcctgaggtatgtggaaggggcaccgaggtatgtgggagaggacgttggaacgtgggcgggggagttggacacgttctgtgtgggccgttatgtacttaagaggcagatcgggcgtggcacggtggctcacgcccgtaatcccaacactttggaaggccgaggcgagtggatcacaaggtcaggggttcaagaccagcctggccaagatggtgaaacctcgtctctactaaaaactacaaaaattagccgagcgtggtggcgggcgctgtaaccccagctactcaggaggctgaggcaggagaatcgcttgaacccgggaggcggaggttgcagtgagccgagatcgcgccattgcactccagcctgggcgacagagcaagactccgtctcaaaacaaaaaaggggggggcagagagtaggtggggtgacagaatgggatttacggacacagaactatcctttggggagcagagtggtattggggacaggtaggcacgtagcggggggcaaaagcacacgtgaggtgcgtaatgcgcgacagccaagaggtgtgtgcggcagcagtgcacgaggggaggaagctatcccaggccgcggcagcacgtggaacttgggtcccgcagtcgcaggctgcgctctaggccgacggaagcagttccgcctgtattcagaaaacagttctcagccccaaagacacaggttggaaagaacactttaaaaacacttcggcgaggcacgggattggagcgcatcagatcagcaggcgagagaccacagctctcgcccgcgcgccgcgcggcgcccgaggcgcagctttgtgtgcggcgagaccctggggcaggcgctgggcggggtggggacatctgacgtcagcgcgcccgggagcgcgggccggggaggcggggagccccccaactcgcaggccggagaaaacacgagtagctaggtgggcggccccaaacctcaactcccggcattgccaagcaacagccattcagttcgg

SEQ ID NO: 1331 - DNA, 4001 bp, Homo sapiens
aagttagtcaggtttaggaatccatctttcatataaacatcaaattaggttaggcccttagctcttgtattgtgaaacttcagccaaaaagaacccacaaacatttactgagcatctaccacttgccaagtactgtgttagaagctagaggaaagagaatggatgaataagaccctgtctctgacctaaagaggtccatctctctggaccagtcagatagtcacaataaagcaatgtcaatcagattaaaatcctacccttggaatcaaaagacctaaatttaagtttcaagctgactagctgtatggcctttcctccaaatctcaattttctgatttgcaatgtggtggtaactgtcattttatttacttcaaaaaattattgtgggccaggcgcagtggctcacgcctgtaatcccagcactttgggaggctgagacagagggatcacctgaagtcaggagttggagaccagcctggccaacatggcaaaaccccatctctactaaaaatacaaaaattagccaggcgtggtggcaggtacctgtaatcccagctactccggaggctgaggcaggaaaatcacttgaacgcgggaggcagaggttgcagtgagccaagatcgtgccattgcactccagcctgggcaacagagcgagactccgtctcaaaaaaaaaaagaaaaagaaaaagaaaagaaaaggagaggaaagaaaggaaaaaaaattattgttaagaaaaaaataaaatcaagatgaaaatgtggctgggcgcagtggctcacgcctttacatcccaacgcttcggagagccgaggcggggagatcacccgacgtcaggagctggagaccagcctggccaacatggtgaaaccctgtgtctactaaaatacaaaaaagttagctgggcgtggtaatcccagctactcgggaggctgaagcaggagaatcacttgaacccgggaggcaggggctgcagtgagcccagatcccgccactgcactccagcctgggcgacacagcaagactccatctcgaaaaaataaaaaataaaaataaatgcaaatgtgttgtgtaaaccgtaaagcacagttcagaaaaaagcgccatttataaaaatagttgtaatataaaaaggaagcgtctgtaaagcaaggagtggagtggttcagtaaatggatgtctgcacttgctgttccttccatctcccgctagatatctgcatgactcccctcatctcctcctaggctctgctcaaatgtcaccttatttaagataggagatccccctttctccagcattccatgtcctctctcccctaccttactctaaagcattgctcaccatctgttacaccgcctgatttacatgtttgctgtctagtcgtactaaaatggtatctccacgaggggatggactttcatctgttcgactcactgcctggagcatcgcaggtgttcaataaatatttttcgagtaaagtaatgaagtcaagattcattctgagtcataagagggacttgggagaaaaggagcggagcagccgttatcccgagcccgaatcctgcccctcgctcctccatctactggctggatgacacccttcagaggctgtttccttttttggacagtttccgacggtggggcggccaaggtgaatcatgggctccccagcacctgggacagagatgacccggctgaggccaggccggctccagcactgaccttgagctcttgggagacccgggccttctgccggtacacggagtacagggcggcggtgaccacagaggtggtgcccaggaggatgaactggcacagcgagggccgccctccgctctccatgacggcggcgagccccggtggccgactgtggcgccaaggataggcctggtgacccccgactctccacctccttccgaccaggaccgcacccccccggcctaacctgaccggaaactcgaaatcagtcgcccagcgatgacgcacgacgccggaaccggaagcggggcaaggggttgtagagggaaccggaaggtggggttgcccgggtgacaatcaagctgctgcggcctccagggaggtcctgtctccccagccgggtgtcggagagcgattggggagctgagcgaccacccaccgctccatggccgtccccttcgaaacacggcgcactggccatgactgactcgcccatcgccctggtttccgtccctctggtttcctggggttactgggctgtttgatgggttattccatgtcttcgccattagattggcaggaaataaaataattgtgtattaaactcttatgagtaatatacgtttaagtttcagagcaaactctcaagacttggaatttattctggccactttacagatgagaaaagtgaggccatagaggttagggaatgatgtgctcgaagtctagtgagtgctagagaggaattcacccaactccaaagccctcaactctaccccaggagggcagattatatcaccaaagtagccccttaatctgccatcaccacatagaacaacatatttattaaataataattacggctacgcttagtgcctattatgtgtcaggttcgaggcgggggaggttttgcaggcaccatcccactgaaccttcacaacacagctataatgcagattaccgataaagaaactgaggctcaggtaagtaacttgctcaaggttatacagctaaaagcaataggtatggccataaaacccaggggatccttctcagagactgttccctgatctctgtaatgcatctcctttctaaaataatcggagataacccaaatctttcttctaaacatcagcattcattgagctatctcctacaggttatgctttaatttttttatttgtttgagacagggtcttgctctgtcgcccaggctggagtgcagtggtgcaatcatagctccctgcagcctcccaccccgcaatcctcccacctcagcctccccagtagttaggactaaagatgcatgccacccccggctaattttttaaaaaattttttgtagagtcaaggtctcactatgttggccatgctggtctggaactcctgggctcaagtgatcctcctgacttgccttcccaaagtgctgggattacaggcgtgagtcaccacaccaagcctaaattcttgtattttcatgtttacatgtataagtatttatgtagggagaatttctagaggtagaattgctaggtcaatgggtgttggcaccattaatcttgatcaacattgtctaatttttctccataatgtccaattttacatttatgagcaatatgtgggaatttcttttctttttttctggagacagagtctcgctctgtagcccaggctggagtgcagtggcgtgatctcggctcagtgcaacttccgcctcccaagttaagtgattctcgtgcctcagcctcccaagtagctgggactacaggcgtgcaccaccacgcctagctaatttttgtatttttggtagagacaaggtttcaccatattggccagactggtcttgaactcctgacctcaagtgattcgcccgccttggcctcccaaagtattgggattacaggagtaagccactgcgcctggccgggaatctcttttcacccacacttttgctaacaaactttttgacaagttctattaaaaatttaaggttagacctcattttaagtttgtgtgtgtgtgtgtttaccaaattcatgatcatcccttgggttgaaaatcatcaaagatatctcacagtgttaacaatctaatgattctagccctattcttatagaaagtaattcttatttgaccccaattgtatttaaggaatggagttaaaaactgttatatataacaggctgatttaataaagaaattttacttttgtggagcagtctacagtttttagatacatcatctgtagtttttagacacatcttacctagtggcctgattcaatgtatgtaaaacgtgtccc

SEQ ID NO: 1332 - DNA, 4001 bp, Homo sapiens
aaaaaaaagagtgccaaggtggggtttaatgttgcaattttaaagactgtggtcaaggtagacccaaagcattctaagtgagtgcaaaggccccaaggagggtgcctggtatgtctgtggtacagtaagtaggtcaatgtggttagaatggaatgagatgggactgagtggtagaagaggtcagagaagtaaaccagatgaggtggggagaggagggtcacaaagtaccttataggccattggagggatttggctgccacacccttgctcttagaaggcagtcctcttactacagccttgcaggtccagtgatccgggcaccatccgcctcatcccctcactatgctctagccaaggttgactgaatttagttgcttaaacacctcaagtgtgtctgcccaccttggggcctcacacaatccatttcctctgtttggactcttttatgcttttacctaacaccttatcatttttcaagtcttgactgaaatgtccaaatcaggtcccctcatcttatcctatcacatatttctgccttgtagctcttacctaatgtaattttacattactttgattctttccatcagtgtgtacttcctgaatttgactgtaaaaaacgacttgagtgcaaggactgattctcttgttgattggtgtgtgtccaaagtcagtgccaggtaaactgtacacaatagatacctgttaaatgaattaatgggatgggggatagtcaaaagagtttcccttttttaggataggagaaatccaaagagtttttttatttttgttttttttttgtttgtttgttttgtttttagagacagtgtgtccctcactttgctgctctgccactcaggctggagtgcaataagaacatggctcactgcagcctcgacctcctgggctcaagccatcctctcacctcagcctcctgtagctgggactacaggtgcgcaccaccatgcccaactaatttttaattttctttttgtagagacaaggtttcactatgttgcccaggctagtcttgaactcctagggtcaagcgatcctcccaccttggcctcctaagatgattacaggccataagccactgcgcccggcccaagcagttctgaataatgatgaaatgggctcagttgagagaagctgaagattaactataaacaatgagtaacaaaggagcactggaaggcagaggtggatgggaatcgtagtgtttacggagggactagtctccaataggaattttttttttttttttttttttgagacggagtttcgctcttgttgcctaggctgaagtgcaaaatggcgtgatctcggctcaccgcaacctctgcctcccaggttcaagcgattctcctgcctcagcctcccaagtagtgggattacaggcgcccgcaccatacccagctaattttttttgtacttttagtagagacggggtttcaccatgttggccaggctggttttgaactccggacctcaggtaatccgcccgcctcggcctcccaaagtgctgggattacaggcgtgagccaccgcgcccggcctaggaacctctttcaaattcaatcaccctctaggtcgactataccgcctagctgcttcacaatttgtcccttcctcgccatccatactgccagccttaattcaagttcacattatcacttgattggattattacaaaagcttccctaccaatcggtcgctcttacaccctgggcagcctcctccgatggcccactccccgcctctttcactttctggagatcactgagctctccatcctctctgggaatttaccgatgcccagaacgcccttctttcccccacacgaccctctcctagtctaactcctgggcgtgctttaagctcagctcaggcagcgtcaccttctctggaaagcccaaacccagccaccccactacccgctacccgcggcccacgctgatgaagacagcagaacacggaggccccgcgttcccgccgcgagagcaggagagaaagattacctcccgcgagctctagcgcgcccggctttccggcgcactccagggggcgtggctcgggtccacccgggctgcgagccggcagcacaggccaataggcaattagcgcgcgccaggctgccttccccgcgccggacccgggacgtctgaacggaagttcgacccatcggcgacccgacggcgagaccccgccccatccccgactgcctgaaccgcgccaggagacggaccgcaagtccagcgtacccacagacgactcaggcgggagacgagcggtgtcatggccgccgacagtgacgatggcgcagtttcagctcccgcagcttccgacggtgagcggcttcccagaggtagccttcaaagcctctgcgctctgggagaggggaaggcctcgggctcatagttctagaggctcctcaagcttcagaggactgctccttccgcctgaactagccacgaggagactacaagttccgttgtacaccgcggctccggctgcaaaagcctggagcgttgggagcatggggctgatggaggcatggcgggagatgtagtctggagctcataacggttagtagtaatagttgtgattcagttcagtggagtggattgagcgttgtgatccaaaggaaggtaggacgtattgggagctctggtgtggggcactgccaggctctggggcttactgggagctgttgcttgtggcgctggggcaccatgagaacagtagtatggatccctgtgggatattaagggagctgagatcctcaagccctacaaaatgtttcctgcaggacatgggaaaaaagaatcaaaggtcgtctagtccaactttctcctctacagattgtgaaagcgaggtgggaagtaatttacccaggctcatacaagccagtagaagactcaggcttcctctccccaaattcagggcattctccactccaaggcctgtgtgtagaacacgtgggttacaaaggcttgtgggaaaagctaccaatggaaactaccccccttaccaccatcaccgtggcctagcttggtgtctgttcccctgggctctttccttaagcatgaacatccatcaccctcctaacccccaggtggtgtcagcaaaagcacaacatctggggaggagctagtagtccaggttcccgtagtggatgtgcaaagcaacaacttcaaggagatgtggccatccctcctgctagccataaagacagctaatttcgtggctgtggacacggtgagagttgggaaacaaggagggcaggtggttgtgaaggggctggtgctagaggcctgtcacaactctccctttacctacccacaggagctgagtgggcttggggacaggaagagtttgctgaaccagtaagtataagcccttttctctttagtgccagccctcaactgtggagtgggggggtcacagacctgggtggtttgggtccttcataaggctaactcctagccacagcaacccccatacccaaccccaaggtgcattgaggaacgttacaaggccgtgtgtcatgctgccaggacccgttctatcctttccctgggcctcgcctgcttcaagcggcagccagacaaggtatgagctgatctcaccccaatcctaggtgtggctgtggggtggagggtagagagattctagggaacatcagataggaagcatttctctcccaaatctttttttttgacttgatagtttttttttttttatttgaataggtttatggggaacaggtggtgtttggttaaatgagtaagttctttagtggcaatttctgagattttggtgcacctatcacccagtgtacactgtgcccaatgcgtagtcttttatccctcacctgcctccatcctttcccccctgagtccccagagtccattgtatcattcttaagcttttgcatcctcctagcttggctctctgaaatcttgatatagcagacttctctttctcccagggtgaacatt

SEQ ID NO: 1333 - DNA, 4001 bp, Homo sapiens
gggactgagtggtagaagaggtcagagaagtaaaccagatgaggtggggagaggagggtcacaaagtaccttataggccattggagggatttggctgccacacccttgctcttagaaggcagtcctcttactacagccttgcaggtccagtgatccgggcaccatccgcctcatcccctcactatgctctagccaaggttgactgaatttagttgcttaaacacctcaagtgtgtctgcccaccttggggcctcacacaatccatttcctctgtttggactcttttatgcttttacctaacaccttatcatttttcaagtcttgactgaaatgtccaaatcaggtcccctcatcttatcctatcacatatttctgccttgtagctcttacctaatgtaattttacattactttgattctttccatcagtgtgtacttcctgaatttgactgtaaaaaacgacttgagtgcaaggactgattctcttgttgattggtgtgtgtccaaagtcagtgccaggtaaactgtacacaatagatacctgttaaatgaattaatgggatgggggatagtcaaaagagtttcccttttttaggataggagaaatccaaagagtttttttatttttgttttttttttgtttgtttgttttgtttttagagacagtgtgtccctcactttgctgctctgccactcaggctggagtgcaataagaacatggctcactgcagcctcgacctcctgggctcaagccatcctctcacctcagcctcctgtagctgggactacaggtgcgcaccaccatgcccaactaatttttaattttctttttgtagagacaaggtttcactatgttgcccaggctagtcttgaactcctagggtcaagcgatcctcccaccttggcctcctaagatgattacaggccataagccactgcgcccggcccaagcagttctgaataatgatgaaatgggctcagttgagagaagctgaagattaactataaacaatgagtaacaaaggagcactggaaggcagaggtggatgggaatcgtagtgtttacggagggactagtctccaataggaattttttttttttttttttttttgagacggagtttcgctcttgttgcctaggctgaagtgcaaaatggcgtgatctcggctcaccgcaacctctgcctcccaggttcaagcgattctcctgcctcagcctcccaagtagtgggattacaggcgcccgcaccatacccagctaattttttttgtacttttagtagagacggggtttcaccatgttggccaggctggttttgaactccggacctcaggtaatccgcccgcctcggcctcccaaagtgctgggattacaggcgtgagccaccgcgcccggcctaggaacctctttcaaattcaatcaccctctaggtcgactataccgcctagctgcttcacaatttgtcccttcctcgccatccatactgccagccttaattcaagttcacattatcacttgattggattattacaaaagcttccctaccaatcggtcgctcttacaccctgggcagcctcctccgatggcccactccccgcctctttcactttctggagatcactgagctctccatcctctctgggaatttaccgatgcccagaacgcccttctttcccccacacgaccctctcctagtctaactcctgggcgtgctttaagctcagctcaggcagcgtcaccttctctggaaagcccaaacccagccaccccactacccgctacccgcggcccacgctgatgaagacagcagaacacggaggccccgcgttcccgccgcgagagcaggagagaaagattacctcccgcgagctctagcgcgcccggctttccggcgcactccagggggcgtggctcgggtccacccgggctgcgagccggcagcacaggccaataggcaattagcgcgcgccaggctgccttccccgcgccggacccgggacgtctgaacggaagttcgacccatcggcgacccgacggcgagaccccgccccatccccgactgcctgaaccgcgccaggagacggaccgcaagtccagcgtacccacagacgactcaggcgggagacgagcggtgtcatggccgccgacagtgacgatggcgcagtttcagctcccgcagcttccgacggtgagcggcttcccagaggtagccttcaaagcctctgcgctctgggagaggggaaggcctcgggctcatagttctagaggctcctcaagcttcagaggactgctccttccgcctgaactagccacgaggagactacaagttccgttgtacaccgcggctccggctgcaaaagcctggagcgttgggagcatggggctgatggaggcatggcgggagatgtagtctggagctcataacggttagtagtaatagttgtgattcagttcagtggagtggattgagcgttgtgatccaaaggaaggtaggacgtattgggagctctggtgtggggcactgccaggctctggggcttactgggagctgttgcttgtggcgctggggcaccatgagaacagtagtatggatccctgtgggatattaagggagctgagatcctcaagccctacaaaatgtttcctgcaggacatgggaaaaaagaatcaaaggtcgtctagtccaactttctcctctacagattgtgaaagcgaggtgggaagtaatttacccaggctcatacaagccagtagaagactcaggcttcctctccccaaattcagggcattctccactccaaggcctgtgtgtagaacacgtgggttacaaaggcttgtgggaaaagctaccaatggaaactaccccccttaccaccatcaccgtggcctagcttggtgtctgttcccctgggctctttccttaagcatgaacatccatcaccctcctaacccccaggtggtgtcagcaaaagcacaacatctggggaggagctagtagtccaggttcccgtagtggatgtgcaaagcaacaacttcaaggagatgtggccatccctcctgctagccataaagacagctaatttcgtggctgtggacacggtgagagttgggaaacaaggagggcaggtggttgtgaaggggctggtgctagaggcctgtcacaactctccctttacctacccacaggagctgagtgggcttggggacaggaagagtttgctgaaccagtaagtataagcccttttctctttagtgccagccctcaactgtggagtgggggggtcacagacctgggtggtttgggtccttcataaggctaactcctagccacagcaacccccatacccaaccccaaggtgcattgaggaacgttacaaggccgtgtgtcatgctgccaggacccgttctatcctttccctgggcctcgcctgcttcaagcggcagccagacaaggtatgagctgatctcaccccaatcctaggtgtggctgtggggtggagggtagagagattctagggaacatcagataggaagcatttctctcccaaatctttttttttgacttgatagtttttttttttttatttgaataggtttatggggaacaggtggtgtttggttaaatgagtaagttctttagtggcaatttctgagattttggtgcacctatcacccagtgtacactgtgcccaatgcgtagtcttttatccctcacctgcctccatcctttcccccctgagtccccagagtccattgtatcattcttaagcttttgcatcctcctagcttggctctctgaaatcttgatatagcagacttctctttctcccagggtgaacattcctatctggctcaagtgttcaatctcactctgctgtgcatggaggagtatgtcatagaaccaaagtctgtgcagttcctgatacagcatggcttcaacttcaaccagcagtatgcccaaggcatcccctaccataagggcaatgacaaggtaggcctct

SEQ ID NO: 1334 - DNA, 4001 bp, Homo sapiens
tgggactgagtggtagaagaggtcagagaagtaaaccagatgaggtggggagaggagggtcacaaagtaccttataggccattggagggatttggctgccacacccttgctcttagaaggcagtcctcttactacagccttgcaggtccagtgatccgggcaccatccgcctcatcccctcactatgctctagccaaggttgactgaatttagttgcttaaacacctcaagtgtgtctgcccaccttggggcctcacacaatccatttcctctgtttggactcttttatgcttttacctaacaccttatcatttttcaagtcttgactgaaatgtccaaatcaggtcccctcatcttatcctatcacatatttctgccttgtagctcttacctaatgtaattttacattactttgattctttccatcagtgtgtacttcctgaatttgactgtaaaaaacgacttgagtgcaaggactgattctcttgttgattggtgtgtgtccaaagtcagtgccaggtaaactgtacacaatagatacctgttaaatgaattaatgggatgggggatagtcaaaagagtttcccttttttaggataggagaaatccaaagagtttttttatttttgttttttttttgtttgtttgttttgtttttagagacagtgtgtccctcactttgctgctctgccactcaggctggagtgcaataagaacatggctcactgcagcctcgacctcctgggctcaagccatcctctcacctcagcctcctgtagctgggactacaggtgcgcaccaccatgcccaactaatttttaattttctttttgtagagacaaggtttcactatgttgcccaggctagtcttgaactcctagggtcaagcgatcctcccaccttggcctcctaagatgattacaggccataagccactgcgcccggcccaagcagttctgaataatgatgaaatgggctcagttgagagaagctgaagattaactataaacaatgagtaacaaaggagcactggaaggcagaggtggatgggaatcgtagtgtttacggagggactagtctccaataggaattttttttttttttttttttttgagacggagtttcgctcttgttgcctaggctgaagtgcaaaatggcgtgatctcggctcaccgcaacctctgcctcccaggttcaagcgattctcctgcctcagcctcccaagtagtgggattacaggcgcccgcaccatacccagctaattttttttgtacttttagtagagacggggtttcaccatgttggccaggctggttttgaactccggacctcaggtaatccgcccgcctcggcctcccaaagtgctgggattacaggcgtgagccaccgcgcccggcctaggaacctctttcaaattcaatcaccctctaggtcgactataccgcctagctgcttcacaatttgtcccttcctcgccatccatactgccagccttaattcaagttcacattatcacttgattggattattacaaaagcttccctaccaatcggtcgctcttacaccctgggcagcctcctccgatggcccactccccgcctctttcactttctggagatcactgagctctccatcctctctgggaatttaccgatgcccagaacgcccttctttcccccacacgaccctctcctagtctaactcctgggcgtgctttaagctcagctcaggcagcgtcaccttctctggaaagcccaaacccagccaccccactacccgctacccgcggcccacgctgatgaagacagcagaacacggaggccccgcgttcccgccgcgagagcaggagagaaagattacctcccgcgagctctagcgcgcccggctttccggcgcactccagggggcgtggctcgggtccacccgggctgcgagccggcagcacaggccaataggcaattagcgcgcgccaggctgccttccccgcgccggacccgggacgtctgaacggaagttcgacccatcggcgacccgacggcgagaccccgccccatccccgactgcctgaaccgcgccaggagacggaccgcaagtccagcgtacccacagacgactcaggcgggagacgagcggtgtcatggccgccgacagtgacgatggcgcagtttcagctcccgcagcttccgacggtgagcggcttcccagaggtagccttcaaagcctctgcgctctgggagaggggaaggcctcgggctcatagttctagaggctcctcaagcttcagaggactgctccttccgcctgaactagccacgaggagactacaagttccgttgtacaccgcggctccggctgcaaaagcctggagcgttgggagcatggggctgatggaggcatggcgggagatgtagtctggagctcataacggttagtagtaatagttgtgattcagttcagtggagtggattgagcgttgtgatccaaaggaaggtaggacgtattgggagctctggtgtggggcactgccaggctctggggcttactgggagctgttgcttgtggcgctggggcaccatgagaacagtagtatggatccctgtgggatattaagggagctgagatcctcaagccctacaaaatgtttcctgcaggacatgggaaaaaagaatcaaaggtcgtctagtccaactttctcctctacagattgtgaaagcgaggtgggaagtaatttacccaggctcatacaagccagtagaagactcaggcttcctctccccaaattcagggcattctccactccaaggcctgtgtgtagaacacgtgggttacaaaggcttgtgggaaaagctaccaatggaaactaccccccttaccaccatcaccgtggcctagcttggtgtctgttcccctgggctctttccttaagcatgaacatccatcaccctcctaacccccaggtggtgtcagcaaaagcacaacatctggggaggagctagtagtccaggttcccgtagtggatgtgcaaagcaacaacttcaaggagatgtggccatccctcctgctagccataaagacagctaatttcgtggctgtggacacggtgagagttgggaaacaaggagggcaggtggttgtgaaggggctggtgctagaggcctgtcacaactctccctttacctacccacaggagctgagtgggcttggggacaggaagagtttgctgaaccagtaagtataagcccttttctctttagtgccagccctcaactgtggagtgggggggtcacagacctgggtggtttgggtccttcataaggctaactcctagccacagcaacccccatacccaaccccaaggtgcattgaggaacgttacaaggccgtgtgtcatgctgccaggacccgttctatcctttccctgggcctcgcctgcttcaagcggcagccagacaaggtatgagctgatctcaccccaatcctaggtgtggctgtggggtggagggtagagagattctagggaacatcagataggaagcatttctctcccaaatctttttttttgacttgatagtttttttttttttatttgaataggtttatggggaacaggtggtgtttggttaaatgagtaagttctttagtggcaatttctgagattttggtgcacctatcacccagtgtacactgtgcccaatgcgtagtcttttatccctcacctgcctccatcctttcccccctgagtccccagagtccattgtatcattcttaagcttttgcatcctcctagcttggctctctgaaatcttgatatagcagacttctctttctcccagggtgaacattcctatctggctcaagtgttcaatctcactctgctgtgcatggaggagtatgtcatagaaccaaagtctgtgcagttcctgatacagcatggcttcaacttcaaccagcagtatgcccaaggcatcccctaccataagggcaatgacaaggtaggcctc

SEQ ID NO: 1335 - DNA, 4001 bp, Homo sapiens
ttatcctatcacatatttctgccttgtagctcttacctaatgtaattttacattactttgattctttccatcagtgtgtacttcctgaatttgactgtaaaaaacgacttgagtgcaaggactgattctcttgttgattggtgtgtgtccaaagtcagtgccaggtaaactgtacacaatagatacctgttaaatgaattaatgggatgggggatagtcaaaagagtttcccttttttaggataggagaaatccaaagagtttttttatttttgttttttttttgtttgtttgttttgtttttagagacagtgtgtccctcactttgctgctctgccactcaggctggagtgcaataagaacatggctcactgcagcctcgacctcctgggctcaagccatcctctcacctcagcctcctgtagctgggactacaggtgcgcaccaccatgcccaactaatttttaattttctttttgtagagacaaggtttcactatgttgcccaggctagtcttgaactcctagggtcaagcgatcctcccaccttggcctcctaagatgattacaggccataagccactgcgcccggcccaagcagttctgaataatgatgaaatgggctcagttgagagaagctgaagattaactataaacaatgagtaacaaaggagcactggaaggcagaggtggatgggaatcgtagtgtttacggagggactagtctccaataggaattttttttttttttttttttttgagacggagtttcgctcttgttgcctaggctgaagtgcaaaatggcgtgatctcggctcaccgcaacctctgcctcccaggttcaagcgattctcctgcctcagcctcccaagtagtgggattacaggcgcccgcaccatacccagctaattttttttgtacttttagtagagacggggtttcaccatgttggccaggctggttttgaactccggacctcaggtaatccgcccgcctcggcctcccaaagtgctgggattacaggcgtgagccaccgcgcccggcctaggaacctctttcaaattcaatcaccctctaggtcgactataccgcctagctgcttcacaatttgtcccttcctcgccatccatactgccagccttaattcaagttcacattatcacttgattggattattacaaaagcttccctaccaatcggtcgctcttacaccctgggcagcctcctccgatggcccactccccgcctctttcactttctggagatcactgagctctccatcctctctgggaatttaccgatgcccagaacgcccttctttcccccacacgaccctctcctagtctaactcctgggcgtgctttaagctcagctcaggcagcgtcaccttctctggaaagcccaaacccagccaccccactacccgctacccgcggcccacgctgatgaagacagcagaacacggaggccccgcgttcccgccgcgagagcaggagagaaagattacctcccgcgagctctagcgcgcccggctttccggcgcactccagggggcgtggctcgggtccacccgggctgcgagccggcagcacaggccaataggcaattagcgcgcgccaggctgccttccccgcgccggacccgggacgtctgaacggaagttcgacccatcggcgacccgacggcgagaccccgccccatccccgactgcctgaaccgcgccaggagacggaccgcaagtccagcgtacccacagacgactcaggcgggagacgagcggtgtcatggccgccgacagtgacgatggcgcagtttcagctcccgcagcttccgacggtgagcggcttcccagaggtagccttcaaagcctctgcgctctgggagaggggaaggcctcgggctcatagttctagaggctcctcaagcttcagaggactgctccttccgcctgaactagccacgaggagactacaagttccgttgtacaccgcggctccggctgcaaaagcctggagcgttgggagcatggggctgatggaggcatggcgggagatgtagtctggagctcataacggttagtagtaatagttgtgattcagttcagtggagtggattgagcgttgtgatccaaaggaaggtaggacgtattgggagctctggtgtggggcactgccaggctctggggcttactgggagctgttgcttgtggcgctggggcaccatgagaacagtagtatggatccctgtgggatattaagggagctgagatcctcaagccctacaaaatgtttcctgcaggacatgggaaaaaagaatcaaaggtcgtctagtccaactttctcctctacagattgtgaaagcgaggtgggaagtaatttacccaggctcatacaagccagtagaagactcaggcttcctctccccaaattcagggcattctccactccaaggcctgtgtgtagaacacgtgggttacaaaggcttgtgggaaaagctaccaatggaaactaccccccttaccaccatcaccgtggcctagcttggtgtctgttcccctgggctctttccttaagcatgaacatccatcaccctcctaacccccaggtggtgtcagcaaaagcacaacatctggggaggagctagtagtccaggttcccgtagtggatgtgcaaagcaacaacttcaaggagatgtggccatccctcctgctagccataaagacagctaatttcgtggctgtggacacggtgagagttgggaaacaaggagggcaggtggttgtgaaggggctggtgctagaggcctgtcacaactctccctttacctacccacaggagctgagtgggcttggggacaggaagagtttgctgaaccagtaagtataagcccttttctctttagtgccagccctcaactgtggagtgggggggtcacagacctgggtggtttgggtccttcataaggctaactcctagccacagcaacccccatacccaaccccaaggtgcattgaggaacgttacaaggccgtgtgtcatgctgccaggacccgttctatcctttccctgggcctcgcctgcttcaagcggcagccagacaaggtatgagctgatctcaccccaatcctaggtgtggctgtggggtggagggtagagagattctagggaacatcagataggaagcatttctctcccaaatctttttttttgacttgatagtttttttttttttatttgaataggtttatggggaacaggtggtgtttggttaaatgagtaagttctttagtggcaatttctgagattttggtgcacctatcacccagtgtacactgtgcccaatgcgtagtcttttatccctcacctgcctccatcctttcccccctgagtccccagagtccattgtatcattcttaagcttttgcatcctcctagcttggctctctgaaatcttgatatagcagacttctctttctcccagggtgaacattcctatctggctcaagtgttcaatctcactctgctgtgcatggaggagtatgtcatagaaccaaagtctgtgcagttcctgatacagcatggcttcaacttcaaccagcagtatgcccaaggcatcccctaccataagggcaatgacaaggtaggcctctagcctccctagccttgagtctgccctttctgtgactttatttcttcctaccctaggctggatgtctggggagaatctgcttcttagggagtatggggaatcactagtgacagggcttgggaaacaagactggtatgaggagggtgggcagcattgggtaaggtagagagagagcgttccaagtggggaagtctgggataagtgcccagcagaagaggctccctgggggactctgtcctcctcattgacccctttactttcatctagggtgatgagagccagagccagtcagtacggaccctattcctggagctaatccgagcccgccggcccctggtgctacacaatggcctta

SEQ ID NO: 1336 - DNA, 4001 bp, Homo sapiens
ccaagggtcctgatgagcaagggggaatcagtgggggaggggcagggcctgaggacccccgggggctgggcctggcaagataggaggggctgagggggagtgggggtgggcagctggggctggggtcactaacctgagtgcaggagaacagcagagcctggaaggagaggagtgagctggagaggccacccacagccccacccagccccgagaccccccacttggcccccagagtccctcctgtagtcccaaagtggatgctgtgacacccacttcagtgcagggaggacgcctctcacacagacctacatagccctccctgccaccgtgctgggctttggatggcacctgcccttgagtggggaagccagggcatgggcgtgggccagggccaggctccaagccagccggttctggggtgtgtgcttgtcaccggggccactccacctggctgcacccaagtcacccagagcaccaaggaggctggatctgtgggttcccccacgctccctccagggctgtgccccagcccccgagggtccttggaccctcagacgctggggaccccacaccacacctaaggctcagcgcagcccctgaggtgcttccgcagggcagaggcctgaaggctgaatgtgggtcgtgaccccggctgccgccccacaggcccgcgttgctgcttgagggactctcattgtcgtaggccgcctcggcatccactctgaatctaggctggactttctctgaccggaagcggggctgccacccgggacagtttccaattcacatcccccgtcctcgagctgatccacccagacgcccgccctacgcactgtcccctggtgaccaccccctgtgtccccacagaccccacgccccacatggactgtgcagctgcaccacggagtccccccacagtcagcgtggccccacggggctcgtgccgcttgccttaaacccaccagttaaaactcccccaccaggcatggtggctcacgcctgtaatcccagcactttgggaggccaaggcaggtggatcacctgaggtcaggaattcaagaccagcctggccaatatgaaaaaccccatctgtactaaaaatacaaaaaattagccggacggggtggtagtgggcgcctatagtcccagctacttgggaggccgaggcaagaaaatgacttgaacccgggaggtggaggttgcagtgagccgagatcacgccactgcactgcagcctccttggcgagagagaaactgcctccaaaaaaattccctgagggaaacctgtatgcagaacgccctgatcccaataaagggttggcctgggggtccctgtctctctccactttccctggcctcccagcagtctgtgcaccccagggcccgtgggtgataaaagctgtttctatcctgtgtctctagatcactgggggctgctctccctcacatagatcctatgtgaaaactgccccagagatgtggccgagagcctgggagcttcccagaggaatgtgcccggtcagcagccagcccaggcctgggagcgggggctggaacagaccccacagttctcaggtccccttcaatcactgacccactccctaaacagagccccagcaagaggggctgcaggaggggccccgagggagacgccgccgtgcctgggcccccagcccttcttggccctctgggcttcaactccctaggaggggaggctggccaaagtctaactgaagacgtcacagcctctggcaagcggctctcccgagcgcccccagacccgtcctcttccctggtgggaccttcccactcctcctggcccaagctcagatgggcggttttgtccgaaacggactcgcacagccccacgtgccaccccccacccgcctcccagggccccacactcactctgcagaagcacaagtttccaaagcaggattcgggatggcagcgccatggcccccgcccagccccaggctttgtcccactcggctctaagtctctctccagaaaaacagccctaccccctccccctccttagcacccgcggtgacatcacggaggcctgggcctgtctacggtctggggaccgccccctctggctcctgccgggccccttggcctcccccatcgttgctggcctgctggggaggggcagtgtgggagcagaggcccagcccctcaccggtcaggcctggggaggggtggtgaccgcacccttggagggacaagaaggtccgaggacatgggcccctgataccacgtgatcgtgtctcacgtctaggagcctcccgggcctgtggtgaagggttgggactgttgggtgagtggcccctccgccccacctctggcctccccccacgtgagccacctcagggcagggtcctcccctcagtctgctccaggccccagaaaggcctcccagcgctgagaccgcccccacccacggtgcacgctggtgctctccttcagaccagatggcccttccagctccaacccttggccctgcatgaccttggtacccgtctcctctgggggccacggtgggctcccttgggccaggatgatggacgctgccagtcactagtcccctttacaacctggagagtcagccagggacaggggaccctgagcactgggaggcctgggggtgctggggtgagcagacctctccctgctggccccgtcccctggggctgcccgcctttagggtgcagcctggtgtccctgaaaccaggtgctggattacaagcctcctggagaaaggggagagtgggacccctgccatggaaggcacaaatttgaaactgtgggaaaacttacaaagtcacataaacaaatgcgaaataacagcctgcactgtgtagcaaacccaactccttctaatcaagcaaacctcaagaaaaaacaatctgaacaaccacaaccactagaaaccctcagtgcatagttccgcccgcccacttggagtgagctctccttacaggccccgagggccccagctgggtggggggctcacccctgaaccctgctctggtgcccaagtcctcagacagtgggaagcccagtgcagatcagagtggtggtctcagggcgaggggaggggaacctgcggctgctccagtgagaggaacgggcaggacacggaccggcgtaaggacagaagaccccaccccaccccagcccggtcagacccatttcctcagcagggtcctggcccgggcggcgacctttccaaactggcttcagggctgaacacatcccgccacccccactccctccctgggcctttcattctggaaaaacaagccccacctggctggcctcgaggcctctgctggcctctcctcctgtttttccaactggtttgtattagtgctggcagctgcccgcccgcccatgtctgtctccgtcgcacactctggggccttggcctctgcagtctctgtctccttccgtcactctccctgttccctctctccccatggagggaggacggacagcagtttggtggggggacagggttggccctcgggtctgggagggcccggctctgggtgcagggctgagaggggcgcctggtccgcacgacagcctcaggccagggctcgcctcactctgcagggccgtccctctccgggcagtggcctccagccacactttcggggacccagccagcggagatgcaggccagaggctgtcgtctgagagggccctgacctctgagagggccacctgggggcagctgacccccatggggccctgggcaaggaacaaaaggctgatgaggccatcaggccccttccctgaccctccctgtccggccctcagtgggaaacagccacagagaagagcaggcctggtagtgaccaggtcacctgctcctcccagggccagtgacctgtgcctcttctgcaccttcctgggctgggactgtggagcctctgctcgctggggggtggtctgcagagctgtgggtgtgtgacttaattcccagcctg

SEQ ID NO: 1337 - DNA, 4001 bp, Homo sapiens
cccaaagtggatgctgtgacacccacttcagtgcagggaggacgcctctcacacagacctacatagccctccctgccaccgtgctgggctttggatggcacctgcccttgagtggggaagccagggcatgggcgtgggccagggccaggctccaagccagccggttctggggtgtgtgcttgtcaccggggccactccacctggctgcacccaagtcacccagagcaccaaggaggctggatctgtgggttcccccacgctccctccagggctgtgccccagcccccgagggtccttggaccctcagacgctggggaccccacaccacacctaaggctcagcgcagcccctgaggtgcttccgcagggcagaggcctgaaggctgaatgtgggtcgtgaccccggctgccgccccacaggcccgcgttgctgcttgagggactctcattgtcgtaggccgcctcggcatccactctgaatctaggctggactttctctgaccggaagcggggctgccacccgggacagtttccaattcacatcccccgtcctcgagctgatccacccagacgcccgccctacgcactgtcccctggtgaccaccccctgtgtccccacagaccccacgccccacatggactgtgcagctgcaccacggagtccccccacagtcagcgtggccccacggggctcgtgccgcttgccttaaacccaccagttaaaactcccccaccaggcatggtggctcacgcctgtaatcccagcactttgggaggccaaggcaggtggatcacctgaggtcaggaattcaagaccagcctggccaatatgaaaaaccccatctgtactaaaaatacaaaaaattagccggacggggtggtagtgggcgcctatagtcccagctacttgggaggccgaggcaagaaaatgacttgaacccgggaggtggaggttgcagtgagccgagatcacgccactgcactgcagcctccttggcgagagagaaactgcctccaaaaaaattccctgagggaaacctgtatgcagaacgccctgatcccaataaagggttggcctgggggtccctgtctctctccactttccctggcctcccagcagtctgtgcaccccagggcccgtgggtgataaaagctgtttctatcctgtgtctctagatcactgggggctgctctccctcacatagatcctatgtgaaaactgccccagagatgtggccgagagcctgggagcttcccagaggaatgtgcccggtcagcagccagcccaggcctgggagcgggggctggaacagaccccacagttctcaggtccccttcaatcactgacccactccctaaacagagccccagcaagaggggctgcaggaggggccccgagggagacgccgccgtgcctgggcccccagcccttcttggccctctgggcttcaactccctaggaggggaggctggccaaagtctaactgaagacgtcacagcctctggcaagcggctctcccgagcgcccccagacccgtcctcttccctggtgggaccttcccactcctcctggcccaagctcagatgggcggttttgtccgaaacggactcgcacagccccacgtgccaccccccacccgcctcccagggccccacactcactctgcagaagcacaagtttccaaagcaggattcgggatggcagcgccatggcccccgcccagccccaggctttgtcccactcggctctaagtctctctccagaaaaacagccctaccccctccccctccttagcacccgcggtgacatcacggaggcctgggcctgtctacggtctggggaccgccccctctggctcctgccgggccccttggcctcccccatcgttgctggcctgctggggaggggcagtgtgggagcagaggcccagcccctcaccggtcaggcctggggaggggtggtgaccgcacccttggagggacaagaaggtccgaggacatgggcccctgataccacgtgatcgtgtctcacgtctaggagcctcccgggcctgtggtgaagggttgggactgttgggtgagtggcccctccgccccacctctggcctccccccacgtgagccacctcagggcagggtcctcccctcagtctgctccaggccccagaaaggcctcccagcgctgagaccgcccccacccacggtgcacgctggtgctctccttcagaccagatggcccttccagctccaacccttggccctgcatgaccttggtacccgtctcctctgggggccacggtgggctcccttgggccaggatgatggacgctgccagtcactagtcccctttacaacctggagagtcagccagggacaggggaccctgagcactgggaggcctgggggtgctggggtgagcagacctctccctgctggccccgtcccctggggctgcccgcctttagggtgcagcctggtgtccctgaaaccaggtgctggattacaagcctcctggagaaaggggagagtgggacccctgccatggaaggcacaaatttgaaactgtgggaaaacttacaaagtcacataaacaaatgcgaaataacagcctgcactgtgtagcaaacccaactccttctaatcaagcaaacctcaagaaaaaacaatctgaacaaccacaaccactagaaaccctcagtgcatagttccgcccgcccacttggagtgagctctccttacaggccccgagggccccagctgggtggggggctcacccctgaaccctgctctggtgcccaagtcctcagacagtgggaagcccagtgcagatcagagtggtggtctcagggcgaggggaggggaacctgcggctgctccagtgagaggaacgggcaggacacggaccggcgtaaggacagaagaccccaccccaccccagcccggtcagacccatttcctcagcagggtcctggcccgggcggcgacctttccaaactggcttcagggctgaacacatcccgccacccccactccctccctgggcctttcattctggaaaaacaagccccacctggctggcctcgaggcctctgctggcctctcctcctgtttttccaactggtttgtattagtgctggcagctgcccgcccgcccatgtctgtctccgtcgcacactctggggccttggcctctgcagtctctgtctccttccgtcactctccctgttccctctctccccatggagggaggacggacagcagtttggtggggggacagggttggccctcgggtctgggagggcccggctctgggtgcagggctgagaggggcgcctggtccgcacgacagcctcaggccagggctcgcctcactctgcagggccgtccctctccgggcagtggcctccagccacactttcggggacccagccagcggagatgcaggccagaggctgtcgtctgagagggccctgacctctgagagggccacctgggggcagctgacccccatggggccctgggcaaggaacaaaaggctgatgaggccatcaggccccttccctgaccctccctgtccggccctcagtgggaaacagccacagagaagagcaggcctggtagtgaccaggtcacctgctcctcccagggccagtgacctgtgcctcttctgcaccttcctgggctgggactgtggagcctctgctcgctggggggtggtctgcagagctgtgggtgtgtgacttaattcccagcctggcctggcatttttctccctctgggaagaggacaaaccaggacaaagccactggcatcactgtgctctggctaagcccccagccaaaccagcgccctggaccgtcctcctagccccacctctgggggttggggtggagcaagaggggtcagctggccccacggcccgcactgaggatctgatcttggctgccattcctggtgactcggacattccaggcagcccgtctcattgggaagaaaaaccaca

SEQ ID NO: 1338 - DNA, 4001 bp, Homo sapiens
ctttccaaactggcttcagggctgaacacatcccgccacccccactccctccctgggcctttcattctggaaaaacaagccccacctggctggcctcgaggcctctgctggcctctcctcctgtttttccaactggtttgtattagtgctggcagctgcccgcccgcccatgtctgtctccgtcgcacactctggggccttggcctctgcagtctctgtctccttccgtcactctccctgttccctctctccccatggagggaggacggacagcagtttggtggggggacagggttggccctcgggtctgggagggcccggctctgggtgcagggctgagaggggcgcctggtccgcacgacagcctcaggccagggctcgcctcactctgcagggccgtccctctccgggcagtggcctccagccacactttcggggacccagccagcggagatgcaggccagaggctgtcgtctgagagggccctgacctctgagagggccacctgggggcagctgacccccatggggccctgggcaaggaacaaaaggctgatgaggccatcaggccccttccctgaccctccctgtccggccctcagtgggaaacagccacagagaagagcaggcctggtagtgaccaggtcacctgctcctcccagggccagtgacctgtgcctcttctgcaccttcctgggctgggactgtggagcctctgctcgctggggggtggtctgcagagctgtgggtgtgtgacttaattcccagcctggcctggcatttttctccctctgggaagaggacaaaccaggacaaagccactggcatcactgtgctctggctaagcccccagccaaaccagcgccctggaccgtcctcctagccccacctctgggggttggggtggagcaagaggggtcagctggccccacggcccgcactgaggatctgatcttggctgccattcctggtgactcggacattccaggcagcccgtctcattgggaagaaaaaccacaggcactcagagccacaagcagcacagccaagcccatattcactcccatgagtgtgcacagacacatgcacacacacacaaagacacacatggagacacacagagatacacacgcatgcacacgaagacacatggagacacagacacgcatgcacatgaagacacggagacacacagagatacacggaaacacagacacatgcacacacgcgaagacacagacacatacacatgcatgcacatgaagacacggagacacagatacatggaaacacgaacacagacatgcgcacacacgacacacatggagacacgcatgcatgcacatgaagacacacggacacacagagaagatacacggaaacacaaacacacagacacaggtccacacacagaaacagagacacacacagacacacatggaaagacacacacagagacacggacctgtggccgcacagcggatcatcgatggctgaagagtcccacttcctgtcgttcagaagcgtttgctgaccacctcctgggtgccaggcttgctgggcactggggactcagcactaagccgggtgccagccatggccctcttggaccccagcctcctggactgtgctgcatgtggtggagggaatgagacaggggtcggggggcgcccaggctggaggggcgaggacggacggacccaaggaagcaacctctgtgacagcaaatgccaggcgaggcctgaggacgcggcttccaggcgcagccagtggcggggctgccaggagtggtcttgggacgccagggaccctgtgtgtgtggtaggggggccactgctgacaccaacacagacagggttaggctcgaggacaaaccgtattcgccgccgccgcacctgccacgcacatcggaagcgttagcacagttttccctgcgtggggctgggtctcctacccaggctgagtttctcccctctaagaggaaacaccgccagccttctttctcctacggcctttggattctgaaaactcgctgtggggagggacgtgaggcttcggcaccaggaacccctgcgggctaagacggtgttggccaatcacatccagtcactctcctgggaaagtcacttttatggagacagccccccaagggggtctcaagatatattgaagttttggttagttatgtatgctgactaaatttacaagtaaacttgtttatcaaaaacaaaagaaaatgtgttaatccgttatagccgcttgtggcgactgttcccggccatgtccctggctgactgttttcctgctgatcctgaccagcgtccccggcagccatggcctgcattcgtgttggtccctcctcctgcagccccgaggaggcagggctgtctgtggatcccagatcggttgtcggaaggcccggaagaggagagctgccctccaccaccactgtctcctcctcctggacaacagagtcaggacactgctgagatggggtgaagcataattgttgcactgagactcaaaactacaggcaagaaggtttgaaaatacagaaacatttcacaaatcatctgcctcctctcgagtagtatctggcttgttctaaacatgcaaatgcagtgagacgggctgcctggtacacacacatcgccccggaatcatgaccttaggccccagggccaccttctgtaattttttttttttaagccacaaagtctcggccaggcaagatggttcacgcctgtaatcccagcactttgggaggccaaggtgggcagatcacctgaggtcaggagttcaagaccatcctggccaacatggtgaaaccctgtctctactaaaaatacaaaaaattagccaggcgtggtggcaggtgcctgtagtcccagctacttgggaggctgaggcaagagaattacttgaacccgggaggtggaggttgcagtgagccgagatcgtgccgttgcattccagcctgggaaacagagtgagactccatctcaaaaaaaaaaaaaaaaaaaagggttgggcgcggtggctcacatcggtaatcccagcaccttgggaggccgaggtgggtggatcacaaggtcaagagatggagaccatcctggccaacatggtgaaaccccgtctctactaaaaatacaaaaaattagccaggcgtggtggcaggtgcctgtagttccagctacttgggaggctgaggcaggagaatcacttgaacctgggggatggaggttgcagtcagccgagattgcaccactgcactccagcctggtgatagggcgagactccgtctcaaaaaaaaaaaaagaaaggagtgaaaccccatctctactaaaaatacaaaaattatccgggtgtggtggtgtgcacctgtagtccgagctactccaagggctgaggcagaagaactgcttgaacctgggaggcaaaggttgcagtgagccgagattgtgccattgcactccagcctgggcgacagagtgagactcggtctcaaaaacaaaacaaaaggacagggtctcactgtgtcacccaggctgaagggcagtggtgcaaacatcttggcccactgcagcctcaaattcctggcctcaagcgatcctcggcctctcaaagcaatgggattacaggcgagatccatcagttttttctttttttttttttgagacagagttttgttcttttgctcaggatggagagcagtggtgcaatctcagaatcaccgcaacctctgccttccagtttcaagctattctcctgcctcagcctcccgagtagctgggattacaggtgcccgccaccacgcctggctaatttttttttttttttttgagatggagtctcgatctgttgcccaggctggagagcagtggcgcaatctctgctcactgcaagctccaccttctgggttcatgccattctcctgcctcagcctcccgagtagctgggactacaggcgcccgccaccacatctggctaattttttgtatt

SEQ ID NO: 1339 - DNA, 4001 bp, Homo sapiens
gccagtggcggggctgccaggagtggtcttgggacgccagggaccctgtgtgtgtggtaggggggccactgctgacaccaacacagacagggttaggctcgaggacaaaccgtattcgccgccgccgcacctgccacgcacatcggaagcgttagcacagttttccctgcgtggggctgggtctcctacccaggctgagtttctcccctctaagaggaaacaccgccagccttctttctcctacggcctttggattctgaaaactcgctgtggggagggacgtgaggcttcggcaccaggaacccctgcgggctaagacggtgttggccaatcacatccagtcactctcctgggaaagtcacttttatggagacagccccccaagggggtctcaagatatattgaagttttggttagttatgtatgctgactaaatttacaagtaaacttgtttatcaaaaacaaaagaaaatgtgttaatccgttatagccgcttgtggcgactgttcccggccatgtccctggctgactgttttcctgctgatcctgaccagcgtccccggcagccatggcctgcattcgtgttggtccctcctcctgcagccccgaggaggcagggctgtctgtggatcccagatcggttgtcggaaggcccggaagaggagagctgccctccaccaccactgtctcctcctcctggacaacagagtcaggacactgctgagatggggtgaagcataattgttgcactgagactcaaaactacaggcaagaaggtttgaaaatacagaaacatttcacaaatcatctgcctcctctcgagtagtatctggcttgttctaaacatgcaaatgcagtgagacgggctgcctggtacacacacatcgccccggaatcatgaccttaggccccagggccaccttctgtaattttttttttttaagccacaaagtctcggccaggcaagatggttcacgcctgtaatcccagcactttgggaggccaaggtgggcagatcacctgaggtcaggagttcaagaccatcctggccaacatggtgaaaccctgtctctactaaaaatacaaaaaattagccaggcgtggtggcaggtgcctgtagtcccagctacttgggaggctgaggcaagagaattacttgaacccgggaggtggaggttgcagtgagccgagatcgtgccgttgcattccagcctgggaaacagagtgagactccatctcaaaaaaaaaaaaaaaaaaaagggttgggcgcggtggctcacatcggtaatcccagcaccttgggaggccgaggtgggtggatcacaaggtcaagagatggagaccatcctggccaacatggtgaaaccccgtctctactaaaaatacaaaaaattagccaggcgtggtggcaggtgcctgtagttccagctacttgggaggctgaggcaggagaatcacttgaacctgggggatggaggttgcagtcagccgagattgcaccactgcactccagcctggtgatagggcgagactccgtctcaaaaaaaaaaaaagaaaggagtgaaaccccatctctactaaaaatacaaaaattatccgggtgtggtggtgtgcacctgtagtccgagctactccaagggctgaggcagaagaactgcttgaacctgggaggcaaaggttgcagtgagccgagattgtgccattgcactccagcctgggcgacagagtgagactcggtctcaaaaacaaaacaaaaggacagggtctcactgtgtcacccaggctgaagggcagtggtgcaaacatcttggcccactgcagcctcaaattcctggcctcaagcgatcctcggcctctcaaagcaatgggattacaggcgagatccatcagttttttctttttttttttttgagacagagttttgttcttttgctcaggatggagagcagtggtgcaatctcagaatcaccgcaacctctgccttccagtttcaagctattctcctgcctcagcctcccgagtagctgggattacaggtgcccgccaccacgcctggctaatttttttttttttttttgagatggagtctcgatctgttgcccaggctggagagcagtggcgcaatctctgctcactgcaagctccaccttctgggttcatgccattctcctgcctcagcctcccgagtagctgggactacaggcgcccgccaccacatctggctaattttttgtattttttttagtagagacggggtttcgccgtgttagccacgacggtcttgatctcctgacctcatgatccacccgcctcagcctcccaaagtgctgggattacaagcgtgagccactgcacccggctttttttctctttttttgagatgaagtctcgttctgtcgcccaggctggagtgcagtggcgcaatctcgactcactgcaacctccgcctcccgggttcaagcagttctcctgcctcggcctctggagtagctgggattacaggtgtgcaccaccacacccagctaatttttgtatttttagtagagacagggtttcaccatgttggtcaggctggtctcaaactcctgaccttgtgatccacctgcctcagcctcccaaagtgctgggattacaggcatgagccaccacgcccggcgaatttttgtatttttagtacagacggggtttcaatgtgttggccaggctagtctcgaactgctgacctcgtgagccacccacctcggcctcccaaagttctgggattagaggtgtgagacaccatgcctgatcaattttaaaatcgggaacaaagaacactgagtgctgccagttacctgcggtggctccacctgcagggtcagactccacctctgggactctgcatccgcctcccttcccggctgggcacgtcttagggcagctgtcacaccagcctcaggcgagggccaggccacggctgccacatggaatgcacatcctggatcctccgtggtggcttctccctcctcaccaagggaggtcggctgttacatgtaacatttctaccttggttataattacaaatttgatgtacgcaattatgatagaaaaatcggctgggtgcggtggctcactcctataatcccagcactttgggaggtggaggcaggaggtttaagcccaggattatggagaccaggcgggacaatatagcaagacccagtcaaaaataaaaaaataaggccaggctcacccctataatcccagcattttgggaggccaaggcaggcaaatcacctgaggtcaggagttcgagaccagtctggccaacatggtgaaacccccatctctactaaaaatacaaaaattagctggggatggtggcatatgcctgtaatcccacctattcaagagactgaggcaggataatctcttgaacctaggaggcagaggttgcagtgagccaagatcacaccactgcactctagcctgggtgacagagtgagactctatattaaaaaaaaaaaagccaggcgtggtggctcacccctgtaatcccagcactttgggacactgagtgggggcggattacctgaggtcgagagttcaagaccagcctggccaacatggagaaatcccatctaaaaatacaaaaattagccgggtatggtggtgcacgcctgtaatcccagctactcgggaggctgaggcaggagaatcgcttgaacctgggagatggaggttgaggtgagccaagattgcagcattgcactccagcctggggaacaagagtgaaactctgtctcaaaaacaaaataaaaaacaaaaataaggctgggcatggtggctcatgcctgtaatcctaccactttgggaggctgaggtgggcagatgacctgaggtcgggagttcaagaccagcctgaccaacatggagaaaccccagctctactaaaaatacaaaattagccgggcatggtggtgggcacctgaactcccagctactctggaggctgaggcagg

SEQ ID NO: 1340 - DNA, 4001 bp, Homo sapiens
cgatcagctccgggaggggagcgaggggaggattgaggctaatgcaccttgcaaatagaaatattagcaatggggatggcagctggcctgcggggccccagtgaggtatgccctctgcaatggagaagtcttcatgggccttttgcagaccttctttttctttccactagggccatggtggaacaaggggcaagcagcgccttctctctgtttcaagacctttgagagaatctggaacccaggccacaggaaatgggcagaaaatgagcatttatggccactggagagattgagattagatgggagatagaacagatggactcttagcattgagcaggtgacccagggaacttgaccttttgtttctgagcccctttctcaaggcgtgggggctggaccactcagggaaatggcttcttagacctccagaggccccttactgctgaggaacctggaactttcttaaggcaagatggtgatagcgtgtggcttgtgcatgtgagcgtgggacgggggaaatgactgcctggttccctctacctgctggcctcagtttctccattagataaggtgtttgggaagggctgggtagctgaaggccaggatgggctttaccaatgttctctcggatgtggatgggctggtccagcatggccggcgggccagcccctgcagaactcactgcagacacgcgcaggaggaacttgtctcccagagccaggttccgcacagtctgctgggtcaccatcatgggccgggcactcacaggcacccactccgaggctgaggggatggagagagtgtgaggtctttgcaatgtggccacaggcgcccctctccatggggcttcttttcctgctggtgatctggggaaatcagcctccctctctgggcctcattttccccttgtttgccttccctgacttcttgtcaaatggcatcaaagacacctgatgttagagccctgaaattgtggctagagatgaggttgttgaagcccagagagggttggacacatttgcaaagtcacacagcaaggtaggggcagaggcagaggccaggctggacttgggccatggagggggacagtggcagcagggatgtggcccccacacccccaccccattcccgctttctcctcactgtctcttacgctaacattcccctctccagctcctccctttccacttcctacagttcggggtcctctgagacttagcacttccttcccttctcaccaaaggagaacccagtgtccccttacccttcccttactcagaagctccttggagctgaggacaagggagcccctcaacccacccacctaccctttcttgctctcctgctggtggagcaagaaagggcaggtgggtgggttgaggagcctactgctcgcatcccctccttctgtatctctcccagactgaccaaccacagggcctgtgcacttgtccctgcagccctccatgacaacctcccctgggtgtatgcaagacttagcccagcactcacctccctctctgcagagctccagcacatagccctggaggcccagcctccccagcctctctgggggctcccagctcacagtcacagagctgctgctcacatcatccagggtcagcagcagtggggcactggggacatctggggagatgaagaggttcatggccaagagctcccctccacccctgacatgcctgcctccctcctccccctgccccaccttcagtcaccttcacttgggggtgcaggcttagtggctgtggaggctgtaggggcctgtggggcaggggcctgcggcttgggcacctgctcttctctggtggactctgatactgccacttctccgggaggctctgctgtgggcaccttggcagattcagatgcggtctcctctggactgcaggcagggccctcggaggtgtttttttccatcattgctggactggctggggggccagggtggagtgtgcaggggtcagccgttggggggcctgggcctctagggtgcctgggacacctaggtccaggcttatatagtcaggggctgccccacccccagcaaacgattcccagctgtggggtcaggtcaagcaggaggactggagggtggagaggcgcccaggccaggaatagctctgggggaggaaccacaagggccccttgaggagtcacttcctcatccatctccccgactggccttcaacagccagggtgctggtgcccagctgggggagggcgcagatgggtgagatgggacatcgagcaggccgcgtgccaggtgtcagggcaataggaggaagaacttctatctggagaatgagcccagctcaggctctgtgtgtctggcgtctatggggccacttgttcccagagcttctcagactgggtgctggggccctgacagtttgggacaatcgtccttgtgagcactcccagctttgcctctggggtccacattccctgggctcccacagttcccagggactctcgcctgtgctgtatgaggctgagggccctagagagggagggaattgagatgctgagggtggagctgctcagaggatggtcctccagcattggaaccccaggaaggggcactaagtctcctggctcctgtctcagttgggcggctggtaaggagctcgtctcccctgatgcctgctgtgggcctcagttttccacctgttacagagaacccctcgcccttcgggatgggttgcagttgtaggcagatctggaagatgccctagtggaggagagcactctgaagcttctagactcttccaagcaggctgtgggcatgggctttctcagtgtgccaaaggaggcagatatggccagatttctagtcattgattcatttgttcgataaaatgttaagactgggaatcactggaaagccagaaaatgccatgtgtcaggaaggagggagaacattaagaacttttattgctggtattggagcagtcactctggaaaatgtgagagttttactagtgcctagtaaaatggatgaggtgcctactccgtgacccagccgtgccgctcatataacacccacacatgccccaggagacatggagaagaaggttcatggcaatgttatttgtaattgttgaaatgtgggggaaaacagctgtccctcaacagtgggatggataaataactgtggagtgtttatgcaactgtaaagcaaaatatggggtcaaatgagcaacttcagctactcacagacccagtgatgagcagaagagcaaggcacacagaaatgttgcgtctcatctgtctcatctacattaaatccaaatgcagtcaacaccaggctcccttcttcaaggtacatccgtaggcggtaaggccagaaaggaagatgaggccagtacaaaagttaggatggcgattgcctctaggtggaggaacagggatatctgtgatcgtgagggctgcaggggtgctaatgaggtttcctttcctgacctgggtggtggttacacaggttcttactacatagttattcttcaaattaaacaaatacatttatgcactctttagcacgtaagatgtgctcacaatttaaaaataagtaaaagtgatttattcagggccctcagcagcatgcatgctcttccctttcctgaggactggggacaccagggtgtggctgcctctcaaccctgctgtctctgctggggagtggcagtgcagggcctgggagcctctggatctggccctccctggatgccctcgccctctgctaggtgactccacgtcttgccaggcagggagtgggtcctggagactggatctccatccttggcctctgactctgcagctataagtgaatgtgactaaccccacaggacactgagtcagccctggagagcctgtccccggctgggggaagggtggccccaggggagggcagttggctgcccacaagggcttgcagccctggggtttcaaagatgcctgtgtggtggggtgggcagtggcag

SEQ ID NO: 1341 - DNA, 4001 bp, Homo sapiens
attgcaccctgaaggatctttggtgggggtttggggctctgttggctctctgaacttttttgtgtatttttccaggggcaagagtccacagctggcattagattttcctaggggtccatatccaccaaaaggttaagaccctgatttggttcaactcctcaatttacagatgagaaaatgggagtggattgacttgcctagggccacagaacagagctaagatttgaactcatgacttctttgttccaagtagttaacagatgcacatatattttgcaaagtattcaaaggtgttcttattgccagtgacttctgggataccactgggttgagccactgggtgctagtggccctgaggcctgcagtgtacagagctgctgcacacgagaggctttgggctgcatttgcgggcccgtgactgggggctgtcaggagctggctgcagccagaggggagaagcatgggggagatgagcactctcccttgtgcttttgggaagaccagtagagagagctgaggcgtcagcagtcctggctctcattctcctgctgcctgtcacttattctctgggccttttaagggaagaaactggttttctgcctccatcaccccagcttaatatatttacactaacttttgctcccttcatcttcaacgggacaaacttggccagctctctgcccttgacattcaaatagtttctggaaacctggcctctcccatgaggataagaggcagacagagtctgctgcacaaccctatggaggtagaacgcagccttcacctctcacttggaaatatttgatcatttatttacatcttagtttggcctcttccaaggcaccctggatcatctcagcaatcctttcaactaccctgataggtagatgttattaatcaccattttacagagtgaaaatggaaactgagcagtccagtgacttgtccaaggtcacagggctgttagaggcggcactaggaattgagcctagagctttgcctccaagtctagtatatcttttcccctgcctcttcctgccctaggagtccacgtgtttcttgattgtggtcttttcatcctcttaagactttcaggtgagcgccacgaagtggttagctacagaggcctcagccagggcattcagggatgggcggcaggaagctcggggttggaattcctcacttgggaacgcctctttgctgagaggcacacagagaccatcgtgaaggggaaattgaatgcttctcccaggagagctccacttccgtggagctcagactctgaggggtcaggatctcctatgggagcagtgggggattggaggaggtcctgaccccgtggtactgcccagcaggaggccgagtgtcactgtgctgccccactcttagcctccccattgccatagcattttatttccctgttccttcagcagacagtcactatctcttacccctcagtcccttcctgactggccattagtatatcaggtcttcccagtccctatgacaattttttaaaaggtaaaaatataaacagatcatttttagtcactgtaaagtgccaccaacaccatcactgacttctcagctaaaacacaaaaacttagcagggacatttgagcagcaagttagactccatcaaggacaggggatgggggctctcacgaatgatctccagcctaatcaccaatcctatagagtctttagctctgcagaaaacctgaggcgccgttcaggaaggtggcgatgtcttccccaactcccaccacccggcctccccaccctccccacctgccatgggtcaccttctatagggggcaggagctggggagtggggctgccagccccctgtccaggtgaagcctggggtggttcagcatccgctgggctggcttctttcaccttcagcttggatcctgcggccacctccggagctgtggctgcctccatgctgggccttcccagaggctgagctccagctctagattttcactgctggtgatgagggaggggctgagcacctgctcccaggctggcctcccgggtcccagccacagggttacgtaactgggctggccctccccactcagctacgcccagcagaaaggctgaagtaggggttgggggagagaggaggatcagacagcagcccagaatagccccaggaggactgaggtgtccctgttatctcgggagagagatgacaccccccacagcaccagggagggagagcttgaacacaccatccaaaagggacctctaatttctgtagggagggttgagtgacatctctgctcctgacctccagttcatcccgtggggcattcaggtcccaaagaaggggcccaggattagctgactcacagcaacgcctgaactgctctttctccctctgctcccacattcaatgaattgtaaagtcttatcaactcgacctttacagggcctgtcccatcctcccccgctccccgggggcagcgggcacagcgcagtggtaggtggagactgcactcgcactggctgcccaggtgccacttggggctctgtcaccaactagctgtgtgactcacaacacctcacagtctctcttcagtctgtttcctcatctgtaaaatggagataattataaccatagggtcgttgtgaggattaaagaggtaatctctgtaaagtgcttagcagagtgtagccgactaagtgcttgataaatgtaagctatttttaggtcaggccagcacttccccctttgagagctgtcaatggctgccttgcctattagatgaagtacaaataaagggagaggcagcagtggtggagggaggcgagctcagagacctgcgtgtgacttctggctgtaccactcactcaccagctgggactctgggcaaatggccgactcggagtctcaagtcccagtctatgaaacaagggatgatgccatgattgtgttgaggataaaatgatacaatctataggaaagtggccagctcacagcaggtgctagtcacatactacaggtcctacatgatttccagacttagcaaaccatctttctatacgtgttgtacatgccatggacactgccacctatcatactcctaccttcttatctccagaagccagcatccctctgcattttaaaatgctttaattttagagcagtttgagagtcacggcaaagctgagtggaaagtatagggttcccacagccccctactcacccctgtatttttttcatggaaaaaaaatgggtgcagttgaacaaatggactgacttcttactcatttttgccttcaattttggggtaattggtaagatcccaggagcctgtgttatcttggggtgacagaagctcagcctctttgtaactggtataggagctaaggcccaggacaatctgtttattggggccttggatggcctatggggttgatttggttggcagaagactgggtttttgccatatcagaactagcttgaaggtctttctgaactatttttcctgcttgacccagccaaggccccgtaagtgtggacagtctcctagccaggagaccccaaatacacccccttttacacaacacgtaacccatcttttggtgaggaaattggcccaggctgagtcttagccctttgttggagcgaaggtgtaaagaatcaactttaagatgcaggttcctaaggtttgcccatcagaaagtctaattcaataggtctggggtgctatccagaaatctgcacctaaaaaaaccaacctagtgactctggcgcaggaaatcttggaataccatgttagatagaattccttcaaataaaacaacgatcttagataatgtcctggggtaggaactcgcccatcagatgggcctcaggaacaagggctttgccctgtcatcttcagaccaaggtgctggagtattacatggaatattgccccaggctagcagggtaggatggctaacggttccagacgggtgggcaggaacctctcttaaatgct

SEQ ID NO: 1342 - DNA, 4001 bp, Homo sapiens
cttccccccatcaccctatataaaatgacacacacatcccacctgtcacttttttttttttttttttttggagacagagtgtcactgttgcccagtggcacaatcacaactcactgcagccttgacctcctgggctcaggtgattctctcacctcagcctccacagtagctagattacaggcacacaccatgcccagcaatttttttttttttttaagagatgggagttttgccatgttgcccaggctggtcttgagctcctggcctctagcagtccacccacctcagcctcccaaagtgctgagattacaggcatgagccacgtgcctggcctcacctgttactctttatccctaactttgctgtatttttatctgtaccacttaccactagctgacactacatatttatttatgtatttctctccctcaactaggatataagcttatgagagccgagacttttatcctcccctgcttatctccagtgtgcagaacagacacctgagtaaaattattaaatgaaagaaatgaacgtaaggagtttttagacggaatgacattcaaagcatctgtgacactttcagagacaacatagcacagtactttcacagagtagtcccttaagacttgctgaagtttatttgcaaagaggtaaactattatctgaaccccaaataggtagcaattcaaaattactagccttctttcttctaagacccaggagttatgctcctagaattttcctctaaactttgcttctgtccaaagggcagttaccaatttatttcccacttcccaaacttcctagtttcatatgacccaagtcctcatccctgcgaacaattccattctacacccttgaatatcccagtgagttgagtgacacatagcaggcattcaaattagtgctaagccaataaagtaaactgtaccctaccccttgaaatcctcctgtttccaacactttactcatctacttaacttagatcttgaagccacgaatgaagagatacagcgttaacagtaagctttcattttaaaaagtgaaaacaatgtaaccaccttgatatgccctcgagctctttaagctgtaattctactttatgaaatatacacaaaataagaattgacacagacagactaaggaatgggggctgaaaagccacagccaaattcgctatgaatctcctactttggggattaggctcactcagctacttcatagcccacttggaaattcggtcatttttccagttgctctttgttggagggaaactttcttaacaagattctgaggactccataaaaaccgtaaggtgggaggaattgggatctgaaggtccttggcaaacatgtccactgcggctgctggaggcaaagcaacggaagttgaagagactttgcaacagctgcaagagtttcactcccggtgcggagaagggtagcggagctaggctaccccacccgggcggcgtccagcagccaggtccctgctgaaccccgaggcccacctcgctggaccccggacgggccccatctgtttcccctccttccccacgctacggcccgctggggaacggggcagcgccggggagcacgacgagggcacgaggtaccctctcctagcccaggctcacccttggtcagcgtgtccagcacccccgacttctccaagtacctccggaactgctcacgcttcgagtcggcggcctgaagagacaccgggggtcagtggccagagcccgggagccgagcaggaagaaggcgctgggagtccggcaaccccgcctccgcctcactacctcggggccctcccgcccaaacctgcgcgcgcgaccccactcccacccagagccgaccagcggcttgctaccgcccgcatgcccccagccacgccgcgcccccctcactttgtaatgggccatagtgacagcggcagcggcgtagctggcgccggagaccgcgactggcgggttgggagcagcactgctcatgcgcggaagggggcgcgcgcctgcgcacttgcaaaccaccggccgggatcgccgaggtgtggcctgttttcatggcgaccaggacgctctgcatccccagtagcaggctgagccgagggaggctgcgtatgcccgcccctctggctgtcggagccgcacctcttcctcttccggcccccgtagcaattaggtttctttgcaggaggtgagattttggtacctctgtcctggcgtccggaggcagggcccgggagcattgagactattgcgagagaaaggaccgccgcacggtggtagcgagcgcatctttttcatctgggacctcggaaactgtggtgacccataggtgctgggcttcttggctctcgtcctgagaaagtgctcacagtgctttgcagtagccgaggagggtgtttagaatcatatattttggcttcagcttttatctttggagtctccttgagtcgtggctgacttgatgtgggcctctggaggatgagcagtaacgagcttgcagtagcttttgagccaggcactgtagaaaacacgggtattttaaattttaatccttacaacacccctgtagggtgggtattgttaattaagtggagtggttagatgtccagtgagtagagtcgagtccaatccgggcaatgaatcacgatgctatgaactggtgaaggaaagccacggatcttcttaagattttatttactaggtagcaacatgtgattatactcaagacacatcaggatgccagtctagaaggaaacttacgtgattgtgttccaggggcaaacagaattaacccagtgtccaaggtggaattgtatagatcaagaaccatttcctaaggctgtggtctcttcaaagagaaaacctgatcaaaccatttagcctcaattctgaacatgtgattttcccaaaatcagttacattcgaaaggatatcatttaaaaaaaaaaaaatcctgatttgacaactctatgtctttgaatttagaagtgttgcttcacaatctcgaattagagctgtttttctcttgcttaaatgagtttgcagttgtctgtcttaacagctggtctttagagctgcccctatctattttttctgtgccccacgaccactaggctacttctctgataatatatataatgtctaaaagccaaccgctgtttagatctgaagatctgtgggaacccgcctaccaatgagattgttcgttagggacactacgtgatttggaggacaaacaggattattacaggttctgaccaaccctggctcaaaggacagccctcccaaagaatcagcagtgtttggaatgtcaagtgattgagaatctccttgtgaaggaggaagggttctgactgtgccctttctgaactggcccttgaggttacctttaggaggtgacccccggttttcatgttctgtagaggaaccccatgtagctctaagccaccgcggtttccaatcgcagttagctggcaaggagaaaactgtttggggtgactgcctcatgttgttctctccatctatagcaacacctggaatagaacggtgacctctagagtagtagttccttttgctgtctttgccttcagtttctcttttttccattaactggttaccattaagttcttttccaaatattttatgagtgtctttgttattgtttgaactgatgtgttgaaaatgactacaactagtactaagtgtggaaatctcattagaaagtacagtttcctgttcatccaaaatgcatttctcatcatttacactatgattgtcaggatttggctggaatacagaagatgaatttaaactagggtacactgcagtgtgtgtttgcttttccactaacagattataatcaggggcagaagggagtcgcttcagtgaatttgcagatgtgctctggtatttggctacattttgttttgccttgtttgcatggaattcattatgttccttcttcaacttgtattttccccaaagccct

SEQ ID NO: 1343 - DNA, 4001 bp, Homo sapiens
gcacttgcatcaaggatgggagaggagggcctggagttctactgccttgaccccagcatgtagcccacagattgccacaaagtaggggccagtgaatatttgttgaatgccagggagcagctgacgctggagatctattgagggggagcaagaaggacacttttccatctcaggacaaacagcaaggcaaggtgtagtgcttctaagataagctaccacaaagaccccaaacatcaaggaagaggtgcctggttgggatggagcattggggaagaggggctggctagatggcagaaagctggagctgacttgtagtgattgtctatctctaagcctcagtttttccatctgttaatggggagtgttcattcttccctccctgtctcagggatgcacgagtggtaagtggtggtggggaggcacgagaagagggcatttattattggcattttaaagtaaagccaactggagacctaggtttttaaaaggacgaaggttttggctttgcacaaaaggctctcggcttcttctccccctaggggagtgtgagtttcctagggaaagaggcagcagcaaaaaaacttcaggtttggagtgtctcttaaggtacccccttcaatcccttacagtccaaccccagtattgtcctctctaagcgccaaccctcacctcaaatcccttgtcccctggggctccaataatcatcaaagggaggctggctcccacgccacttttccaaactgtttaccaacacacccacgtgccagacagacacggttggggactacacgggcagcttcagccaaagagaggcggagatggcccaagagcttgagaagagccaatgcctgacctcaggcaggggcagagctttggccacccatggggtggccccctcttggatggctcggggaggtccttacccgagtcgcttgggctctcggacccggagcaggcctgggtcttgggttcgcccagcggacagggggcggcgggcgccgggttgccggcttcgaggctgggagtgcagtccggggcggcggacgccttgggcgggttcccccggggcgcgccaggagcgagccggtcgctcacagctctctccagccgttcccgggccgagaagccgctccacatgcagtcacggcgtatgatggaggcgtagttcctgccccagcctttcgagtggccccgggattccgcttcgtctccggtgcaccctccgggccacggctccgggggaccaatcccgggggccgggtcccctgcgccgggacccaagccccagggcggcgacgtggggggcgatggcaccagctcgaatttcttccagatgtcctcgctgggcgccgtggagcggtagaaatcctccccgcagtcatagtcgtagaaatagtgctggtacgagtcgtagtccatgtccgctccctgcgggagggaaggggggacgtgctgaccgggtgccggccgggcgaaggaggtgtccccgggtccctcggcacagtcggctgccgggctctcgttcctccccaaccccaccagcttgcagcctgcgcccagtcctcgcgtcccgggaagccgggccccgggtcagagtggtaggggaagccaatcgcagcgcgcggacccgactgtgggcagcgagttcaaagcaaactttgccagcgccgcccggagcgcagctcccagggcccggcggggccgggcgggggcgcgccgtgcccagaaggcagcctgcagccagcccgcaccgcgggacccgcgcccgtgccctggccacccgcagcctcacctcgctccagccgcccgccacctggagcggaccggctccccgccggctcggggcagcccggcagccagcacacacgcacatgcgcgccgccgagagcgcggcccgcactcacaagcgcgccccccccgcgcgcgcgccctccctcgctcgcgcacggcggcccggacgctctcgggatcggcgcgggagcgcgagctgcaggcgcattgtttcctgactgccttatatctcgtcgcgcgcccgggacccagggactggggggcgggccctatgggacaaaccccgccctctccctgcctactacgggcagtcgacaggtggggccggccccacctcctggcagcgctcgcccgctccgttcaatccccggtagccccccaaataaattgcacgctggggagcgcaaacaggaggagggctgatgcggcccggcggccgcttggcggtgccagccggctgagctaaaccgtgctccttgcccactccgagctggggaattagggctactccccgccccaccctgcgcgcctactttccccggcgcaccccgctgggttcaggtgcgcccgagccgccgcgaggggtagggggagggaaacgcgccacctggcggccctcagccctgaacttgggctggtcccggcgtccgtctggtcacccgtcggcccgtttcttgagctcagtggcccaagcctggatggcatcgaagcgaagattccgggatttagagcccgaaacgtaaccttcctgagcttcagtttcatctgtaaaatgaagggatggtaatgcttacctcacagggttgttgtgaggcttcagggaaataagagcatctagggaaggggtctggtctaggtggagaggcagacggcgctggcttagcccccgctttggggaggcggtgcagaaatgaggaatttttcccagggcaaagccagctgagacccgccatgctccctctcatctcacacaaaacactgtaggagctgtacagtagagaatgaggatttggcatctggaaaatactgcaggaccaagttgtttcaagttttgccctgcattgctggccaagatgatagataacccctttgtataatcttctttttaaattttaaatatattttgttaagagacagggtctcactcagcgtcaaggctggagtgcagtggctcgatcatgactcgctgcagcctcgaactcctgggctcaaatgatcctccctccttagcctccgaaagtgcagggattacaggcacgggtcaccgtgctgggtccccctttgtgtcatcttctacacagatgacctttggtggaagagaaaaaattaaactatacggccagtctgagatttaggccagaggagagtaacttgggacagcagccaatacatctagattcctccacctggcatcaaggtctggtgtctgtctaccccagcctgattgtctgctgtctctctctttccctcccacccctgtggtctaagaacaccaaactactcactgttggcagacggaagtgagaagggcaagcaattcagtgtggttggagcatgggacacggatgtgtgttgttatatgggttgggaaggcagggaaaatgacagccttccgttttagatacgttgggtctgtgctgcatgtgggacatcttgaaggcagaaacctgctcctacttgctttgtgatttctgcacctagaacagcttctggcagacatttgtgaactaactgacttactgagggactcagctaaccagatttcactgagacagcttgtgtgccctgctttgtgctaaacggaagacacaaatcagaagggttccaggtttggttgcagccccaaggcacaggcattggattgtcctttagtgacttttctctggtccacagatgtctgagatggttgctgtactagtctgggttattggttacaaataacaaaaaccaaccttaggcagggcacagtggctcacgcctgtaatcccagcactttgggaggctgaggcgggcagatcacaaggtcaggagatcgagaccatcctggctaacacggtgaaaccccatctctactaaaaatacaagaaaattagccgggtgtcgtggtgggcacctgtagtcccagctactcaggaggctgaggcaggagaatggcgtgaacccgggaggcggagctcacagtgagccgagattgcgccattgcactccag

SEQ ID NO: 1344 - DNA, 4001 bp, Homo sapiens
ctatgaagagcttgcctttcacgtagaaggctctttttaggaaatattttctcataattttaaagcttttcaagcctatagaaaaactgaaagaatagtacaataagctccccatatacttagattcaccagtttgtaattcaccagttattaatattttgccacagttgttttacctttctttctctcattatctatatatttgcagtctttcttcaaccatttgagagcaaattgcagacatcctgacgcctcaccctgggtacttaagcatgtatctccatagaacaaagattttatccttcgcaaccacagtatcattatctcaccaagaaactgaacattaatacagtaacataataatgagcagtcaaattgcctcagttatcccaaacctgttcctcatagcctttttcccccttggatgaagacaccaatcaagactcatgcactacatttggttaacacatttctttagtctctttaatatagaacaagcccttccccaccccttttttctttcttccttggcactgacatctttgaccagtccaaactaattgtccaacaactggatttgcttgcttatttcctcatgattagaacacttcctcaacagggaatatttgggagcccactttcacaaaaagtgacacaaataccatcttcccagctaataagaagacctcccccaacacctcacccccgcaccccccccacacacacacagactcacctttaggcaagaagggaccaggatgaacagaagagcctctcagaaaaagccatctcaagaatttgtctgatgacttaaaagcagaggttctcagattggactgagtaagaaaactttcagaacaacatattaagaaaactgacagagaggtgccatctctttattttgccagggaagaacatttaaaaataaacaaaaacttaccacttattatcatttcccaaatctattgtaatttcataaataaaggtcattttaacatcaaaaggtacaaataacaatctgagcaaaggttcaaaaaaggatagtttttcaaaagggacaattgacaactttctactgctcatatgcagacacatctcacccggtccttttatttctccttttgctatggactgtgaaaactgacatggaggggcacaagaactctgaaccactaatctaaatgaagctctcaggagctaaattactagtaatacttgaaggtgatcgctgtgctttccttaattcatctgtcttgtgctagctgtgcagtctctaggagaaagggcaggcagggaggcctggagcgcctgtagcaggtcactacgagccatatcacctgctgaactcagagtccccccactctgcattcttaccttctctggagcctggtggcacagcccgagcagtgtctcgggtctggggacactggccccttctcagccttgctacctcctggctgctgctttccaacctcctggccagattctcattttcttgccttagtcgcttcttctcttcctccagaactgacttgtctcggaggaggttgctgtaggcagtctccaactctctggtttgggtttccagctggtcccgctcccgcctcagggtgcccagctccctctgcagcccctcctgggtctcctggggcctggcagcctggtccaaggtcaattggtggaggaggctctccagggagctgagtcgagctttggtggcctccaggtctaagcgttgggtgctgctgtctctctgtaagttatggatgactgacatggcctggctctgctctgggcagctggattcattgggactggccacactgaaggtatactggcatcggccactctggtcattggccttcctgagctgagctgtcctggcccccacatcccacaccaggcaggccagaagcagcagctggacagctggcatctcaggcccaaagctgcagcaacgtgcacagaagaacctcattgcagaggcttggtgaggcttcctctggaaagctctgctgtgctgagaggtgcctggatgggtggccttgctggctcatgcccgagctccagagaggtttatatatactggggagccagcccttcatgggggaagacagaggtggccacgtgaggctgggtggggctgtgcacaggggggttgccttcacgctgccagcaagattcttagaaaataaccttccagaagtctgtttggagtttctttttaaaaagaacatcccaatttatgcacccataccccaataatagttcctatatctccacctggttttacacacacacacacacacacacacacgtacacacacttacaccaggactactggtgtgctgatttcaacaaggatatatttctagtttatatttccattcactctgcaaactcattgagaacctgcactgtgccaggcactatgctaggaactggagatccaaacaagtcctttaagacgtagcagggacagagaaaaataacagccagccagaacacaaggacagcaccctaccaggctccagggagagcattcctatagaagcggcagatttcccccctcacccctagctttaaaacaactgtgtatctttgggagaactttctaatttcagtcttgcatctcaggcaccaatgtcaatgttagcctctaaatcagttcttactctgtgtgtgtgcatgccaagaacctcattggtgaaatctggggaactcttctcagaaagatgttttcaaatatataaaatatagattacaaaggaaacaaatgataatgaaatatgattatcaaaatatcaaaattttaaacatgttttattaatatgttaaaaacaagatccagcaggaggtctaatttcaaagtagttttgagtataaatatttcacttacaacgtatctgcaacaactgtaatatagtataaaatgtctgtgatttctattggtaatgacaaaatcacaggtactgttattaccactttgagtttatggctctattcgcaatggaataaaatgttaaatttagttagaaggtggtaaaaacaaaaatgtaattttttcctcattcaaattcacaggctttctggactgtaggttaataatccctgctttacattaataaacccaaagagaaaaaacaaaaagcaaatggcaatagccaataaatataccaaaactgtcagaagtaactttaagccacttgaaataatgattgcctttgagcaactttatgttgttaataccaacaacagtgtcaatacttgtgaagtaaatatttccaaactgccctggcagactcacctccagagtggagaaacacagtttgctctaaagattctattcttatttgattggttctgcagttaagcctgaacttgagacatttacaaatgggtgtttgtttacagctgaccaaagggtactagtctcattttctgaatcagatagtaaacatcgctgaaatgatttttcaaaaaaccaatcatatagtcagcaagacctaggcttgaatctgtttggctttactcttaggaatgttttcttcctgttaaaagaaacgggattgcccttgtgctgctaactccacagagaaaaagagttcctaataaggagaaactaagtaatcttacagcctcagttactaccttgtgacttgctcagaattactcagcttgtaaaggaaaaatatagtattagaaatcaggtctcccgacttcccttgaactgattttttccccccacaatatagccctgcctcctagaacccaggatcacgtggactataatccctgtggtcaattcccactgcccttgaatgaatctgtctttcttgctcatacactatccctctctttttcttctcctcccctgcgctgcaggtcactccgtgctgtcagcagtcactgctgagctgcgtggggtgctggtcagggtgaaaagtttaacaatctctggcattttccacttgctctggcccagtttttgaatgccagg

SEQ ID NO: 1345 - DNA, 4001 bp, Homo sapiens
gggaggtgggaaggtggtacctgggtgagcagtgggggttcttgaggcccagaatagaggatgggacccttggggtgacagaggttttccaggacagatgaatgacaaagctccggagttctactccctagtccctgcctttccccatgctctgtgagtgtgtgtgtgtgtgtgtgtgtgtgtgtgtgtgtgtgtatgcgcctcttttctgaactcccctagtaggtagggtttggaagcagccactcaagttggagcaggatggagctccccagagactggacctgccctttgctcggcccagttttgcagcactgactcagcacttcacagggacccctggggcagggacattgtcctctctgtggagaaggtcaaccaccaggcatcagctggggagctgcaggagctactatcactcctttgctggtcaagactgcaggggcacacagaacctcccagcccaccctttgggccttggagtcagcaggtccctagagagacccaagggaagaggaccggagcaaggaataaggtaagaggggagaacctggcccagggagggactgagggattggagccaaggttaccagtcaggccttacttaccccctgggttggcgctgaactccagtgcactgccccactctggactgcaggaggcgctgtgagagctgcattcgctgggcacctgcaagacagggcgaaggcccaaggtcggggcacagccattctttgatgtctctctctgcctagtcccagtgggcagaagtacctgtggtggggttggagggtgggccacaggctgtggccttccagcccaggccatccccaaccccagaatctttgtaactagctcctctcacaccccagaggccctgcttccaggccttcctggcttccatcctgggtggtggttctgctctcacaggacaccagcttaaaggggtccctggttctcctgactctggcgataagggtgatggagacagattttgtggcccagtgaaggtcgctctgtgcaggcctgctggagttccaatgagactgagtgggttttctctctgctcagccacacccaggatgggggcaaagcagtcttctctggtgaacttggcctggccttttaggctctgactcaggcgctgggattaatcctcaccctcacctgggctgactgtggccttgctcctgatctttcttcagtcctatgttccccaccccaaccccttctgcacttcctccccactgcctttatcttgtctggaaagaacacaggacacaggaggtcagctggatagcccagctctgaccagggaagggctcctgcagcccctcgaccctgtctggcacctgcaccaaccctctgagcccctcttggggtcttgaggctgtccaggtgcctccctctggccccgtccccttggggcagggggatgggatggccacttacccctggctggggcccgcccccgccccggtagcggaggtcacgctcctcctggttgagggagctgagcagggcctggaggcgctcgatgtactggatggcactgcgcaggatctccaccttgggcagccgctggttggggttgagcagggtgcttctcttcagggcctcgaaggcctcattcaccttcttgagcctgcgcttctccctcagtgtggccgcccgccgccggtccacggacaccgacttcctcttacacaccttacacgcccacggcaggcactggcctggacagtgctcgggggtccccagccccttgtcctcaaggggccctggggcctcggggctcagggtgagctccgtccgctcgtagcctggtggttcgaagccctggaggtggacaggcaggtagttttccccatcatagaagcggggttcctggtagaagtagggggatgtctcatacagctccatggggtcggaaaaggcttgttcctgccaccagcccccaagctccagcagcccctcacgccaactgctgggtgccatttaaaccctccccgctggcatggaaccagagataaatatagccaacgccacagaaacctgagccccctctaagctgttgctgcacatcaaggcgtttacagtggattagatgtgattccccttctttctcccgcatggcccccaccccaccctgccagcctgcccctggcccaggcgggctcctgtgcacgggtcgggaggccgtcgggtgtaatttgattagttttcatttctcagcagcccctgtggggcaggggcgttgggggaggacacattcccctctcatctgctcctttcaattactcctagctgggcggcctgcctgctgtctccttgcagtcccgaagaagctggtgggtatagggggaggagggaacaaggaagggtaggcttaggctggaaggggccttaagagccaacttatccatctccttgcttcctgacagcaccttaaccacactacatcagtcgatgagactcttttaaagacttccctccggaaagaatgggactgcttcagattctgggcattcatgggcactcagtatccagggataagaaggatcaagactcagagcagctaacagattccacttttggggttcccaagcagctttgagctgtatgttctcttaggtctcatctgggggggtaaattgaggcaagagaaattatttgggttttggttttcttggcaggggtaaagagaaatttcctctttaatacagcagccgtggtcagagcagagattagaatttacagcctacacgttgccaccttccccagagcggcaaggtcaagatgtcctaagctccctgtctcctccctgtctcactccggaccattgatctgtccttctatgttacctcctcaactctttttccaacaccagaattttcctggctcattaatgtggacgggggtgaaaaagtagaaaaaacagagcccttcaaactcagtttaaatctcctctctccttggccaccgggcttggttgttctgcctcttactgtctgagccatcaattttacacgtatcatgcaggtctcaaatgtcaggtagagcagggactatttaatcttcaggcctctcaggccatggtcacctctcagtaggtgcctcagggtctgagaggacaaattccttccaatgcagtgggcagaccttagacactagcagtgaacaaggctcagtcttagggctggggattatagggacaccccagacaggatccctgccctcgaacttaccatctgatagacaacggtgatcacctctttctacctagcccctgatgcccaaatctcctccgaggcggctactgttcagcttctgctcacgtcaggagacagcccgttccattgacgtgtagctttgggctgcaatctgctccctctatcttttatcctttgttcccagttttttcctccccatagactaatgtcctgctccttatcctacgacagatcaaactgacaagttcaagccagtggcaaggacaataagaggaaggggaaccctgctggggactcatgggagacttcacagggaacatgagatctgcgaggcatgtgaagaaccagtgttccttcctctcattattcacagcagggagccaggagaattctgatgtccttttgggacaggaaatggagggaaggagggaacatagctggacaacaaaagaaccctaagcatgttgagggagagcagtgaggtcttaattctgttcttggccttaccagcatgatagaaagtagcagcataggccgggcgtggtggctcatgcctgtagtcctagcactttgggaggccaaggcgggtggatcacgaggtcaggagttcaagaccagcctggccaagatggtgaaaccctgtctctactaaaaatacaaaaattagccaggcatggtggtgggcactgtaatcccagctacttgggaggctgaggcagggaattacttgaactcaggaggaggaggttgcagtgagccgagttcgca

SEQ ID NO: 1346 - DNA, 4001 bp, Homo sapiens
gaatcctggtctgcaggcttctggcatgggagggttcctgcccaggcgtggggatggaaacagaagagggatgaccgcctgccttggcctgctcctgtcagcttctgtggggtcagctctgtctggcccctgcctctctagagggtcctgctggaggtggcagcgtgtgtgtgtgtgggcgtgcatgtgtgtgtatgtgtgtgtgtgcgtgcatgtgtaggctgtcttctgcctggatgtgaacacagcacctaggtgaccatttctctaagtccatggcatggaaggtgagcccactggctttattggagagccgttggcctggaaggggcatgtggtggaggtgtctggggctcgggctgtggagggtcagtcttagtgggcttttaccccttctacttcctagaagtttgctccttttgggtgtctgcagttgtgggcatcaggaaaaagagaatggatggctgcagggttagctgggaccaagggctgccccctaaagctccctgggctcctgctaatcatctcaaatgacataatgggacagtcaccctctttggcttcgtatcactccctcccgatggaagaagttctctttgcacccaaagaagtggctagccctgctcattctgctctttcttcctcatggcccaggaggagagctgctgggtaccaccctaggtggagcaaggaccccccactctgccccagctttcctgggacacgatggccctggctccagtggctgagagttaacattccctggcaccagccactggctcccttcccctggatgctctgttcccgattagcacagcaggcaggggcctggcgctcgtccctgacctcggggcctccagcaaccagacccctggctttagcggatgagctaccaattctttttaaagcactgactgatgcgtggtattaagcagggacaagtttgcggcctcactgccctttcccaaaggaccagggtgcctcttcccggaacactgtgtgtgcctgcgtggaggggaaactgcccccgcttccctctcttggggtgcaaaaatctgggccagaggtcccactgcgtggccttccctattcccctctgctttcctcccaagcctccatctgccgaggaggcctctccccttcttcaggagggaaagaggaatgcacagcagttgagccaagacccctccaggagctgcgatgggggcggatggtggctgggagcagagacacatcctgcgggcggcgggtggcacaggctgggacgtgttcttagccagtggctccaccagcttccgcgaggccgaatcctgcccttgccagtcatgagctgaggcaactcctttcccgtctgggcctcggtttcctgtcaggcactggatgaaatcccttccagctctaagatttgggatccgagggctcgctctctttccctgcctgtggggttggccaagccgggctcagccagctccgctctaagttcgtggaacttgccagcttagcctggctcccgcttatcgctgctccatcacaggaaagactccagttcccagggcagcccccactcttttttttttttttgcaactttcacatcacagacagctcagctctcagaagacccagggccacacagaacagtgggatggggcaggggtttctggaatcccctcccattttcacttgggtgctgcctcagcacaaatttcccaggctcctttcacaacacacaacacacatacacacaaacacacacacgtgcacacacacacacacatgcacccacagatatcactccccagtggctgactcttaggaggcatccctcccccaccctgatttctgggggtgactcacagaagcagtgtgcccacttaggagtctctggggagaagattcctgaggccgagagggtccttgttctcttcttgccctcggctcagcgggcaccgggagaagaatgcgatcccggagactgcaccgtcttaaatatagcagcactgagacagtacaatgacaatggatgagaactatggcatcggggacagggggccaaggggaggggccattccgtgtctccagcctgctgggcagcagcgacaggtggagctgtccgccgcgtccccccacactgctcctcctctcagctgggtcctttctgcccaacccaagcccctgttaaaatggaaaggagggaacggctcaggcatggtcgtatggagggcagatcccgtgcggcgttctcagctgtcgggagttctgatctgaattctgccccggctgactgggtgccctggggaaggcgctcagcttccctgaactgactgccttctgaaaaacggagacagtgagactgggcacctggacttcatgaagacggtggaaggaatatgacctaaaagtgagtgtttcgtgctcagaagttgtcactggctaaaacagcaatgtgtggctcctggtccctccaccactccggtagttactacacggcccccgccctgaccacagtcatgtgtgtgtggtgtggtgcaggcaggaggagctggggagccacctactgcttcactgtgcaaactgctcaggctgccagagtgtcccctgaagggccttcttatagggtaaacgcacctgacagggataactgaagcacgctccaagaatgaccctgtgtggaagacctgaatatgtgttccgagctaaggaatctggggagtagccaacccgtttcttacctacgatgaatatctgagcccccgtcccgtcccttctggtggaacgctggccatacaggggattgaggccctgagttttgggttaaatgaagattgccaggtggaggtcattaggggatggtgtaaagtgaaaatgctctataaactgcatgctgtttgcaaggggctgaggttttcctgcccagtcggccgccactggtatgttgtccagcccgccgcccctggaccatttctgtatgtaaggcggttctcctgtccagttcatcaccagtggactctctctcctgtaggcaagcccctaacaaacccccacgttccttcctttccttccttcccttccttctctccctttctttttctttctttctttctttctttctttctttctttctttctttctttctttctttctttctttctttctttctttcttctttctctttccttccttccttccttctttccttctttccctccccccctccttccttccttccttccttctctctctctttctttctttctttctttccttctttccttctttctttccttcttgagtcagagtctcactttgttgtccaggctggagtgcagtggcatgatctcagctcactgcaacctccgcctcctgaaacccccatgttccgtttgctggctatggatcttttctttggcctctcaaacctggtgccttccctactgaggttaataggtgttcggcaccacacctcttcccaccctttgccctctcctgccattccctcagtctcaattctttccccctcacattcattggcacctaccctatgccagaccctaacctacaggggaagtcaggcacttacgacaggaggtgatcaggaaggtgcacctgggtcgagtctcagaggatgagccggtgaggggaaggctgtaccggcccctagccagagagcacagcttccctccctcaccccttcctgcgacctcaggtggccacccacactacacctgtcactcttgctggtgcctcagggactcctcactcgagagaaggagagagagagcacaagtgaactttgcaggcaaaatctgaatcccctgccctatttgaaaacccctttctaagctcttctgtggctctctcttacagcatcttttgggagagaacatttctctcccatcttctattgacccaatcgaacaagggctttccaagactcatcttcatacatttgctgtgagggatgagtgtgagtgaatccgtacgaacagcaaagagggctttg

SEQ ID NO: 1347 - DNA, 4001 bp, Homo sapiens
ttatcagactatatatatatatatatattttttttttttttttgagacagagtctcgctctgttgcccaggctggagtgcggtggcgtgatctccgctcactgcaagctctgcctcccgggttcacgccattctcctgcctcagcctcccaagtacctgggactacaggcgcccaccaccacgcccagctaattttttgtatttttagtagagatggggtttcaccgtgttagccaggatggtctcgatctcctgacctcgtgatctgcccgcctcggtctcccaaagtgctgggattacaggcgtgagccaccatgcctggcccagaatataatattaatgatactccttggggttgtataagacaataattgtaaccatcatcaggaaccaataacctttgtaatcctgcttgttaccacaagtgccaccagtagacctaggcctcaactaaaataggaagaaagagaaaaggggaaaaatgaaacacaatcagaaagataaatctatggaagaagcatacagccaatgccctcaggtgaccaatcttcagtgtttccaaggccagctcatttctttctagactgcagataagtatccctgccaacctatttcattaacttgttgcgaaaagtaaattaaatcaaacatgcaaaagcacttggtcaagatttaaacactaaatgaatgtcaacaagtattgttattaagggctccctactcatctgcaaagctttgagggacaatgaccatatgagtttaatcacccctcacgtctttatagggctttagagttcatgatacacttctaaacacactatcttagtgcctcaagcgctgggttagtacttctcccctgttcacagaggccctaatattaggctgaactacatgaagttgccgctttatagaacaaaaatggtctaaatattggcaatttcatatggttcaagctaatacagttctaaggaaattgtacataattataaacaacatagctggctgactttagaactcaggctttctgattcctggctagtctaggactcttcatgactaaaaggagactcatttttgattcagaaagcaaggagtcaaaggaggttctgtgtcaaatcacactgggctgtttgttctgctggaacaggtattttaaaaaatgtgatcccttactggattctcacagtactgtccccgagggtaacaggatggtaaagaatacattcagagggcacctaccgtatgctaaagcatatctcataatcatttcatttgatcctcccaattacatatcatgactcccagtttaaatatgagcagtctgaggctcagacaagttaagtgtcttgcccaaggtcacattgctattaactggtagggcgagcaaatgcagaaggaaaacccagaactgtccaactctaaaacctggcccatttaagtcaacctgcttctcgggaagttttacaactatccccatgtggaagaagggatgaaacgactcgcccaaggtcacacggctagcaagccatagaacaagagtccctgacctcaggtctcgtccgtagccgctcttgttctagttactgtcgatgagatcctgaaaaggagggaacggaagaaggaatctaaatgtaaatcaaacgcaatgtggtaggcgaaatcggtgccctcacagcatccggcaaaaggtgaaagcgacccaggagtacctgagctccaggtaaccgccctgcccgctgggcttgggacaagccggcgggcgaggtgcctcccaggccaacaagagaccctggcccaggggacagtcttctgttcccttttcccttgccggacctgcagctttcccagggcccgctccttcaatccactcccctctccgccccagagagacccggtctctaagcctcaccctggctgtgcccccgccgccgctaccacgtccccttcgatatccacatccgcctcttcagccgccatgatgggacctgaccccgtccgtcctcccgagagatcccgcgagacgaagatggcccgggggcagggcctaacgcgtcacggggcgggattgaagcgtcgtccggcccctcccgtgccgggaggcggggtttccagagcaaaggcgcccccagaggcctggggcttggtcctttctaacttgttgacatgtagagaccttgggaagtggcccacgcctgagctttttttttttgagagggagtttcactcttgttgcccaggcttgggtgcaatggcgcgtatctcagctcactgcaacctccacctcccgggttcaagcgattctcctgcctcagcctcccaagtagctgggattacaggcatgcgccaccacgcccggctaatttttgtatttttagtagatacagggtttcaccatgttgcccagctggtctcgaactcccgacctcccgacctcaggtgatccgcccgcctcggcctcccaaagctctgagattacaggcgtgagccaccgcgcccgggccctcctgagcttctaagagcttctgttcttgcacacattctttgggacctcactgctctcactgataaaatggggataacagcagtatctttctggactgatgaaaaagtcaagctagacccgctttgtgaactgaaggttgcatacctgctggttatttaagtctctctctttgttttttaaagaaaagggtcgtgcagcacttatgtgaagtcgttcagcatttcacctaagtgctgaacaacttttattttaaaattcaacaaatatttaagaatataacttatgattgtgtaatttattttgtagacgtctttgcaatttaaaaatcacgctcatgaccattaatccttacagtgtcccagtgaggtaggcagagctaatatcaccagttatactttacaggtgaggtaactgaggcctggagagctgaaatgactgtccaaggacaggtagcttcaaagacagagccaggagtagaatccaggctttgttgaccctctactgagtgctcaccatgtaacaatcatgttgttagaaattggaggataaacaccacttctgtctagtttatagtttctcaagaaattagatactgacagccagatgcggtggctcacacctgtaatcccagcactttgggaggccagggagggcggatcacaaggtcaggagttcgagaccagcctgaccaacatggtgaaaccccgtttctactaaaaatacaaaaattagctgggcgtagtggtgggcaactgtagtcccagctactcaggaggctgaggcacaagaatcgcttgaacccaggaggcagaggttgcagtgagccgagatcacgccattgcattccagcctgggtgacagagcgggattccatctcaaaaaaaaagaaaagaaaaaaaaacccttctgcattcccctgccttagcagctatcactcacaccttgtaatttttcatccgtctgccttctgcactggactgtgaattccttaaggacaaagaccacgtctgctagtccttacactaccaatattcagcatagtgacacatagcaggtgctcaataactattgaacagaggaatgaatgaattaattaattaattaaatgacctcacttctcacactattcccaatttgtcccatctcacctttgttctcaggctgcactctgaatatgatggcaaaagatggagagaaagaattgcaaagagggagagcccagttcagaaaccaaacactgctagggcccattctcaggccaccatgggagtgctgcttctgttgtcagtgggcttatccagtaaccagtcccactggtaacaccatgcctggaacagagtaggcacttaaagatgtctgttgaatttaatttagagcaaaattagggtttcttaaaaagatgtaatgggctggccgggcgcggtggctcacacctgtaatcccagcactttgggaggccaaggcgggtggattaccaggtcaggagattgagaccatc

SEQ ID NO: 1348 - DNA, 4001 bp, Homo sapiens
aacaaaaagactggtccaagtgaggcaagctgtggtggctcacacctgtaatcccagcactttgggaggccaaggtgggctgatcacgaggtcaggagttcgagacaagcctggccaacacagtgaaacccgtctctactaaaaatacaaaaattagctgagcgtggtggtgggcgcctgtaatcccagctactcaggaggctgaggcaggaaaatcacttgaacccgggaggtggaggttgcagtgagccgagattgtgccactgcactccagcctgggcaacagagctagactctgtcttaaaaaaaaaaaaaaaaaaaaaagactggtcaaagtggcttacgtctgtaagatcagcactttgggaagtggaggcaggaggatctcttgaggccaggaggttgagactagcctggacaacacagtgagactctatctctacaaaaaattttataaatcagctaggtgtggtggtgcaggcctgtaatcccagctactcaggaggctgaggtgggaggatcaattgagcccaggaatttgaggttacagtgagctataatcatgccaccataaacacgcctggaggacagagtgaggccctgtttctaacatacacacacatatacacacagaaacatctcgagaggacacctccaaatgatgaagctattttgttgggtactgcggtggcacctgtgattcctcaagtagcttggaatcagcgtgctaacaccataaagtggctgcaaaagtcccagtgaagtcactgctgagagcaaacaggccttacagagaagttccaaggggacaggaaatttccagaggcttgagaggacaatgttcaggggaataagtacttgaagggaattatctaacaaggtgttaaagtaactagcttcttagacaagatgacatcaggaggaaaaaaaaacttattaaggcaaacatgtcagtttcaggccaactaaggctgtcagagagacatggaacacaagaagagaagagttttgaaatgtattcccatcaagagccaagaataatgaacttttgaatgtaaaacttagtgtgttccaaaacaagaaaggaaaaataacttgttactcggaatcgaagccaaaaggaatctcattgcttggggaggagggatgggagggtgggggtggtccttggcctgggaaggaaaactccaccaggccttcggagctgggcacgccctgttcccacaattaagaaaaaaaacgacgacctagagctcaaggccggtgctgacatctgacctactggatggcagccgcctgtaggaacatcaccatagactattggaattttctggcaagtactgggcactaaatcagagatgtgtttttagagaattccatgccaatactgctgtatagaatcttttattcatactttcccactaggtttgggcccctctaagctttcacgagtcaaagacccctcctgcttgctgaaaccacccacggaaggccggacaccgaggacctggccgcccaagcagaggcgactgacaagcgcggtccgggctggacggccccaccttccccgcccgggagagccaggccggacagcggcctccctcagacccgtccccaaggccgagcctcgccctgggccgtgctggtgccccattcgggacggagcggtggcccgtcagcacttccacggcctcctcagcaggccagatgggcagggccggcctggtgtctccccgcctggccgcgcgctcgcgggcagcgatgaccccaggcagcgggcgaccccaggcggacggcaggccgggtctgctcactcaccgttcgctgccgcgggcgcctgcgggggcgtctacatgccggaccgagcccgcaggccccgccgccgcgccgccgccagccgtcgctacctggcccttggcgccctggccgcctgttgccccatggccgcccggaccccggcgccggcgccgccgagcagcaatgcgccgcgcccgcccactgcgcaggcgcacccgccacgcatgcgcgctgccgcgcacgtggggcgtcccgcgcgtctgccgggtcccaccggcgccgggacaccccgcgcgggcgggaggcggcgggcgtggcgggaaagaggcgggcggtggggaagaggggcgaatcgcggtggagagcagtgaccagggagtggaggcgggcagcggggacaggggcgggcgtccgcgactcgggtaggcgggggtcggcgccccgaggagggcggcccccggctcccgtccccactcacctgccgcgtccggagggcgcccccgggtccgcccgccacgtctacgcctaggcgcccccgacattgtgatcccagcccggcgtcccgcccccaactcaccgccaccgcgggcgggacctcccggaccacgtgggccggctcaggggagtgcaggtgccccgcgagagctggccccgcccgccgccgcttccctaattaccgggctgtgacacggtgtgggccgagccggatttgggaaccgaaacttagagcagctgcggcagcgctgcgctccctcggggctgtccgtcggggctgggagggcggccctgcgcctgggggaaccgcgatcggcctcacgcccacctctagcggccaggtgcgccttgcacgcccacgaacgtcctcagaggtctacgcttgggatcccaaggctggcagtggagggaggacccggtggcctggggcacctctagggggaccagggagccgtgttttgcgcaccccacaggctggaggactcggggagttgggggaggaggccaaagccacaggagcggactttgtagtgtttgttggaactgcgggtcccacccagcccgcacttgctgaactggtggctgctcatcagcgccttcaggcctcaaatatcccaataatgtgccctatacccagttctcagctctcgagtcactgtcaggtaaactggcaatgcacgaccagctgctctaacctgctggtcccccaggtgccagacattgttttgtttttctgagatagtgtctcattcgtcccccaggccggagtccagtggcgggctcacggctcactgcagccttgacctctcaggtgcaagcgatccttccacttcagcttccctagtagttgggactacaagtaggtcccgccacactcgactacttcattcatatatatatatatttgtgtgtgtgtgtgtgtgtgtgtgtagagatgaggttttaccattttgcccaggctgggtctcaaacttcacccgcctcggcctcccaaagtactaggattataggcgtaagccactgcacctggcccagccattgttttctgaggttcagtccctgtctatactttctgtgtgatcacctggcccagggtcggtgtggacctgagtcctctgcagcccttccccacacccgcatacctgctctctggtcaggactcctgggacttgaatccagagacacggaacacggcctggccaagtcttcctgaaaaacacagctcttcagttcaggaccacagtgaagtacagggcaccaagggtgactggaaagggaagcaaggatcatgagaacttgggggatttcttaagctctgtaacttctcccggggttattttgcaaacccaactgtttcaaagtgaccaccagccacacccacagaagcggccttgagctgcccagttctttttctttggcggggggagagggggcggataagatcattaacataataatgcgtgagctgagtttttgcatatgatcattagcataataatgcttgatctagatggcgcacccacaagccaggcactgagccaggcctcagtagaatcttctagagtggaggcagtcaactgcttctgcagaggcaaccagtgactgtcgtgggccccaggtcacacagcaggtgcccttcgcgtgtcccgctgtgtagggagctccagcagctgccccgtctgtggcatgaaaaccctttgtctaccctg

SEQ ID NO: 1349 - DNA, 4001 bp, Homo sapiens
ccctcagacccgtccccaaggccgagcctcgccctgggccgtgctggtgccccattcgggacggagcggtggcccgtcagcacttccacggcctcctcagcaggccagatgggcagggccggcctggtgtctccccgcctggccgcgcgctcgcgggcagcgatgaccccaggcagcgggcgaccccaggcggacggcaggccgggtctgctcactcaccgttcgctgccgcgggcgcctgcgggggcgtctacatgccggaccgagcccgcaggccccgccgccgcgccgccgccagccgtcgctacctggcccttggcgccctggccgcctgttgccccatggccgcccggaccccggcgccggcgccgccgagcagcaatgcgccgcgcccgcccactgcgcaggcgcacccgccacgcatgcgcgctgccgcgcacgtggggcgtcccgcgcgtctgccgggtcccaccggcgccgggacaccccgcgcgggcgggaggcggcgggcgtggcgggaaagaggcgggcggtggggaagaggggcgaatcgcggtggagagcagtgaccagggagtggaggcgggcagcggggacaggggcgggcgtccgcgactcgggtaggcgggggtcggcgccccgaggagggcggcccccggctcccgtccccactcacctgccgcgtccggagggcgcccccgggtccgcccgccacgtctacgcctaggcgcccccgacattgtgatcccagcccggcgtcccgcccccaactcaccgccaccgcgggcgggacctcccggaccacgtgggccggctcaggggagtgcaggtgccccgcgagagctggccccgcccgccgccgcttccctaattaccgggctgtgacacggtgtgggccgagccggatttgggaaccgaaacttagagcagctgcggcagcgctgcgctccctcggggctgtccgtcggggctgggagggcggccctgcgcctgggggaaccgcgatcggcctcacgcccacctctagcggccaggtgcgccttgcacgcccacgaacgtcctcagaggtctacgcttgggatcccaaggctggcagtggagggaggacccggtggcctggggcacctctagggggaccagggagccgtgttttgcgcaccccacaggctggaggactcggggagttgggggaggaggccaaagccacaggagcggactttgtagtgtttgttggaactgcgggtcccacccagcccgcacttgctgaactggtggctgctcatcagcgccttcaggcctcaaatatcccaataatgtgccctatacccagttctcagctctcgagtcactgtcaggtaaactggcaatgcacgaccagctgctctaacctgctggtcccccaggtgccagacattgttttgtttttctgagatagtgtctcattcgtcccccaggccggagtccagtggcgggctcacggctcactgcagccttgacctctcaggtgcaagcgatccttccacttcagcttccctagtagttgggactacaagtaggtcccgccacactcgactacttcattcatatatatatatatttgtgtgtgtgtgtgtgtgtgtgtgtagagatgaggttttaccattttgcccaggctgggtctcaaacttcacccgcctcggcctcccaaagtactaggattataggcgtaagccactgcacctggcccagccattgttttctgaggttcagtccctgtctatactttctgtgtgatcacctggcccagggtcggtgtggacctgagtcctctgcagcccttccccacacccgcatacctgctctctggtcaggactcctgggacttgaatccagagacacggaacacggcctggccaagtcttcctgaaaaacacagctcttcagttcaggaccacagtgaagtacagggcaccaagggtgactggaaagggaagcaaggatcatgagaacttgggggatttcttaagctctgtaacttctcccggggttattttgcaaacccaactgtttcaaagtgaccaccagccacacccacagaagcggccttgagctgcccagttctttttctttggcggggggagagggggcggataagatcattaacataataatgcgtgagctgagtttttgcatatgatcattagcataataatgcttgatctagatggcgcacccacaagccaggcactgagccaggcctcagtagaatcttctagagtggaggcagtcaactgcttctgcagaggcaaccagtgactgtcgtgggccccaggtcacacagcaggtgcccttcgcgtgtcccgctgtgtagggagctccagcagctgccccgtctgtggcatgaaaaccctttgtctaccctgggcctgggcactgcctgcaggagagcttccctgtttcagagatgagaaaacaaaaccagggctgtggtttccttcagctgacaggttgtgcaatttctcagggcaggccccggatatgaccttgaagattcaggggccaagatctcacacccacacctcaccccaggcctggccagcaataactaagaccaaagctgggaaggctccttagggcacccagaatggtccaagaggcagctttgcttgggctgagaccaaagggaagagatgttcccgcagcaggaacagaagggtccagggctatcatgggggcttctgccagatggtgcacaggaagaggctctgccttcaagggattgggggtcaggaaaggccccctcctgcctgaccaggccccagggatggggcagcagtgggtggcatcccctgccctgaccttcctcagccccagggctgccattgctcaaggtggcagtggactcttcacataatttcgcattgttttttgtattctttaaggatggctcccatgttgtttacttcagaacccccaaaacctggacccatcctcttctgggggtcagcagggatggggagggtggagggagaagggggaacggaggccatgagggatggagcaggatggggtgcactggggtacaggttgctcctggggaggctgaggagagagggaagttggcttcaggtggcctggctccagtaaactgggtgaacgaagtctgcccagaacccacaagggtaagtggcctggagcctggggaaaggatgactgggaaggactgaggctcccagtgaaggacatcagtatggcaggctatctggtcatctcatccagcctccagccagcacccggcacaggccctgcccaggctgaaagccaggataggggcgtctgcaggggccagtgtctggatctgctcacatgacagtcttctgtttggcctggtttggggcgaggggcaacctctttcccaggatgccagccatgtgcagggcatactgaggattcaacagtggaaaccaaagtccatcaggtgttcaccttctagtggggcagacgggcaagaagcagaattggtgggggcaggcaggggttggggtacagttttgaccaaggtacccagggacaagtgtttctctctcaggcagaggcagcagcaaggaccaggaccctgaagtggtgagagcctagagtgggcggggatcatcaacagtaaccacctggcaggactgggactccctgtgtcctcacaagatccttaccaagcagcctagtataagacgaagtctcgctctgtagctcaggctggagtgtagtggcatgatctcagctcactgcaagctccgcctcccgggttcaagccattctcctgcctcagcctccagagctggagttacaggcgcacaccactgaacccggctcattttttgtatttttagcagagacggggtttcatcatgttggccaggctggtcttgaactcctgatctcaggtaatccatccacctcggcctcccaaagtgctgggattacaggcgtgagccacagcgcccggccacagcctggtacgtttattg

SEQ ID NO: 1350 - DNA, 4001 bp, Homo sapiens
gcagaccccaccctcctgcagggaggttcccgactcacgggcgctgtggtcagagacctggcatcgtggcctgcatgcccgcccccccacgctcacgctgaaacttcatcaccaacgcgccaggaggaagcaggacctttaagagatgactgggcggagggggctccctctcaggaattgactaaggctgttatttcaggagtggctttcctgggcgccgcaacccccacgcctgctcttctgaagagaagacacagcaggaaggcccacgtcagatgtggccccttgatctcggacttcccggcctccagggccacgagcccaccagctcattgttggtcacccagtctggtgcttgccatggcggcacacacaaacccagacacccggcagatccccactcagtccccagttccagacaagcagccgttgcccagcacttgaggtggttcccatggtctcacggggcggtgatgtggatggaggcccccccaactccatgtgcaccccaggcccccttcccccctgccccgcgtgcctccatgaggtgcgtgcagagctccttgaacggctgcagtaggctggcatctctcatcttcttgatgacaaggacgctctttggggacttgttccacgtcagccgctggctcgcggggtcctgaatgtgcctttaggggaggagaaaagagttcacaccagctgcgatctccctcttgcggaaaaggtgtatgacttagaaaataaaaaaaaaaatctttaaaaaggtgttttcacctcccagggaaacgtgctcggtggccacgggctcacagggcctagggtcgcgccacagagacagggtcaggggtcagtagggtccggagtgaccacctctcacctgcttggcccatcacacgcaggctcaggcccacaacccccacccgggcaccacgctgacccaagtgcacgcaccacagcccttcccagcccccggccacttgcctgcctggctcctcagtgacgctggtggggcagaaatgaccacgaaagcccatggctgggccactctttgcttgatgccctcctcaggcccccacgaaaacccaaaccagttgacatggtgactctgtccctaggatcctctgcacacagtttctggccccacgggagcccaggacccctcaaggacccgcttccccccctgcacacagctcactacctccctgcatgaacggactttaacctcactcactctcacagtaaaaatcacaggtttaaaagtccgtggcagccctgacacagccacccgcgctttgctggctctgaccccgaccactgtgcccggtgtttctccacaggcagggcccaccccggtgggattcccattaccacgttagtcacagaaaacatcccagcccagaaccgggaacacacaccacggagcctgctcctgttcccagaagccaagggagggcgcagcggggctggccaccgtcgtcagcgctcaccgcctatcctcagccccaaaggacaagttcttataccaccgcgccagccagctagttccaagttgcccaatcgagaaagctgctgcctgccatgcctcttcccagcagtgacttccccaggagtgtgaccgtcccactaacacccccagaaccacaacacagacgccgatggcagccacagggccacagaccttagcccatcgcttgtgaccttcggaagctggtcagcactcaccctgtgcaggcattactgggaggcgtggggtcactcatgccatcccctatgagctcagcacctgccgggtcacacatgtggctcgcgaggtagcccctgcctgctgggagccggccagtgtgtccacagcatccaggccacgcttggcgaacacgcggccgccccatcggtatggtcctgactgtgcgcccacactagaagcctaagctcttcatactcaaaactcaaagcaaaacacaattgtgatgagacttggtaaagttgttgtaaaagcaactaagtcaaaagagcttcctacacttataaaaatcaaacaaaacaaaacagtttcctcattggtcacatggtcctcctgcctaatcccttctgaaaaaaagtcctcagttcagcagcaaagaggccacacttcagctccctgctcctaactgagccgggtgggaccaagccctctgttcccgtggcctcagacctggccaagtacccagcctccagcctcgccccagcactgcgccagccaccgctctggcccgcggaaccggctgggccccagggaaggcaccctcaggccacagtcaggtggaagggcgttccctgcctcctagcccgctgcgtcactctgcttggctccggcccaagggcgtgcaggtggctcacggtcctccggcctggtcagccagcaaagcccccgccctgcacacggctccccctgctctccccgccaacagtcaccactgacccagtggcctggcctacacccattccagccctgaggctcagctgagcccagccagagccaccagcagcggcgtcgtacaccggcccaggcacccaccgctgtgtgtgaccacaaaccagcgcctcgacctcttcctgggtcacctgcaaagcaggacaccagcccttgcaggcacgcacggctgtgggtactgcacggagagggcagggggtggcgtgaagcttgcaggcacacacggctgtgggtactgcacggagagggcagggggtggcgtgaagccagcatggccacagcctggcccgcctggccagctcctactgagactgtctcacacatgggtggccacgcacactgtgacacacgggcactcacgcacctccacaacacaggcccaccaattccctggacaacaaaacaggaagcgggtgccctcctcaccaggcgcccccacagggtcttgctctggactatcagggaagacggaagttcagatgcatgggaagccctgcccctccacagcggggatgggaagcgggaggttatgatcccagagacacagagcccagagggggcgtgctcccatgggggtgccgagaaagctgcatgcccctcaaggctgccccacaaacccaccgcttcctcctgcggggctgtctggcctcgggcagctcggggaccactgagtacgccctggtctgagggctgaggcagaacatgcacctgtccggtgaccccgccctggcccgagtgactgacggctggtgaaggcagcagctgagatgcgagtgacaaaggagtggctctgccaggaccaggaagtgcagggagggcaccaggcagcgggggagaggcccggtggggtgccagggacacagcaagcacaggatggcgggacagagccacggcggggccgggagggcagtggagcactctgggtcacccacgtggctgctgtgcagggaagggatggtgaggccgcggcgagtggtcaggagtccacacagcggagggcagccgggcaatagtgcaggggagctgcttggatattttgggatcaaagtgacagaatctgcagatggactggatgagggaaagcaaacaggggtcgggccccccgcctcaggcatttggcagcagtgacaggtcacagacactccgggaaccagtggcactgaaagggctgggcctcaaaagcacaagtgcgagtcacttccatcctaaggggctccgtcagcgtctggagcagcaaggccaacccccgtcctgcctgggacgcacgctgccgcggggcccacactttgcagagcagctcctcggatgactcccccgtggctcctgggacctgaacttcggtgacagcccagggctggggcctccgtccctgctgtgcgcccccagcctccatggcaccggtgcctgtcagcaaagggccatgcagtggccgcccccgtatcacacggccgcattgcgctttctggtcaacagtccccagcagcctgcgcgctggaacactcggcccttccgcatggtcctcccttgcaga

SEQ ID NO: 1351 - DNA, 4001 bp, Homo sapiens
ttgaggccaggaggttgagactagcctggacaacacagtgagactctatctctacaaaaaattttataaatcagctaggtgtggtggtgcaggcctgtaatcccagctactcaggaggctgaggtgggaggatcaattgagcccaggaatttgaggttacagtgagctataatcatgccaccataaacacgcctggaggacagagtgaggccctgtttctaacatacacacacatatacacacagaaacatctcgagaggacacctccaaatgatgaagctattttgttgggtactgcggtggcacctgtgattcctcaagtagcttggaatcagcgtgctaacaccataaagtggctgcaaaagtcccagtgaagtcactgctgagagcaaacaggccttacagagaagttccaaggggacaggaaatttccagaggcttgagaggacaatgttcaggggaataagtacttgaagggaattatctaacaaggtgttaaagtaactagcttcttagacaagatgacatcaggaggaaaaaaaaacttattaaggcaaacatgtcagtttcaggccaactaaggctgtcagagagacatggaacacaagaagagaagagttttgaaatgtattcccatcaagagccaagaataatgaacttttgaatgtaaaacttagtgtgttccaaaacaagaaaggaaaaataacttgttactcggaatcgaagccaaaaggaatctcattgcttggggaggagggatgggagggtgggggtggtccttggcctgggaaggaaaactccaccaggccttcggagctgggcacgccctgttcccacaattaagaaaaaaaacgacgacctagagctcaaggccggtgctgacatctgacctactggatggcagccgcctgtaggaacatcaccatagactattggaattttctggcaagtactgggcactaaatcagagatgtgtttttagagaattccatgccaatactgctgtatagaatcttttattcatactttcccactaggtttgggcccctctaagctttcacgagtcaaagacccctcctgcttgctgaaaccacccacggaaggccggacaccgaggacctggccgcccaagcagaggcgactgacaagcgcggtccgggctggacggccccaccttccccgcccgggagagccaggccggacagcggcctccctcagacccgtccccaaggccgagcctcgccctgggccgtgctggtgccccattcgggacggagcggtggcccgtcagcacttccacggcctcctcagcaggccagatgggcagggccggcctggtgtctccccgcctggccgcgcgctcgcgggcagcgatgaccccaggcagcgggcgaccccaggcggacggcaggccgggtctgctcactcaccgttcgctgccgcgggcgcctgcgggggcgtctacatgccggaccgagcccgcaggccccgccgccgcgccgccgccagccgtcgctacctggcccttggcgccctggccgcctgttgccccatggccgcccggaccccggcgccggcgccgccgagcagcaatgcgccgcgcccgcccactgcgcaggcgcacccgccacgcatgcgcgctgccgcgcacgtggggcgtcccgcgcgtctgccgggtcccaccggcgccgggacaccccgcgcgggcgggaggcggcgggcgtggcgggaaagaggcgggcggtggggaagaggggcgaatcgcggtggagagcagtgaccagggagtggaggcgggcagcggggacaggggcgggcgtccgcgactcgggtaggcgggggtcggcgccccgaggagggcggcccccggctcccgtccccactcacctgccgcgtccggagggcgcccccgggtccgcccgccacgtctacgcctaggcgcccccgacattgtgatcccagcccggcgtcccgcccccaactcaccgccaccgcgggcgggacctcccggaccacgtgggccggctcaggggagtgcaggtgccccgcgagagctggccccgcccgccgccgcttccctaattaccgggctgtgacacggtgtgggccgagccggatttgggaaccgaaacttagagcagctgcggcagcgctgcgctccctcggggctgtccgtcggggctgggagggcggccctgcgcctgggggaaccgcgatcggcctcacgcccacctctagcggccaggtgcgccttgcacgcccacgaacgtcctcagaggtctacgcttgggatcccaaggctggcagtggagggaggacccggtggcctggggcacctctagggggaccagggagccgtgttttgcgcaccccacaggctggaggactcggggagttgggggaggaggccaaagccacaggagcggactttgtagtgtttgttggaactgcgggtcccacccagcccgcacttgctgaactggtggctgctcatcagcgccttcaggcctcaaatatcccaataatgtgccctatacccagttctcagctctcgagtcactgtcaggtaaactggcaatgcacgaccagctgctctaacctgctggtcccccaggtgccagacattgttttgtttttctgagatagtgtctcattcgtcccccaggccggagtccagtggcgggctcacggctcactgcagccttgacctctcaggtgcaagcgatccttccacttcagcttccctagtagttgggactacaagtaggtcccgccacactcgactacttcattcatatatatatatatttgtgtgtgtgtgtgtgtgtgtgtgtagagatgaggttttaccattttgcccaggctgggtctcaaacttcacccgcctcggcctcccaaagtactaggattataggcgtaagccactgcacctggcccagccattgttttctgaggttcagtccctgtctatactttctgtgtgatcacctggcccagggtcggtgtggacctgagtcctctgcagcccttccccacacccgcatacctgctctctggtcaggactcctgggacttgaatccagagacacggaacacggcctggccaagtcttcctgaaaaacacagctcttcagttcaggaccacagtgaagtacagggcaccaagggtgactggaaagggaagcaaggatcatgagaacttgggggatttcttaagctctgtaacttctcccggggttattttgcaaacccaactgtttcaaagtgaccaccagccacacccacagaagcggccttgagctgcccagttctttttctttggcggggggagagggggcggataagatcattaacataataatgcgtgagctgagtttttgcatatgatcattagcataataatgcttgatctagatggcgcacccacaagccaggcactgagccaggcctcagtagaatcttctagagtggaggcagtcaactgcttctgcagaggcaaccagtgactgtcgtgggccccaggtcacacagcaggtgcccttcgcgtgtcccgctgtgtagggagctccagcagctgccccgtctgtggcatgaaaaccctttgtctaccctgggcctgggcactgcctgcaggagagcttccctgtttcagagatgagaaaacaaaaccagggctgtggtttccttcagctgacaggttgtgcaatttctcagggcaggccccggatatgaccttgaagattcaggggccaagatctcacacccacacctcaccccaggcctggccagcaataactaagaccaaagctgggaaggctccttagggcacccagaatggtccaagaggcagctttgcttgggctgagaccaaagggaagagatgttcccgcagcaggaacagaagggtccagggctatcatgggggcttctgccagatggtgcacaggaagaggctctgccttcaagggattgggggtcaggaaaggccccctcctgcctga

SEQ ID NO: 1352 - DNA, 4001 bp, Homo sapiens
gaggtatttgttgcatacttctacctcaaaaaacaaaaacaaaaacacctggccctgcgccgtgcctcacgcctgtaacctcaacactttgggaggccaaggcgggaggactgcttgagtccaagagtctgagaccaacctgggcaacattaagaccttgtatctacaaaaaattggccaggtgtagtggcacacctgtagtcccaagctactagggaagatcagttgtgcccaggagttcgaggttgcagtgagctatgatcacaacactacactccagtctggatgtgagatccagaccctgtctgcaaaaacaaaacaaaaacacacagctgtcagtgaaatactgactgctagagctgtctaggaaacattataaaaagcagctctttttataatagctatagcacgactcccaagcccaatctatactgcttatatcgaatcaatggggaaagaggcaggtaatgggagtttgaaattaaaattgtatttcccatgagttcccaaatgattctcagggtgacttgagaaccactgctctacaagaacgcagagagaaaaggtggtaagcagagatatacgtaaatctctaactataaacaaacaaagacataatcatgacagagtgtaagcctatagaatatcaatttaaaaaacttcacagcaaccattccttttacagggaaggcaactaacctctaaagcgcacaagattagaaaaaaaaatagaaccagatgcctaaaaaaatatggcaagattgggaaatcagacctactgtatgggaaacagcacttgtttccttgaactcgtgtagtgtttccctccactgttcaaaaaacagattacgcctgagtggcactgtgccgctttcaaaacaatcctatcttgtttccctccagtccttctccacttcgtgcatactactgccgattcacctagcaaccaaacagtgctggtgagagctccagacagcgcttcctgaagacgctttacgtccggtaatgttccccccaaacagacaccacctccaaagtctaaagaacgacaatcctccccaccacaggcaggggctcacggagtcgcggggagcgataactatctcccagcacaagacgtgagcgaggtgtcggggggaactagcctcgccggccccacggagatagtccaaagctcctgctggagccgcagcggccccaaacaatggagttttcccgcctcctcaaggccccgccccctgccccagggccggcgagggaagcgaacgcacgcgcgcaaaaccccgccctcagcaaggccccgcccaccccgacccctcaggtccagcctccttcctcgtgcaaggttttttttcccttttggcgccaaatcttcgttggttatattcccgggttatccaggggttctaccagaggcacacgctggggacagaaggggcgtgaaggccaacccgcgcgccagggccccgcctcccggccaaccgccccgggctgggggaggaaggagaggggcaggcgaaggatacagccgccgctgcccccggcaagatggcggccgcgaaaagcggggcagggggcgccagccgaccgccgttaccgctgctgcgcgaggctctcagcaaaagaaggactgctccagtgaccaggccttcccgaacagcgacagctgctcttgggaaggcaagtactcccgcccaccggtctgccccttctccggagcccccgtccattagccctccccgcggactggccagtgccttaagctttccacagtcccgcttacttgtcggcagaaaccagctccgcggcgacggcggcagtggctgtggactccatggccatcgttcccctgaggtggcgaaccagcgaacggaatagagcctgcgagaaaaacaggcaatttgggacgccagagactcactcagggacagaaaatggcagattagagaccccgcgcggccggggcccttttatatacgaggacccttcgccccgcccatccacttccggatcctccccctcgggtttaaagggccaggactcaccacccataccctccgtcccccgccggcctaccactatctagacacctcctgccctctccatatggctccgcgggattgtttccctccctagcccgacttctccaataaacagcaacttcctgcttctccagcaagtcgcataagaagaactggaatcttgacactacaactcctgacaggacgcccctgcggcatccagagacagggaagccagtgctgctctgcatgttcagggcgagtagctgagagtctccttccggcctggatactgaggaaggtgacttagactttctctccgtcctctgagtcgtaacggacggacacgcaagggccgaggacgggtacaagcagcagcgactagaactgatctgggtgagatctaggcctcagcaacaactgacgcaaaaagattttgttctaggattggctacagctgaaactaccgcgcttgattcaaagctcggggcttgcagcgggaggcagctggctcctccctctgaacccgccccctttggctggcccaatccgctgatcccatcctcttaggccctgcccagactccaaatctaccagaattaatgctcccagcgctgtttgtccactcctgcctatgatttgctgtgtgactactactcgtgggggtaccgtgattagacgctttaaagctattagctatcttgtttaatattaacaatgctactagtgagatcagtgttagtctgtttcttagaaaaataaaccaaggggccggacgcggtggctcacgcctgtaatcccagcactttgggaggcctaggctggtggatcacgaggtcaggagttcaagaccagcctggccaagatggtgagacccccccgtctctactaaaaaatacaaaaattagccgggcgtggtggcgggcgcctgtaatcccagctactcgggaggctgaggtaggagaatactagaacccggaaggcagaggttgcagtgagccgagagctcgccactgcactccagcctgggcaacagagcgaaactccgtctcaaaaataaataaataaataggccaaggttccaacctggccaacatggtgaaaccccgtctctactaaaaatacgaaaattagccaggtgtggtggcaggctcctgtaatcccagctactcgggaggctaaggcaggagaatcacttgaacccgggaggcaaaggttgcagtgagccgagatctcgccactgcactgcagcctgggcaacagagcgagactccgtctcaaaaaaaaaaaaaaggggaagctgtgacttgttcagaaagttgcaagacaaatcagttatggaaagcagtgtgcctcatttcctgcaaatggctgagtgaaaaataactggcaggctaaaaagctgcaattcctcacacctggagtatcatccattccttttcaccatggcccagtctacgctgatcggagtaggggtttttatttccctttaggttccagcatattgggaaagattcctggagaggattcttattccaatctgtcaaggctcgaagaggttgaaatctttggggctagagagctggacgtgaaaatgccaattcctatggcaaacatacatgggctcttccattattagctaggtgacgtgagccaggtcacgtaacccggattgtaatcgagtagctgggattaaggttaagtgtaaaatgaagacatattagtagccaccgcttaaggacattgtgagaattacaggtaattagcactgtgtagaattcacgctaagcactcattgaatggctaccacagtctgatgatgtggtaaatggagggtgttgggaggggagatctctccaaagtccttgcagccagggctagggcctgagaaaacctctgcaattactggtgtgaccgattcatccattaaattaatattcactgagcaactttgaggtacaagactttgtactaggttct

SEQ ID NO: 1353 - DNA, 4001 bp, Homo sapiens
aagggcaggttcccatgagatggagttgggtaaaggaaggaggcggggagaatatcaattcaaaagaaagaatgaggtagcctagaaaggctgttgagtaggaaggaaagagtgataggctcagagaaagggcattggggtcacttagaggacttgcacaccctccaggcattggggaagcaaagaatttaagagtagaggcagtgcaaatattgtttgggtggcaattataattttccttgggcacaccctatgtggatctgaagtaggctctagttggggtggcagaggtggagggaggagaggaggttatgaacagttccttcccttcaccttctccagggcccagtgagctgtccaggactcagcccaggatctcacctgaagtaagaggtccctacatgggtttattctctgctcataaactggttccttttatgacaccaccatacctaccagccattttggcaaagtgaccccaaggacccaagtcacattccaggggggcttcagggctgcattctgtcatactgtggtaggggaaaaaagtttggagtcagcgggcctctggcttccaaggggctcctggtgcccatggtcttgcagggcaggaacggaggcagaagatgcctctcgtttcaggccttgcccaattctttgcttttaccctagacctttgtgtgcacagttgtaattgagcccctggagggtacttggggctcccttcgagcaatatgaggacgcaggagcatgttacagggtgcaggtctgggctgcctgagatttgaggtgggagtggccacagcaccaggcatagggcccaacctccaacttcccaggtctgcgggaggctgaggggaaggagagtgtatatggggtgagaatagtgagatgggaagcctcccctgcccaccccgctaaaaaatcccagaaaccccagccccctttctcaggccggtggaatttcctaattctcccttggaagtgcagtttccaagtcagctcagagagtcccagggccagctgtggttacactcacttcccctttatgaaggagcctctgtgccttgccctcaccttacacgaccagtccctcactgtgcgtctccccaaattacccggctctccgatttttcaccccttcccagggtagagcaccaggcttcactctctctcggaagtatccagccagcagtacggtcacaaattcaacgtcccctccctcccccgtttcatccttccgcctcccaccacctcctttcaccccaggacgacccccggagcttccggaactagggtgaccttggcagggccgacctggggctgcaagcccctcctccttccacccgcctggtccccaggacccccgaccctcacaggccgggcccccacgcgccacagccgcaaccatcgaagttcaatcaagttgcgctattgtctcagctccgtccaggtctcctgggcgcctaagctcctttccttccctttccactccctagagccctccacacacccactcccagccccagatgcccgtaagccaaacgtccaggagctcggaggctccggcggcgcaggcactcctctctggcggaaaagcgagcgcggccaagaccctccttcttgcggaccccacacccactgcccctgagactgcagctgcggcggaactggggggctgcggcggggctgggggtgccacaaacccgaccccagctctgcggtctggcggtgaggccaggggggtgggggcgcttacctgcgggggaaattcaccgttcttccggatctgggcaggggcagatgaagcatcttccccggctcaggcggccattcaccgggtgggcacccagcgccccccaggaccgctctcgcctgacacccggggacacccgaaaaggtatgagctgtgggccacgcggagggtcggaaacctaaccctcgcctgccctccgctcccttttctccccaccaccagggcttgtacttacggctccagctgtacttaaagtgacagagccccatttccccgccgctgacttctgtcccgagccccggcgatgcaggctgcgagcgggctctttaacacccagagcaggtagacaaagagccaccgaagcctcctccgttccggtggcctcggaagcctggaggtgccgacggggctgggggctcgacctccacctgggctgctccgaaattaacccctgggatgccagctgtggtcccttgggcgctcttactcgcgctgcactggcaggagggggtgtgagcagcgagccacttctctctggggcacgggtgggtaaggagttggggaggcctgggcagaaccttctccatagagggcttcctcccggcctcctcctggctcctttccaggcttttagaaatttctaaaaatcggagcatgggtcagtgcattgcctaaaacaaggtccgtggagggatgtggtgggaaacgaaggtccgataggggtgcatattaccacaggttggctcacgacccttctgctcacagccgggagccaagtaggatggcgcgaccttccgatgtcctaacaacctcagggggtggggcctaacatctctccagcattcaggagaccacagattaggtgaggtgtgcttgctgggggaagattgtgggagagaaacaacagctcacgccacccaaggatctgtgtctttatccaggatgcattttcaactgaccggttaggaaaaaaacagtgggatccagtagcagggtcctcccattgggttcctcccccctgagggtcctcctggtaacttcactctcctggttccagagaaaggagccctgtggggggaattagcctgctgccctcacccttgcttcctccagttctcactcttggctcctggaaggggctaagtgtctatggttgggtcccaatgccaatgtgaactgggcaaactgggaagcctacattttagagatggacaaattatacctgcagtttctttaagcgacaaaaacaacagtagcatttttttaagccccctaaagtgctgaactaagatgacttgggaccacagagcagtagtctctagtgtttgggcagtttgatgtgactgagccacacatacagatccaggtcacatgtgttctcttaagcctatctttccaggcctcagtttttacagatgttaagggagaggtttgcactcctgaactcctcctcctcgctctcactgcctttaaagaggtctgggtggtgctttgagtcctaggaacaatcctttcccaagccccccagcaatgcaggctgcccctactattttcggcccacaggtcaatgcactttgggtaactgtacagcccctctgcccctactactctggctgcccaatgccactgacctggggctgcagctctagagtgatgaaccacagttcttagaggacagaaaacctcagcagagggacctctgtttctggagaatggaacagtttaagttggaggaagggtctttgtttctgaggttgcacattgtggccaagttttccaaatatgctttgagatcaaaggggagtaaagagctgcagtgatcctagcgccaatccctcagacttccccctagcatggggggcagacagatttttattccctttactctgttctaagaggtttgggtagtaagacttagaaaagatgcaccagctcccaagcagaccagctctgagggggaatcagagcaaggcagacggttctctctcacatattcttccatttcattccaggatgatgtccctggccaagccctatcctggctctcctgttctggtaatgtcctgagcctcccatcctcaccaccacccgaaacggggtgagcacaatgagttctctagggaggctctgtccacgcagctgtgctggagctggcctgggtcatctggggaacagcttacagtgacgtgccataagggattctctttagcctcagccagcatggaatcctgagtaaaatgacttt

SEQ ID NO: 1354 - DNA, 4001 bp, Homo sapiens
tctctgagggcaggggctctccggggagagaaagagcagttccggggcccgcttcgggtttttttgcatagactcttcaggcacggagaacaatggaacagctctgcgcgcttcctccactcgagcaagctttgttcctcccttcccgcctgctcggcttccattagccacagggcaaaggcttcccggtcaaacaggagtctcggcgctaacgcccagagctttcgacacgccctaaaagacctgcgggtgtaggggttggggccagagccggggctgaggtatcggacatgcgcccagatgcgcacagctggcagcccgcccgcccccggccctagacgcttcttttagccagaatcctcacaccgcggggaaatccgacttgcgctcccactcgggatccacagaggaagtggagcctcagctgtgttccggggccaatcagccctcacatctgctctcccacatctgtcctctagatccgggctctcgctggacgctccccttgcaatgcgggatgctcctgtcaagcgcaggccacaccacaacggaggtttccaccagtcccaggttttgccatattgggattctggctctatttctgagagcctgtaaccccctcaccccccatcccattgtccagcctcacctcgggcaggccagagtcgagcccgggttcccgcctgtaatgtctttaagaaggtacacttgagccatgcgcatctggaggtgggccagctcagcacatctgggcgcaatgcccatcacagcctgatcgtgaacaggagggccctccgggaaggcgcaaggggagggggcttcgctttccccacaccttccccagcagctggttaggagaaagccaggggcggggcggggcggggcggcaggacttacccagcatctggctgaagagcagctgctccaggtctcccagcacggtcaccaccagctcggggtccaccttgaggaaggcgcgctcctcctggcccttggcagaggggacaggcccagagctcttttgcgccttggccttgctggagagcagctcgtcgtccgatttgccatcttcgctcacggccgcttcaggcgccttgctgagcggcttgacctccgcatagggtcctcgagggatccggctcggctttcccaggttgggcgcgagcggagccaggggggtcttggcgccgcccgccgggctgcccttggcctggaagagcgagtgctccgacttggacagcgtcttggacatcagcggagcttcacggcccttggaccccaccttgcctaagcctttgggcgccttggccatatcgtcgctccattcgggctcataaagctgcagctttttctcggagtccgtgagaaaagagaggttggtgagtgacttctgcttgcgcaggttggaggcgggcggcccgccggggacacggctgtccacgctgccggacttgaagaccttcagctcagccgcgctggccttggccatgccgccgccgccgccgggcgccttggcgcgcttgggcagcatgcctctgccgtccgccgctgccgccttcctgccggcgccccgcggttcgtccgcgccctcgtcgccgccgccgctgctcagctccacctcgggctgcacgctcttgacgctgctgcccagcattctgcccgcgaggagcgcatggacgatccgcgcgtctgcaggcacggggggagggggcagggggcgggagcgcaggaggaggaggcgggggaggaggagggggagagagaggacggaagaaaccgaggaagaaggggagagaagggggagagagcgagggaggagggagagaggcaagccgagggcgcaggggaaagaaacgcgaggaaggaagccgggaaaaaggaaagagcagggaagccggggagcgatagggcggggtcggaggaaaaggggcggggcggcggggaaaatacaaattaaaatttaaaaatcagtcaaaggaaggatggaagccccgcggctcctccggcgcccagcggtgcttttgctttggtgtccggatcccagcccgcggcctgcctgcctgtcagtcccgtggacaccgcactgccgggcagcgccccggccgcactcagccagccagccagcccgagtcgaggctgcaggctgcagctccgagcagaggaaggagggaaggggaaggcggggagcaaacaggaggaggggagcgagtgtgcgcacggggagggaggtgggggagagatagtgtgtctatttctggctcgggagggggaggtatctgcgagcggagctccaggggcggatgagtggggggtagggggaaataaaggaaaagcagtttttctcccagctttccgcgtagaagcggggcgggttcttggattctcggagggcacggggaccccctgccgtgtccaggataaagatctgttgaggaggtgtggaggtgcaggtaaaagagacggagggagggcggctcagaatgcgggagggaaagtgggcccgtgggcctgagagagatgtcgggagaggggtggaggaatggtatccagggtgctcattcccctcccccaaccccaaaccgtctttggttttcccccaggaaactcccagtcccgccctacttcagtctctgaggctcaaggttgccctcctgagcccaggaggtaggggatgggggtaggacacgggtggcttggagagaaggggcctagcgttgactggggagggggctgagggctttgtaggggaaggagtaactcttgagatcaggaaactgggtttctattccaattagcaatgtgaccttgtcaaagtcattgaacccctctggttctgttttcttttatagtggttataataccagcttcacaggtagaagggctttggaactgtaaaggcctgtgtcaaacctagggaatcaagaggaggctttgcactgggtcccttgcctgccagagttaagcagagcagcagagtgcttttaaaagatgtttcccaagcccttcttcctttcctcctaactggacccaggggacagggatgaggtggagggggaacaagagccagatggagtagtctgcagtttgcctaggactgtacctcagtagaggggacactgcccatcctcaaatggcctcccaagtcacagccaggttgcctgagcaaaaggctctcaggagaaagtggaggggaattctctgaaagcaaagcttgctccaggaggggtaggcccaggtggagccacactctagggattataaagccctaagaactttttgccagaatgtctaaccatcagattatctccccaccccaaacccaacctccatctctctagctcctttcctccctttctcctagaatctgaagaacgctgtgtgtgagtctcatggttcacacactctcctaacactaatcatcacctgctgcctggtgtgaaatgtatttgtgtctctatctgtctcccccgccagcgcaggatctctccgggtgtagaactgtgtcactcagcaccttgcatggagcaggtgttgcaactctgttggttaaatggatttggaggcctgagcactgtacgctgggtttgtaccctgcatgactcttgggttctggtgttatctcaggactctctgccttccagattgagatgccataaaatctgccgtgacagggatcatagcagaaaggataagtggcacgagaatatagagttctcaagcagagaagtgtttggtaagaagcatggactcttggctgtcttggagacatagaaaaaaaggtggcgattctgtccttgaggaactctggactcttgtatttcctgtctggcagggaatacaaggtagacaatacaagacttgggaaaataataatcctgtccctgtgaaaaaagcaatgtcacacacatcaacacattcatctcaggtagacggacatgggtgtatatattccaattataagaataacaagaggagtggaggacaggtttacaagaggattc

SEQ ID NO: 1355 - DNA, 4001 bp, Homo sapiens
aaggcaggcggctgccccctttgccgccgcttgtaaacgatcagaatcgccccgccctgggagcgggccgggcaggtggcccgcagcagggcctgtcgtccagccggcctcgcgggggtggaattcttaagaaaactgagcccccggaaaggctggctctccctgccccagactcaattccagggagatgacccgggccaggcctcggggccggcgggaggcagggggagggtttgccgcacccggtctaggaaactattcgtgaaccccgctgggggaaggcgagcctccgacactgggggattgtctggatcggagggcgggggatcagggagaggcgcagacacagggcgagacccccacagagggcagcgcagagacagagagagggagagaaaagccagaggcagagacacaaacgcgggcagccgaacacggaggcaggcggggaacggaaagagacgggcagaccaggggaaagtgagcggcggaaacggagcgacggagagacagacacacggacgtggggaccgaagcagagggggccgcgggaggcggaaacgtccagagccgagaggcgcggcgcggcgaggcccgggcacggccgggggacatgcgagcccggcccgcccggccacgcatctccctccctcgctccctctctcccccggccgcggaaactccgatccagaaacggaaccctggggcgagtctggggacgggctccggacgcggcggtgccccccggccaccccgtgccgcgcccacgtccccagcgccggcgtccggaggcgcccgccaggtcccccagggctcctgagctcggcggcggcgcctccacccggtgcccgcggccgccggacgcgccgggggacgcagctccgggctgggggcgcggcactgcccccgcggccgaagcctctggaagccgggcgcccgcgtgccgacccgggcgggacttaccgcgcgcgcccgccggtcctgcggagctgggtgcgggggtcgcgggcccgggcgccccaggaggctcggcgaggcggccggcagggcggggggcggccccgcgacgctcggctgggctgcgctgcgcgctgtctgcggccccgggcgggcgcgcggcgcgggggagcggctccgacgtcagggtggctccctccaaacagggcgcgagggcgggggcagcggggagggccgcgcgcagaaagagcgggcgggcgcgcgcggcctctccctccgggtgcgcaggagggggcgccgcggcggcaggggccccgggccctctcctggcccgcccgccccgggctgagcttcggcgcgctccgacggcgtggtggggcggccgggacgcctggccggcgcccgagaggcagggcagcccagccgggcgccctggcccgttcttaagcgccctccccgggtttctctgcgcttccactctctccgcccgacttttaccgagcctgggccgtcaggccgtgccaggcctcggggtgacaaagatggatgtgtcctttttgtgggcaccgggcattgcagacttgccccgagagtggggcgccccagcccgccgcgtcccggcaccaggagtccccagttctgcggtgcacctcatcccgtccgctccggcatgcgacccggttcaagtccgtgctgttggtagcctgggttgctcagccttgcctagtgttatcctagtgtcgctctcggccccacgcccttggcttaagcatcccgaaaagccccagggacttattaggaactaaaaagccagcaaatgaactcacttctctgactcctgggaagagtggagctcctggccccagcttccagcctcacctcgggggttcctatctaatcagtgggcacttgggtggattgcggccgtaccttctctattctgtgtgcttaacaacggggtgagaaaataactttgcttctggaaagtggtggcccagggacaccactgggacacgattgtaggacttggggattttgctttacagcatagttacctgtgtccatgtgttttacctagcttggctggaaacttccagatagacacagccctgcttgtctgactcatgaggttgccgggcatcctgggtggctcctagtggcctgctgggaactccctggtgtactccagcctactcgcaccctccacacccagcctgcatctgcgcctcctagctgttgcctgcgcccttccctctgcccggaattcccttcccctcctttcatctctggcaaacattcttccagctccagattggaaagccttcccaagaccctttgggagcatctccctcctccagtgtgatcctggagcacaggatgagaacttctgttcatgtcaatttccctctagaataactgtgtacatctcttgggcaaacattcttccagctccagattggaaagccttcccaagaccctctgggagcatctccctcctccagtgtgatcctggagcacaggatgagaacttctgttcatgtcaatttccctctagaatagctgtgtacatctctttcctccattagaccttgagggcaggaatcgtgtttatttcagtgtctccattgcttatgggcaggccaggtgagatgtacaatgtatttggttgaatgaagttgttgttgttgttgttgttgttgttattattattattattagagacagaattttgctcttgttgccctggctgaaatgcaatggcgtgatctcggctcactgcaacctctgcctcccaggttccagcaattctcagcctcccgagtagctgggattacagacgcccaccaccacgcccagctagtttttgtatttttagtagagatggggttttgccatgttgcccaggctggtctccaactcctggcctcaagtgatcctcccgcctcagcctcccaaagtgttgggattataggcatgaaccaccacgcccagcgaataaagtaattattatcccccattaatgtagcacagataggtcttcccttaatggtaactatgaccgttataatagttcacacatattgagcaccttaccatgtgcctcatcccattgcaagctgttgccactctcacaataaacctatgaggtaagtattgtctctgttttaaaagtgccaggcgcagtggctcatgcttgtaatcccagcactttgggaggccaaggcaggaggatcacttgaggtcaggagttcgagaccagcctggccaatatggcgaaaccctctctctactaaaaatacaaaaatcagccaggtgtggtggcgtgtgcctgtagtcccagctactcgggaggctgaggcaggagaatcacttgaacctgagaggcggaggttgcagtgagccgagatcgcaccactgcactccagcctgggaggcagagtgagactccatctcaaataaataaataaataaacaaacaaacaaataaaataataaaagtgaaaaaaatcccgaggctggaggatcacttgatcccaggagtttgaggctgcagtgagctatgattgtgccactgtactccagcctggacaacattgcagaaggctaattgtggaacctaatgagcttgtcactccagcaaggccttgtctcaaaaaaaaaaaaaaaaagtgaaaaaaggaacgtcaagagaaaggttaagtaactcgcctaaagtcacacagtaagagcccatgccagctagtgtctgttggataactatataccatgtacggcagaaaccagcctcactgcactgtacacagtagacactcaggaaatatttaccattttgcagccaaagcttacccccgccatctttcatgcagaccccgagcagggtagaaagtagagttctacattttgtaagaatccactcccacattgcagaaagctaattgtggagcctgatgagctggtcagatcacacatagagccaggagtagaagccacaacttccagccagtgcccttgacagggcagcccaccatctctcaaacaccggg

SEQ ID NO: 1356 - DNA, 4001 bp, Homo sapiens
agggctctccctccccatcttcacctcctgcttccagaacctcctcggggaacctccccacacttggccccagctgatggagacggacgattctacctgtgggctcagcattcaggtgacaccacagtccgcatgcacaacgagcacgcagcgtttgtggctggtggctttcaaaccagatgctccccctcccctgcctctcccacctttcctctccccccacactcactaagggcagggtctggctctcctcctccattctccacaattatgacagactggggttcaaatcttagctcagccattctaatctttctctttttatctttatgtttttatttgtaacaggatctcactctgttacccaggctggagcgcggtggcacaatcatagctcacatcagcctcaaactctggggctcaagtgatcctcccacctcagcctccagaatagctggtggtacaggcatacaccaccatgcccagctaatttttttgtattttttgaagagacaaggtctccctttgttgaccaggctggtcttgaactcccacttcagcctcccaaagcactaggatcacttggccccattctaacctttctgtacctcagtttcctcatctgcaaagtggggacagtgctaatatccagctcacaggacagctgtgacaattaaactgaagaatacatggaaatctctggagagatcgcccatcatagttaattcctcagtccatgtcactttaagtgctagcttgggcctcttatcctccctggcctctgcctgctcccttctgcccctcgctcccacaggatcctcggcaggtcctgaggctatttcagtctgagctgcatctgccccagtgaaactggatttagggaaaaccttgaggtgaaactccagcaagtgggatgacagctgggaatggattttagaaattgtcaagggccacccaacatgattccctatctaaggtgggaactgagaggaagatcccactcagactctaagacagggtcgtggagacaccagcctcctccagaatccaacttcaagaaaacaggctgtgccccactgccaggctgagcatgctgctgggtgcagagggtgtggagggtggctgggctgcagccctaggcttggggcttggcaagggcggggcgatcgctccaggtcttgaaatgagcacagggacttccttgaatggtgcaactgaaattgttgctctgtgaaggggcaaggcagtgtcaggcttggggctccctgctcacccaggtcaggccccggctctggtcagcccaaccgggtttcctgggctcactctggggtttgaggatgagttctggccaaagctcatacattggctttctgtgtgcctggagtcaggagagtctaatggttatagctcgagccactgaccatttgcttcccccctcagcttcacgtttgcatctgtaaaatgggcagcctggcctgggaacgtccatttcagcagatcccccagggaggagcctggctccagcatactgcttaaggccgctgtgattccacgaccccagtctcacggcagggtggcttttccttccttccttcagcactggggagagcatgagtcaactgtccagagggcggacacacagggccgaccccgtgccacccaggcctgcctgcatcttccagccctgaccacctctgtgccagcccccaaacccaggccacggccctccttaccgcagaccctcctgcccgcaaacgaaaaacagtctccaaaacaaatccatgctaatgagctgctgcagggccaggctgcacatctgctcagcagaagttccactgcagacctcaccaacaaccctgcccgctccggcagcctccgacccttgaggttgtgggtggggggaagcagctaaactcagcctgaaatttcactttaaaataatgaggcgatatccctggccgatgcagaacacctactcccctgtccacccctccaaaacacaggcccgggagagaggtccagcttgcaggggtgggtggagaggggtaggggtcaccgaggaaacgctgcagcctcgccttttctttggccccaactcaaggcaaaccacgcccaagcagccccagcatctgggggagtctagggaggccccattccgcagtaacaaagggtgaggggctccttgttgacaaattgcttccccgccagcgcccggtctttggcctccagccctgacctctgttttcctggggtgcccctagttacaggctggtggcgtccagcttggggagcgagggcctccgaaagcctggaagtgtggctttctcccttgatgcccgccaacctccggccacgccaaggcaggcggctgccccctttgccgccgcttgtaaacgatcagaatcgccccgccctgggagcgggccgggcaggtggcccgcagcagggcctgtcgtccagccggcctcgcgggggtggaattcttaagaaaactgagcccccggaaaggctggctctccctgccccagactcaattccagggagatgacccgggccaggcctcggggccggcgggaggcagggggagggtttgccgcacccggtctaggaaactattcgtgaaccccgctgggggaaggcgagcctccgacactgggggattgtctggatcggagggcgggggatcagggagaggcgcagacacagggcgagacccccacagagggcagcgcagagacagagagagggagagaaaagccagaggcagagacacaaacgcgggcagccgaacacggaggcaggcggggaacggaaagagacgggcagaccaggggaaagtgagcggcggaaacggagcgacggagagacagacacacggacgtggggaccgaagcagagggggccgcgggaggcggaaacgtccagagccgagaggcgcggcgcggcgaggcccgggcacggccgggggacatgcgagcccggcccgcccggccacgcatctccctccctcgctccctctctcccccggccgcggaaactccgatccagaaacggaaccctggggcgagtctggggacgggctccggacgcggcggtgccccccggccaccccgtgccgcgcccacgtccccagcgccggcgtccggaggcgcccgccaggtcccccagggctcctgagctcggcggcggcgcctccacccggtgcccgcggccgccggacgcgccgggggacgcagctccgggctgggggcgcggcactgcccccgcggccgaagcctctggaagccgggcgcccgcgtgccgacccgggcgggacttaccgcgcgcgcccgccggtcctgcggagctgggtgcgggggtcgcgggcccgggcgccccaggaggctcggcgaggcggccggcagggcggggggcggccccgcgacgctcggctgggctgcgctgcgcgctgtctgcggccccgggcgggcgcgcggcgcgggggagcggctccgacgtcagggtggctccctccaaacagggcgcgagggcgggggcagcggggagggccgcgcgcagaaagagcgggcgggcgcgcgcggcctctccctccgggtgcgcaggagggggcgccgcggcggcaggggccccgggccctctcctggcccgcccgccccgggctgagcttcggcgcgctccgacggcgtggtggggcggccgggacgcctggccggcgcccgagaggcagggcagcccagccgggcgccctggcccgttcttaagcgccctccccgggtttctctgcgcttccactctctccgcccgacttttaccgagcctgggccgtcaggccgtgccaggcctcggggtgacaaagatggatgtgtcctttttgtgggcaccgggcattgcagacttgccccgagagtggggcgccccagcccgccgcgtcccggcaccaggagtccccagttctgcggtgcacctcatcccgtccgctccggcatgcgacccggttcaag

SEQ ID NO: 1357 - DNA, 4001 bp, Homo sapiens
cagggagatgacccgggccaggcctcggggccggcgggaggcagggggagggtttgccgcacccggtctaggaaactattcgtgaaccccgctgggggaaggcgagcctccgacactgggggattgtctggatcggagggcgggggatcagggagaggcgcagacacagggcgagacccccacagagggcagcgcagagacagagagagggagagaaaagccagaggcagagacacaaacgcgggcagccgaacacggaggcaggcggggaacggaaagagacgggcagaccaggggaaagtgagcggcggaaacggagcgacggagagacagacacacggacgtggggaccgaagcagagggggccgcgggaggcggaaacgtccagagccgagaggcgcggcgcggcgaggcccgggcacggccgggggacatgcgagcccggcccgcccggccacgcatctccctccctcgctccctctctcccccggccgcggaaactccgatccagaaacggaaccctggggcgagtctggggacgggctccggacgcggcggtgccccccggccaccccgtgccgcgcccacgtccccagcgccggcgtccggaggcgcccgccaggtcccccagggctcctgagctcggcggcggcgcctccacccggtgcccgcggccgccggacgcgccgggggacgcagctccgggctgggggcgcggcactgcccccgcggccgaagcctctggaagccgggcgcccgcgtgccgacccgggcgggacttaccgcgcgcgcccgccggtcctgcggagctgggtgcgggggtcgcgggcccgggcgccccaggaggctcggcgaggcggccggcagggcggggggcggccccgcgacgctcggctgggctgcgctgcgcgctgtctgcggccccgggcgggcgcgcggcgcgggggagcggctccgacgtcagggtggctccctccaaacagggcgcgagggcgggggcagcggggagggccgcgcgcagaaagagcgggcgggcgcgcgcggcctctccctccgggtgcgcaggagggggcgccgcggcggcaggggccccgggccctctcctggcccgcccgccccgggctgagcttcggcgcgctccgacggcgtggtggggcggccgggacgcctggccggcgcccgagaggcagggcagcccagccgggcgccctggcccgttcttaagcgccctccccgggtttctctgcgcttccactctctccgcccgacttttaccgagcctgggccgtcaggccgtgccaggcctcggggtgacaaagatggatgtgtcctttttgtgggcaccgggcattgcagacttgccccgagagtggggcgccccagcccgccgcgtcccggcaccaggagtccccagttctgcggtgcacctcatcccgtccgctccggcatgcgacccggttcaagtccgtgctgttggtagcctgggttgctcagccttgcctagtgttatcctagtgtcgctctcggccccacgcccttggcttaagcatcccgaaaagccccagggacttattaggaactaaaaagccagcaaatgaactcacttctctgactcctgggaagagtggagctcctggccccagcttccagcctcacctcgggggttcctatctaatcagtgggcacttgggtggattgcggccgtaccttctctattctgtgtgcttaacaacggggtgagaaaataactttgcttctggaaagtggtggcccagggacaccactgggacacgattgtaggacttggggattttgctttacagcatagttacctgtgtccatgtgttttacctagcttggctggaaacttccagatagacacagccctgcttgtctgactcatgaggttgccgggcatcctgggtggctcctagtggcctgctgggaactccctggtgtactccagcctactcgcaccctccacacccagcctgcatctgcgcctcctagctgttgcctgcgcccttccctctgcccggaattcccttcccctcctttcatctctggcaaacattcttccagctccagattggaaagccttcccaagaccctttgggagcatctccctcctccagtgtgatcctggagcacaggatgagaacttctgttcatgtcaatttccctctagaataactgtgtacatctcttgggcaaacattcttccagctccagattggaaagccttcccaagaccctctgggagcatctccctcctccagtgtgatcctggagcacaggatgagaacttctgttcatgtcaatttccctctagaatagctgtgtacatctctttcctccattagaccttgagggcaggaatcgtgtttatttcagtgtctccattgcttatgggcaggccaggtgagatgtacaatgtatttggttgaatgaagttgttgttgttgttgttgttgttgttattattattattattagagacagaattttgctcttgttgccctggctgaaatgcaatggcgtgatctcggctcactgcaacctctgcctcccaggttccagcaattctcagcctcccgagtagctgggattacagacgcccaccaccacgcccagctagtttttgtatttttagtagagatggggttttgccatgttgcccaggctggtctccaactcctggcctcaagtgatcctcccgcctcagcctcccaaagtgttgggattataggcatgaaccaccacgcccagcgaataaagtaattattatcccccattaatgtagcacagataggtcttcccttaatggtaactatgaccgttataatagttcacacatattgagcaccttaccatgtgcctcatcccattgcaagctgttgccactctcacaataaacctatgaggtaagtattgtctctgttttaaaagtgccaggcgcagtggctcatgcttgtaatcccagcactttgggaggccaaggcaggaggatcacttgaggtcaggagttcgagaccagcctggccaatatggcgaaaccctctctctactaaaaatacaaaaatcagccaggtgtggtggcgtgtgcctgtagtcccagctactcgggaggctgaggcaggagaatcacttgaacctgagaggcggaggttgcagtgagccgagatcgcaccactgcactccagcctgggaggcagagtgagactccatctcaaataaataaataaataaacaaacaaacaaataaaataataaaagtgaaaaaaatcccgaggctggaggatcacttgatcccaggagtttgaggctgcagtgagctatgattgtgccactgtactccagcctggacaacattgcagaaggctaattgtggaacctaatgagcttgtcactccagcaaggccttgtctcaaaaaaaaaaaaaaaaagtgaaaaaaggaacgtcaagagaaaggttaagtaactcgcctaaagtcacacagtaagagcccatgccagctagtgtctgttggataactatataccatgtacggcagaaaccagcctcactgcactgtacacagtagacactcaggaaatatttaccattttgcagccaaagcttacccccgccatctttcatgcagaccccgagcagggtagaaagtagagttctacattttgtaagaatccactcccacattgcagaaagctaattgtggagcctgatgagctggtcagatcacacatagagccaggagtagaagccacaacttccagccagtgcccttgacagggcagcccaccatctctcaaacaccgggaggttcaagaacaacaccaaccccctaatcagggacaaagggtttggagttgagtcaccatctgtctggtgacgggaaagctacagtgtgggcagggggcctgggaagtaacttggtagtaatatctacccattttgtgccaggcattatgctggtcactctgtctgcttcatctcctct

SEQ ID NO: 1358 - DNA, 4001 bp, Homo sapiens
cgaggtggcagatcacttgaggtcaggagttcgagaccagcctggccaacatggcgaaaccccgtctctactaaaaatacaaaaactagccgggtgtggtggcacatgcctgtagtcccagctactcaggaggctgaggcaggagaatcacttgaacccgggaggcagaggttgcagtgagccaagattgcaccactgcactccagcctgggggacagagcgagacttcatctcaaaataataataataataataataataattttatggcagcaccattgtgtacgtggttcatcattgtgtggtgtgtgactggatattaatttattctgtcctatgataactgcctgatcctattctttcccccatttttagatgaagaaactgaggcacagagaggccaagaaatctgcttgggcttacactgttagtaaacaggagaaccgggatttgaacctggagggtagcaggttaacccccagctacccttgcaggtcaaaaggttcaccgaagagaaagaagcaagaaacgatggaatctggagtcaggatgaggcctggagctcccaccactgccccagccgactgcgcctctcattcctgttaacaccctagcgttcagccactgcctggactggaagcttgggggctccacagaccagagttcaaatcccattcctgactccctagccaaccgtcttgtggccatggctgaccctggctcttggagccctggtaaaggtatgtgtgacacgatcctccctcatgggggcgccgtgaggctttaaaggaggtgtccttggcacaggtgagtgtcttcccaaccccacccacccgccactcccaaatccaagccctccacttcctcagcggccctctgccaatgcctggtacattctgagctgccgcccacacagaaaggaaattccccaggaggtgacaacagcagacccattttggcaccgtggaaactgaggcacaggtcaaggaagtgacccacccgtagctcccactccggggaagagggcagggaacaaacacagcagccctgccctggttgctttcctgaaagtcttggtccagagggtcccccaggaaggccagctccggggtcaggcctgtgacacctctttcctgagatgcctgccaaaactgagacgccggggcccggccctcctcgtgtgaccccgccaggtatgaggcacggcctgggcacctgaatgtgctccccacgggactctgaggcccagccaggccaggagcaacggcctcccagcccccaggaaaggggcttcgattaacaacgctgccactgaggccccccagcccactgcctggattccggtacctggaaaggcatcctaaatgcaccctaaatacacaggagtggcctagatttcaaggaacacttacttcttcctgactcccgcccaccgtgaaaccctttgtagagtggattagctttggtataacaagtgaaccatcctccccaattcctcttctgggttaagtctgaatattcaaggtcactcaaggccagatataccaggattttcaaggtagagtgtatccactcaccccagacccacacacacacaaaagcaggcataccccaaaccacctgtgccccctatgaacgcagaacacacagacgcatatataagcatgcctatatatgcacaagaaaatgtacatccgcacaagcacgcacacacacgcgcgcacacgcacacacacacacacacgcacacacacacacaccaggcctttcctgttaccggttccagcaaccactcggtgcagagccgtggagggcagggctgacaaatcctcggtggaaagggcagggctctccctccccatcttcacctcctgcttccagaacctcctcggggaacctccccacacttggccccagctgatggagacggacgattctacctgtgggctcagcattcaggtgacaccacagtccgcatgcacaacgagcacgcagcgtttgtggctggtggctttcaaaccagatgctccccctcccctgcctctcccacctttcctctccccccacactcactaagggcagggtctggctctcctcctccattctccacaattatgacagactggggttcaaatcttagctcagccattctaatctttctctttttatctttatgtttttatttgtaacaggatctcactctgttacccaggctggagcgcggtggcacaatcatagctcacatcagcctcaaactctggggctcaagtgatcctcccacctcagcctccagaatagctggtggtacaggcatacaccaccatgcccagctaatttttttgtattttttgaagagacaaggtctccctttgttgaccaggctggtcttgaactcccacttcagcctcccaaagcactaggatcacttggccccattctaacctttctgtacctcagtttcctcatctgcaaagtggggacagtgctaatatccagctcacaggacagctgtgacaattaaactgaagaatacatggaaatctctggagagatcgcccatcatagttaattcctcagtccatgtcactttaagtgctagcttgggcctcttatcctccctggcctctgcctgctcccttctgcccctcgctcccacaggatcctcggcaggtcctgaggctatttcagtctgagctgcatctgccccagtgaaactggatttagggaaaaccttgaggtgaaactccagcaagtgggatgacagctgggaatggattttagaaattgtcaagggccacccaacatgattccctatctaaggtgggaactgagaggaagatcccactcagactctaagacagggtcgtggagacaccagcctcctccagaatccaacttcaagaaaacaggctgtgccccactgccaggctgagcatgctgctgggtgcagagggtgtggagggtggctgggctgcagccctaggcttggggcttggcaagggcggggcgatcgctccaggtcttgaaatgagcacagggacttccttgaatggtgcaactgaaattgttgctctgtgaaggggcaaggcagtgtcaggcttggggctccctgctcacccaggtcaggccccggctctggtcagcccaaccgggtttcctgggctcactctggggtttgaggatgagttctggccaaagctcatacattggctttctgtgtgcctggagtcaggagagtctaatggttatagctcgagccactgaccatttgcttcccccctcagcttcacgtttgcatctgtaaaatgggcagcctggcctgggaacgtccatttcagcagatcccccagggaggagcctggctccagcatactgcttaaggccgctgtgattccacgaccccagtctcacggcagggtggcttttccttccttccttcagcactggggagagcatgagtcaactgtccagagggcggacacacagggccgaccccgtgccacccaggcctgcctgcatcttccagccctgaccacctctgtgccagcccccaaacccaggccacggccctccttaccgcagaccctcctgcccgcaaacgaaaaacagtctccaaaacaaatccatgctaatgagctgctgcagggccaggctgcacatctgctcagcagaagttccactgcagacctcaccaacaaccctgcccgctccggcagcctccgacccttgaggttgtgggtggggggaagcagctaaactcagcctgaaatttcactttaaaataatgaggcgatatccctggccgatgcagaacacctactcccctgtccacccctccaaaacacaggcccgggagagaggtccagcttgcaggggtgggtggagaggggtaggggtcaccgaggaaacgctgcagcctcgccttttctttggccccaactcaaggcaaaccacgcccaagcagccccagcatctgggggagtctagggaggccccattcc

SEQ ID NO: 1359 - DNA, 4001 bp, Homo sapiens
ctcacatcagcctcaaactctggggctcaagtgatcctcccacctcagcctccagaatagctggtggtacaggcatacaccaccatgcccagctaatttttttgtattttttgaagagacaaggtctccctttgttgaccaggctggtcttgaactcccacttcagcctcccaaagcactaggatcacttggccccattctaacctttctgtacctcagtttcctcatctgcaaagtggggacagtgctaatatccagctcacaggacagctgtgacaattaaactgaagaatacatggaaatctctggagagatcgcccatcatagttaattcctcagtccatgtcactttaagtgctagcttgggcctcttatcctccctggcctctgcctgctcccttctgcccctcgctcccacaggatcctcggcaggtcctgaggctatttcagtctgagctgcatctgccccagtgaaactggatttagggaaaaccttgaggtgaaactccagcaagtgggatgacagctgggaatggattttagaaattgtcaagggccacccaacatgattccctatctaaggtgggaactgagaggaagatcccactcagactctaagacagggtcgtggagacaccagcctcctccagaatccaacttcaagaaaacaggctgtgccccactgccaggctgagcatgctgctgggtgcagagggtgtggagggtggctgggctgcagccctaggcttggggcttggcaagggcggggcgatcgctccaggtcttgaaatgagcacagggacttccttgaatggtgcaactgaaattgttgctctgtgaaggggcaaggcagtgtcaggcttggggctccctgctcacccaggtcaggccccggctctggtcagcccaaccgggtttcctgggctcactctggggtttgaggatgagttctggccaaagctcatacattggctttctgtgtgcctggagtcaggagagtctaatggttatagctcgagccactgaccatttgcttcccccctcagcttcacgtttgcatctgtaaaatgggcagcctggcctgggaacgtccatttcagcagatcccccagggaggagcctggctccagcatactgcttaaggccgctgtgattccacgaccccagtctcacggcagggtggcttttccttccttccttcagcactggggagagcatgagtcaactgtccagagggcggacacacagggccgaccccgtgccacccaggcctgcctgcatcttccagccctgaccacctctgtgccagcccccaaacccaggccacggccctccttaccgcagaccctcctgcccgcaaacgaaaaacagtctccaaaacaaatccatgctaatgagctgctgcagggccaggctgcacatctgctcagcagaagttccactgcagacctcaccaacaaccctgcccgctccggcagcctccgacccttgaggttgtgggtggggggaagcagctaaactcagcctgaaatttcactttaaaataatgaggcgatatccctggccgatgcagaacacctactcccctgtccacccctccaaaacacaggcccgggagagaggtccagcttgcaggggtgggtggagaggggtaggggtcaccgaggaaacgctgcagcctcgccttttctttggccccaactcaaggcaaaccacgcccaagcagccccagcatctgggggagtctagggaggccccattccgcagtaacaaagggtgaggggctccttgttgacaaattgcttccccgccagcgcccggtctttggcctccagccctgacctctgttttcctggggtgcccctagttacaggctggtggcgtccagcttggggagcgagggcctccgaaagcctggaagtgtggctttctcccttgatgcccgccaacctccggccacgccaaggcaggcggctgccccctttgccgccgcttgtaaacgatcagaatcgccccgccctgggagcgggccgggcaggtggcccgcagcagggcctgtcgtccagccggcctcgcgggggtggaattcttaagaaaactgagcccccggaaaggctggctctccctgccccagactcaattccagggagatgacccgggccaggcctcggggccggcgggaggcagggggagggtttgccgcacccggtctaggaaactattcgtgaaccccgctgggggaaggcgagcctccgacactgggggattgtctggatcggagggcgggggatcagggagaggcgcagacacagggcgagacccccacagagggcagcgcagagacagagagagggagagaaaagccagaggcagagacacaaacgcgggcagccgaacacggaggcaggcggggaacggaaagagacgggcagaccaggggaaagtgagcggcggaaacggagcgacggagagacagacacacggacgtggggaccgaagcagagggggccgcgggaggcggaaacgtccagagccgagaggcgcggcgcggcgaggcccgggcacggccgggggacatgcgagcccggcccgcccggccacgcatctccctccctcgctccctctctcccccggccgcggaaactccgatccagaaacggaaccctggggcgagtctggggacgggctccggacgcggcggtgccccccggccaccccgtgccgcgcccacgtccccagcgccggcgtccggaggcgcccgccaggtcccccagggctcctgagctcggcggcggcgcctccacccggtgcccgcggccgccggacgcgccgggggacgcagctccgggctgggggcgcggcactgcccccgcggccgaagcctctggaagccgggcgcccgcgtgccgacccgggcgggacttaccgcgcgcgcccgccggtcctgcggagctgggtgcgggggtcgcgggcccgggcgccccaggaggctcggcgaggcggccggcagggcggggggcggccccgcgacgctcggctgggctgcgctgcgcgctgtctgcggccccgggcgggcgcgcggcgcgggggagcggctccgacgtcagggtggctccctccaaacagggcgcgagggcgggggcagcggggagggccgcgcgcagaaagagcgggcgggcgcgcgcggcctctccctccgggtgcgcaggagggggcgccgcggcggcaggggccccgggccctctcctggcccgcccgccccgggctgagcttcggcgcgctccgacggcgtggtggggcggccgggacgcctggccggcgcccgagaggcagggcagcccagccgggcgccctggcccgttcttaagcgccctccccgggtttctctgcgcttccactctctccgcccgacttttaccgagcctgggccgtcaggccgtgccaggcctcggggtgacaaagatggatgtgtcctttttgtgggcaccgggcattgcagacttgccccgagagtggggcgccccagcccgccgcgtcccggcaccaggagtccccagttctgcggtgcacctcatcccgtccgctccggcatgcgacccggttcaagtccgtgctgttggtagcctgggttgctcagccttgcctagtgttatcctagtgtcgctctcggccccacgcccttggcttaagcatcccgaaaagccccagggacttattaggaactaaaaagccagcaaatgaactcacttctctgactcctgggaagagtggagctcctggccccagcttccagcctcacctcgggggttcctatctaatcagtgggcacttgggtggattgcggccgtaccttctctattctgtgtgcttaacaacggggtgagaaaataactttgcttctggaaagtggtggcccagggacaccactgggacacgattgtaggacttggggattttgctttacagcatagttacctgtgtccatgtgttttacctagctt

SEQ ID NO: 1360 - DNA, 4001 bp, Homo sapiens
tcaccgaggaaacgctgcagcctcgccttttctttggccccaactcaaggcaaaccacgcccaagcagccccagcatctgggggagtctagggaggccccattccgcagtaacaaagggtgaggggctccttgttgacaaattgcttccccgccagcgcccggtctttggcctccagccctgacctctgttttcctggggtgcccctagttacaggctggtggcgtccagcttggggagcgagggcctccgaaagcctggaagtgtggctttctcccttgatgcccgccaacctccggccacgccaaggcaggcggctgccccctttgccgccgcttgtaaacgatcagaatcgccccgccctgggagcgggccgggcaggtggcccgcagcagggcctgtcgtccagccggcctcgcgggggtggaattcttaagaaaactgagcccccggaaaggctggctctccctgccccagactcaattccagggagatgacccgggccaggcctcggggccggcgggaggcagggggagggtttgccgcacccggtctaggaaactattcgtgaaccccgctgggggaaggcgagcctccgacactgggggattgtctggatcggagggcgggggatcagggagaggcgcagacacagggcgagacccccacagagggcagcgcagagacagagagagggagagaaaagccagaggcagagacacaaacgcgggcagccgaacacggaggcaggcggggaacggaaagagacgggcagaccaggggaaagtgagcggcggaaacggagcgacggagagacagacacacggacgtggggaccgaagcagagggggccgcgggaggcggaaacgtccagagccgagaggcgcggcgcggcgaggcccgggcacggccgggggacatgcgagcccggcccgcccggccacgcatctccctccctcgctccctctctcccccggccgcggaaactccgatccagaaacggaaccctggggcgagtctggggacgggctccggacgcggcggtgccccccggccaccccgtgccgcgcccacgtccccagcgccggcgtccggaggcgcccgccaggtcccccagggctcctgagctcggcggcggcgcctccacccggtgcccgcggccgccggacgcgccgggggacgcagctccgggctgggggcgcggcactgcccccgcggccgaagcctctggaagccgggcgcccgcgtgccgacccgggcgggacttaccgcgcgcgcccgccggtcctgcggagctgggtgcgggggtcgcgggcccgggcgccccaggaggctcggcgaggcggccggcagggcggggggcggccccgcgacgctcggctgggctgcgctgcgcgctgtctgcggccccgggcgggcgcgcggcgcgggggagcggctccgacgtcagggtggctccctccaaacagggcgcgagggcgggggcagcggggagggccgcgcgcagaaagagcgggcgggcgcgcgcggcctctccctccgggtgcgcaggagggggcgccgcggcggcaggggccccgggccctctcctggcccgcccgccccgggctgagcttcggcgcgctccgacggcgtggtggggcggccgggacgcctggccggcgcccgagaggcagggcagcccagccgggcgccctggcccgttcttaagcgccctccccgggtttctctgcgcttccactctctccgcccgacttttaccgagcctgggccgtcaggccgtgccaggcctcggggtgacaaagatggatgtgtcctttttgtgggcaccgggcattgcagacttgccccgagagtggggcgccccagcccgccgcgtcccggcaccaggagtccccagttctgcggtgcacctcatcccgtccgctccggcatgcgacccggttcaagtccgtgctgttggtagcctgggttgctcagccttgcctagtgttatcctagtgtcgctctcggccccacgcccttggcttaagcatcccgaaaagccccagggacttattaggaactaaaaagccagcaaatgaactcacttctctgactcctgggaagagtggagctcctggccccagcttccagcctcacctcgggggttcctatctaatcagtgggcacttgggtggattgcggccgtaccttctctattctgtgtgcttaacaacggggtgagaaaataactttgcttctggaaagtggtggcccagggacaccactgggacacgattgtaggacttggggattttgctttacagcatagttacctgtgtccatgtgttttacctagcttggctggaaacttccagatagacacagccctgcttgtctgactcatgaggttgccgggcatcctgggtggctcctagtggcctgctgggaactccctggtgtactccagcctactcgcaccctccacacccagcctgcatctgcgcctcctagctgttgcctgcgcccttccctctgcccggaattcccttcccctcctttcatctctggcaaacattcttccagctccagattggaaagccttcccaagaccctttgggagcatctccctcctccagtgtgatcctggagcacaggatgagaacttctgttcatgtcaatttccctctagaataactgtgtacatctcttgggcaaacattcttccagctccagattggaaagccttcccaagaccctctgggagcatctccctcctccagtgtgatcctggagcacaggatgagaacttctgttcatgtcaatttccctctagaatagctgtgtacatctctttcctccattagaccttgagggcaggaatcgtgtttatttcagtgtctccattgcttatgggcaggccaggtgagatgtacaatgtatttggttgaatgaagttgttgttgttgttgttgttgttgttattattattattattagagacagaattttgctcttgttgccctggctgaaatgcaatggcgtgatctcggctcactgcaacctctgcctcccaggttccagcaattctcagcctcccgagtagctgggattacagacgcccaccaccacgcccagctagtttttgtatttttagtagagatggggttttgccatgttgcccaggctggtctccaactcctggcctcaagtgatcctcccgcctcagcctcccaaagtgttgggattataggcatgaaccaccacgcccagcgaataaagtaattattatcccccattaatgtagcacagataggtcttcccttaatggtaactatgaccgttataatagttcacacatattgagcaccttaccatgtgcctcatcccattgcaagctgttgccactctcacaataaacctatgaggtaagtattgtctctgttttaaaagtgccaggcgcagtggctcatgcttgtaatcccagcactttgggaggccaaggcaggaggatcacttgaggtcaggagttcgagaccagcctggccaatatggcgaaaccctctctctactaaaaatacaaaaatcagccaggtgtggtggcgtgtgcctgtagtcccagctactcgggaggctgaggcaggagaatcacttgaacctgagaggcggaggttgcagtgagccgagatcgcaccactgcactccagcctgggaggcagagtgagactccatctcaaataaataaataaataaacaaacaaacaaataaaataataaaagtgaaaaaaatcccgaggctggaggatcacttgatcccaggagtttgaggctgcagtgagctatgattgtgccactgtactccagcctggacaacattgcagaaggctaattgtggaacctaatgagcttgtcactccagcaaggccttgtctcaaaaaaaaaaaaaaaaagtgaaaaaaggaacgtcaagagaaaggttaagtaactcgcctaaagtcacacagtaagagcccatgccag

SEQ ID NO: 1361 - DNA, 4001 bp, Homo sapiens
tcagcactggggagagcatgagtcaactgtccagagggcggacacacagggccgaccccgtgccacccaggcctgcctgcatcttccagccctgaccacctctgtgccagcccccaaacccaggccacggccctccttaccgcagaccctcctgcccgcaaacgaaaaacagtctccaaaacaaatccatgctaatgagctgctgcagggccaggctgcacatctgctcagcagaagttccactgcagacctcaccaacaaccctgcccgctccggcagcctccgacccttgaggttgtgggtggggggaagcagctaaactcagcctgaaatttcactttaaaataatgaggcgatatccctggccgatgcagaacacctactcccctgtccacccctccaaaacacaggcccgggagagaggtccagcttgcaggggtgggtggagaggggtaggggtcaccgaggaaacgctgcagcctcgccttttctttggccccaactcaaggcaaaccacgcccaagcagccccagcatctgggggagtctagggaggccccattccgcagtaacaaagggtgaggggctccttgttgacaaattgcttccccgccagcgcccggtctttggcctccagccctgacctctgttttcctggggtgcccctagttacaggctggtggcgtccagcttggggagcgagggcctccgaaagcctggaagtgtggctttctcccttgatgcccgccaacctccggccacgccaaggcaggcggctgccccctttgccgccgcttgtaaacgatcagaatcgccccgccctgggagcgggccgggcaggtggcccgcagcagggcctgtcgtccagccggcctcgcgggggtggaattcttaagaaaactgagcccccggaaaggctggctctccctgccccagactcaattccagggagatgacccgggccaggcctcggggccggcgggaggcagggggagggtttgccgcacccggtctaggaaactattcgtgaaccccgctgggggaaggcgagcctccgacactgggggattgtctggatcggagggcgggggatcagggagaggcgcagacacagggcgagacccccacagagggcagcgcagagacagagagagggagagaaaagccagaggcagagacacaaacgcgggcagccgaacacggaggcaggcggggaacggaaagagacgggcagaccaggggaaagtgagcggcggaaacggagcgacggagagacagacacacggacgtggggaccgaagcagagggggccgcgggaggcggaaacgtccagagccgagaggcgcggcgcggcgaggcccgggcacggccgggggacatgcgagcccggcccgcccggccacgcatctccctccctcgctccctctctcccccggccgcggaaactccgatccagaaacggaaccctggggcgagtctggggacgggctccggacgcggcggtgccccccggccaccccgtgccgcgcccacgtccccagcgccggcgtccggaggcgcccgccaggtcccccagggctcctgagctcggcggcggcgcctccacccggtgcccgcggccgccggacgcgccgggggacgcagctccgggctgggggcgcggcactgcccccgcggccgaagcctctggaagccgggcgcccgcgtgccgacccgggcgggacttaccgcgcgcgcccgccggtcctgcggagctgggtgcgggggtcgcgggcccgggcgccccaggaggctcggcgaggcggccggcagggcggggggcggccccgcgacgctcggctgggctgcgctgcgcgctgtctgcggccccgggcgggcgcgcggcgcgggggagcggctccgacgtcagggtggctccctccaaacagggcgcgagggcgggggcagcggggagggccgcgcgcagaaagagcgggcgggcgcgcgcggcctctccctccgggtgcgcaggagggggcgccgcggcggcaggggccccgggccctctcctggcccgcccgccccgggctgagcttcggcgcgctccgacggcgtggtggggcggccgggacgcctggccggcgcccgagaggcagggcagcccagccgggcgccctggcccgttcttaagcgccctccccgggtttctctgcgcttccactctctccgcccgacttttaccgagcctgggccgtcaggccgtgccaggcctcggggtgacaaagatggatgtgtcctttttgtgggcaccgggcattgcagacttgccccgagagtggggcgccccagcccgccgcgtcccggcaccaggagtccccagttctgcggtgcacctcatcccgtccgctccggcatgcgacccggttcaagtccgtgctgttggtagcctgggttgctcagccttgcctagtgttatcctagtgtcgctctcggccccacgcccttggcttaagcatcccgaaaagccccagggacttattaggaactaaaaagccagcaaatgaactcacttctctgactcctgggaagagtggagctcctggccccagcttccagcctcacctcgggggttcctatctaatcagtgggcacttgggtggattgcggccgtaccttctctattctgtgtgcttaacaacggggtgagaaaataactttgcttctggaaagtggtggcccagggacaccactgggacacgattgtaggacttggggattttgctttacagcatagttacctgtgtccatgtgttttacctagcttggctggaaacttccagatagacacagccctgcttgtctgactcatgaggttgccgggcatcctgggtggctcctagtggcctgctgggaactccctggtgtactccagcctactcgcaccctccacacccagcctgcatctgcgcctcctagctgttgcctgcgcccttccctctgcccggaattcccttcccctcctttcatctctggcaaacattcttccagctccagattggaaagccttcccaagaccctttgggagcatctccctcctccagtgtgatcctggagcacaggatgagaacttctgttcatgtcaatttccctctagaataactgtgtacatctcttgggcaaacattcttccagctccagattggaaagccttcccaagaccctctgggagcatctccctcctccagtgtgatcctggagcacaggatgagaacttctgttcatgtcaatttccctctagaatagctgtgtacatctctttcctccattagaccttgagggcaggaatcgtgtttatttcagtgtctccattgcttatgggcaggccaggtgagatgtacaatgtatttggttgaatgaagttgttgttgttgttgttgttgttgttattattattattattagagacagaattttgctcttgttgccctggctgaaatgcaatggcgtgatctcggctcactgcaacctctgcctcccaggttccagcaattctcagcctcccgagtagctgggattacagacgcccaccaccacgcccagctagtttttgtatttttagtagagatggggttttgccatgttgcccaggctggtctccaactcctggcctcaagtgatcctcccgcctcagcctcccaaagtgttgggattataggcatgaaccaccacgcccagcgaataaagtaattattatcccccattaatgtagcacagataggtcttcccttaatggtaactatgaccgttataatagttcacacatattgagcaccttaccatgtgcctcatcccattgcaagctgttgccactctcacaataaacctatgaggtaagtattgtctctgttttaaaagtgccaggcgcagtggctcatgcttgtaatcccagcactttgggaggccaaggcaggaggatcacttgaggtcaggagttcgagaccagcctggccaatatggcgaaac
